United States Patent Application Publication US 2006/0123505 A1 - sequence listing, part 9

SEQ ID NO: 15400 - DNA, 3143 bp, Oryza sativa
  ref <308>: DATABASE ACCESSION NUMBER: AK065924
  ref <309>: DATABASE ENTRY DATE: 2001-12-06
gagtagagcgagatctggaaggcggccatggcgcgcctcgcgctcctcgccgtccccgtcgcgctcctcctctccctctccttcctcctcctgcgccccgcctccccgccgctccccttctcgcggcagcaagcggcgtccggccccgaccgccgccgcctcctcagggtctacgttgcggagctcccccgcgcgctcaaccacggcctcctcgacctctactggtcgctccccgccgccgactcccgcatcccggcctcctccgaccccgaccacccgccgccgcggcctccgcgcgcgcactcgccgtacccggatagcccactgattaagcagtacagcgccgagtactggctcctcgcctccctccagccgggctcgtcgtccgcgcccgccgtcggggtggtcgcggactggagggacgcggatgtggtgttcgtccccttcttcgcgacgctgtccgcggagatggagctcgggtggggcgccaagggcgcgttccgcaggaaggaggggaacgaggactaccgccgccagcgggaggtcgtcgaccgcgtcaccgcccacccagcgtggcggcgctccggtggccgtgaccacgtcttcgtcttgacaggttttgttaaatattgaggcattctttgacagaccctgtggcgatgtggcatgtccgtaaagagattgctcctgcaattcttttggtggttgattttggcggatggtacaaacttgattcaaactctgcaagcagcaatgtttctcatatgatacagcatacgcaagtgtcattgctcaaagatgtcattgtaccttacactcatttgctccctacaatgcacttatcagagaataaggaccgccccactcttctgtacttcaagggagccaaacacaggcatcggggtggtttggtacgggagaaactatgggacttgatggttaatgagcctgatgttgtcatggaagaaggttatcctaatgccacaggacgtgaacaatcaataaaagggatgcggacatcagagttttgcttgcacccagctggtgacaccccaacttcatgtcgtctctttgatgctgttgctagtctgtgcatacctgtcattgtcagcgatgagattgagctgccctttgaagggatgatagattacacagaattcgccatttttgtctcagtcaataattctatgagaccaaaatggctcacaaactacttaagaaatgtccccaggcagcagaaagatgaattccgaagaaacatggctcacgtccagcctatatttgagtatgatagtatttacccaggtaggatggcctctgctgcacaagatggtgctgtgaaccacatctggaaaaagattcaccagaagttgccgatgattcaagaagcggttacccgagagaagcgaaaacctgatggaacatcgatccctcttcggtgccattgtacatgactcgcgagacatgattgttagtattagcaatcaatcccccatgggaggagttagttagcattccctgccaatttatggattgtttgtagtgcaaatatgagagaaatttcaacagtaggtttatgctcttgttgtcaattgtatttcgtctggagtgattccccgcattgctccatgtgtgaggtttgttggttcactgccatgagaattcatatatgaatctgcccattcggcagacaattttccatattactcagagagaagcttgagacagtacgtagtcccttatatttgttgcttctaaatgatttggctagcgttcacccaaaatgcatgcatgatcatgagcaaaataccttttgattcaacagaaagagatccaatctatgatgtttggcagtaccaaattcaggacatgaaaagcaaaagggagaaattttatagtctcaacaacatgaactgtagccaaataacagataggctgccaacatggtggccaaaggaacggagatattgtcatccacaacatcattgacaggaatacactccactacagtagctgctaatgcaacaagagccagtttaccaagtgccagatcccagcagacagtgaagtaaccaaggcaagagaagtagaacagcatcctgtgatgcaaaagatccatgagttaacaataacaaggagtaacaatgcaaaagaaccagcaatgcattctgaagcaaaaacctacagtgcagatagaaggaagccagaaatgaacattgagatgcttcctatccagctcttgttctcattgaatggcagcttcgcggagccataccttctcccaacaatgtcagcaaagcctgaaaaaataagaaccaagaaggtggatatacttagcagaagcattcatttcatcaagtgaactggggtattacaaaaaaaaactgcagattttcctaaattcccaggagatccaacatcttaccatcaccaccactcatcatcgacaacgaaacaatcccaataggagactggcgccagaagaccaaaacactgaccagcagcacaatgacatagtacagaggacctctcagcaattccctgtaagcaaccaaagatcatgtcaaggaatactattttgatttttgaatgaaggagtatcagaaataaggatcatagcacgaactctggttttccttcacgggtcaccgattttactagagcttcatcagtggaaaggcggagcccgtaggtcagaagccttatgcagttcagcaacgggacaattgccgcgaagaaccgtgcttctgtcgaattactgcgaaaggggcatgattttcttaagatctctagtctgatttggttgtagaaaacatttcgatgctggaagaagcagtggcaagggagacctgaatagtggccaggaagacatgaacaggactccggagagcacatgcacaatttttctgctcaggttctgagattaattatgaaaagaatcagaagttaacaagatataattaagaaagtagcagtccatctgaaccagtcagatcttcccagcaattgaaaataaattcaagatacagatcacatccactgaattgtatataccatattttactctccggataacagtcaacagagctaaagaattgatattttttgaagaatggcggagatcaaagcttcagctccacctc

SEQ ID NO: 15401 - DNA, 1801 bp, Oryza sativa
  ref <308>: DATABASE ACCESSION NUMBER: AK065925
  ref <309>: DATABASE ENTRY DATE: 2001-12-06
gagcgaccactagtggctcggctcggctcgcgtcctcttcctcctcgcatcgcatcgcatcgcatcgcccagatctcccgccgagttagatcctaatccgaggagagactcgagtcatggaggattctgcgcggccgacgcccgctgactccggggagctccccaacggcgcggggatggcggaggatgcggtggtggcgcccgacgcgggggaggctccggaggagggggaggaatcgggaattgcgaacgattcggagacgaacgcggctctgggcgcagagggcgagccctcgcgggcgctcaccatgcgggagctgcttggggagctcaaggacagcggggagccctcgtcggggagatccacgctttcggagggcaatgggatcggatctgccggtgcggagcgcgccagccaggacagcctacagttctcatcccatcatgatgttgccatggacttgataaatagtgtcactggagttgacgaggaaggtcgttctcgtcaacgcattctttcctttgctgccaaaagatatgttagtgccatcgaaagaaatccggaagatccagatgcatactataattgggccctagtcctccaggaaagtgcagataatgtggatcctgattctagttcttcaaaagattcattactcgaggaggcttgcaaaaagtacgctgaagctacacgactctgcccaacgctatatgatgcatattacaactgggctattgctattgctgatcgagccaaaatgcgtggacgtaccaaagaggctgaagaactctggaagcaggctataatgaattatgacaaggcagtccagttaaattggaacagcccccaggccctcaacaactggggtttgggactacaggagctgagcgcaattgttccagcccgagataaacaaacaatcataaaaacagctataagcaagtttcgatctgcaatccagttgcaatttgatttccaccgggctatttacaatcttggaactgtcctgtatgggttagcagaggatacaatgaggtctgcaggtccagatgtctctccaaatgacttgtacagtcagtccgccatttatgtcgcagctgctcatgcattgaagccaaattattcagtttatcgcagtgctctacgtctggttcgatcaatgctacctttaccatatctaaaagctgggtatctaactgctcctccagcagacaacaccattgcaccacataaacattgggaaaggtcagaatttgtcttaaaccatgagggactccagcaggtcgatgcctctgaaagcccttctagcaaaccccttggacatatggggagaagcaaaaaatatattaaagtagctgttgaagatatcgtttcagtgtctgcatgctccgatctaacactgccacctggtgctggcctttgtatagaaacaattcacgggcctttgttcttggttgctgatacctgggagtctcttgatggttggttagatgctatacgcttagtgtacaccatatttgcacgaggaaaaagtgatgtattggcaggtatcattactggttgatctattgttgtatgtacgagtgcgtcgagcaacagatatgtccattttaaccacccatattcttttaatcagcttgattgctccgagtgttttcttccttatctcgcatctgtagagtacaagttgatctgtaggtccctaccaaagtaccaatcataggctacgtccgacacattttttgtatctttgtatgtgtaaaacatgtcaatgtcattgaagtacgactacattatact

SEQ ID NO: 15402 - DNA, 2262 bp, Oryza sativa
  ref <308>: DATABASE ACCESSION NUMBER: AK065926
  ref <309>: DATABASE ENTRY DATE: 2001-12-06
ggcacatcgcggcgcccctatcccgtcagccgccgacccgcgcacacacccatcacgccccttccctcccgcttccccccttccccgctcccccgccgacggcagcacctccacctgcgccactgccggatcgacgggagccgccgatcgtcctcctccgccaaacaccaacctcgccgcacagagccgcgtccccatcccatcagtcgtcaggccacctgcgtgttccccttccccgtcgcccgggcctctccatcggtgatctcctcccttctcaccctcaaacgcccccgtcgattccctgcagcccatcgtatcctaaaaccctacaaccactgacccacatcgtctgtcgccgatcagcgtcgccgtttgttcacaaggagagcggcaaaggaggtcgggactcggtgtagagcgacgagcccagcgaagtaggccgatagctatccgccatagcagtgatgaaggccggctggtggagcgcccctgtcagcgcagctttgcacgggatctcgcgcggccagacataggaatcgcacaaccttctcaatcccgacgctgcgccccgatcgtcgccgctcgccgttggaaccggcaccacgacagccgggaaggaaccagaggtgcatcgcttccagcaccagcgctctgtccctgcatcttccatccccggtaagttgcaattaatcaagacaatccccagaggtcaggtgccaatcccacaagatgttagagttgaaagaactttgagacactgtttgttccaataaccagtattggacctttgtttactaccactcagtatggtcaacttaattcacattatttgcacgcaatatggtgagacaagtgcagtttcaaggtctatactttcatggcgatatatttcattgtttgttctacagctcatgtgtcagctgatcgaaagatttggaagtgatgaagcaggcacatggtaacagtagctctgaagtattatttcatattcaacctatgtacatgaagaattctaaaaaaaattatagatgtagctgcatgtcattcagtgtcgaggcaccccatgctgattttccccatagaaaattgagtctatctcgtatatttaattacattcgctgtaaatactgaacaattcatgtgattttccatcggaaaaaaaaaatcaatctacagtgatatctgagctgctgggctgtgccgtgctgctgctcactttcgctgctgagtgtttctttgcagcgaggagagagaccactttaactagaatgttaagaaggtatttcatgttctgatggactaataatgtctatttcttgccacttattttcagggaagtatatagctgttggaaaagatcactgttctttgatagctcgtaacacacatctgtttgcaattggggtcaacgaagaaatactgagttgcaattacattgcaaatgcaagtggatatcaacacttctgtactgtcaaagttccactcggatagctgcataatagaagcggcatcatcttgcagccaacttgctgaccattgcggcttttattttagatgacagagaaggacgaggtgatcaaactggcatactgccactaaacacaacatatttgaaagaagcaaagaaacaggtgatatattccatactgtttaatttagtattcggaaacatacaagaacgtaaatcttgctaatacaaaactgaaaaaccttaactgtatattagaattaaacttgttaatatcacgtgagactttgaaatacaggtggcatcaagctttgctgctgaaggaggaatggagtgaactgaagcaatgtaatgaatttgtacggtgaggaaggcttggaaagaaacatcggttaaaatacttcctctgaacttttgaatgtccaaagtggaacatatgaagagtacagtagatgaaaaacaaccttgtgagcccaatattttaactgtcacatcagagcctttgggagaaaggaacctggttatgaaaccgtttctttgtgtaaaacatgatgtaaagcttccaaatccagaactacgcattgctagctgttggttgtgctccataggctgtgtttagttccacgctaaaattggaagtttgaagaaattggaacgatatgacggaaaatttagaagtttgtgtgtagtaaagtccgatgtgatggaaaagttggaagtttgaagaaaaaagttggaatctaaacagggccataataatatatctgaggggcggatgcttgttttcatgtctt

SEQ ID NO: 15403 - DNA, 1686 bp, Oryza sativa
  ref <308>: DATABASE ACCESSION NUMBER: AK065927
  ref <309>: DATABASE ENTRY DATE: 2001-12-06
gaggtcacaaaaaaatccccaatcctcgcgtccaccactcatccccatgactccatcgacgtgctcccccggttcccccgcccccgccgccgcaccgcacaccatccaggtccccgccgccgtgctgccccatccagccccacatcaccacaccacgcccccatccaagccgagtccgccgtgggcacatccccatcgagggggcctcaccttcatccccacctgtgacggccgcctccatccactgctccgggaggaacgctacacatgaagtcggagctccgtctgttaaccccgcctgctcctcctaggctaggacgccactgtggctgaggcagacgactctactcggccctatctacatcaacgtgcttcgtaaacgagagactatatacgatatgctaatggtaaggggaccgggttatagcagaatggagggtggagcagctagattctttccagtctggttagaaatactttgtaccttgcattaaattacatttttcttgctgaactgaaattcagttactttcttttagtgaacagctatgcatacatttctacttggttaattattggtgctatttgactatgtcgctgtgacagaaaccggtaattactgcacggcttgagatcatcttgtacctggtggcgcatgcagatggtgcagcattgctgcatggaggatctttggatttttatttttttcccttcagttcttagttttctgctcctgcttctatctgtgctgtcaaattgctttctaaagaatacatttcagcactaagattcacaggtagttggttccatgacagagtatcctaacacatcctattctcccctatcggtttttataaccaattatgcctcttctacactgtaatgagtggtagaccataaattaaagatctgagttaagactgaagattgctaacaccctaatcaaaatggaggagatgttctgttaattgttgcttgcatcttcttctatcggttgtgttttttacagattgtgtgaattgaaaatctaattcagtttttgctagagtgaataagatttcatattttccttacgagagagaggataagattcagtttgttccaaaatatattaatctcctggcaatgcaacacaaaatgacaatcatttcttcaagtgcataatattctaatgttctttttgtagaacattattattaactatttgtgatatcatgcatgaactccagtacacgaccacctcaattttttcatcctctgcaactgtgaccagctgtgtactggagaggctgcagaatatcatggaagcagtacatggagctgattgcaccaagcactctgccatggtcatgatcaggacgagatgtagggctagcgacagagcatggatgcaaattattgctctatcccaacaattggttggatctcccacttgattgaaggtatcatggcaaaggactgggattgatttgtgttgtcaatgcacacatttggttagtcagccactaagatgtgtctattgcctccctggcagagtttgtaagaactgaggctcattccgtttctattgagtcatgtgtagctagctagtatgtagatccattcatgttgtgttcttgcctcatgatgttcttaataataccagagaatctacagcttattatgttcacatgatatttttgtatg

SEQ ID NO: 15404 - DNA, 2156 bp, Oryza sativa
  ref <308>: DATABASE ACCESSION NUMBER: AK065928
  ref <309>: DATABASE ENTRY DATE: 2001-12-06
gatagtgaatagtctatcctcgcatcgcatactcgtgcaacacggcttgcgagcggcggcgcggatggggctctgggagtggccgtgggatcgccggcggcgaggcccgtcgggcttaggccccacctccaccgccgaagaggtcaccgccggcgtagacgccacccacctcaccgccatcgtcacaggagcgacgaacgggatcgggagggagacggcccgagttctggcgaggaggggggcggaggtgatcatcccggcgaggacgatggagagcggcaacgcggtgaagcagagcatcgcggaggaggtcccggggtccaggctccacgtcatggagatggatctcgcctcgctcgactccgtccgccgcttcgccaccgcgttcgactcctcccacacccacctcaacatcctcatgtatgccacactcactcactcactcacatgattgcagtttgcaaaatgttcagaagatgaacagtttcgtgcaggggaaactcttttggtagctgggatatcagttcatttattgcatgtcaaatactacctccatattttaatgtatgacgccgttcacttttcgaccaacggacaaaaatacagagggagtaaatggttatggaaaaaaaatcaaaacaataagatagattagtacttaatatattatttaaaaaatgcaagtttaaatttgacttttaccggttgttataaaaaataataaatttgactgtaaatatgcatctactagttagagtttagttcgttattttcgttacaatttataaaaatcaaatttaaaattgcgcgtttgtggagtgataaattttatttataactatttagttaacatgtaataaatgggtagacgtctagccgggtgattgaaatccctctcctttggtgcagcacttatctgaaactgaactcccttacaaaagtctttttttcttttgctgtgcttgtctgaagaaacaatgcagggataatggggtgccctttcaagctatccaaggatgggattgagctgcagttcgcaacgaatcatgtcgatgaaatcgacggctaggaagaccggcgtgcagggcaggatcgtgaacgtatcgtctattgcgcacaagagaagtgatggttcttgctttgatctgaacaagctaaacgataagtctaggtcagcaatgtgttcatttttattgttaccgcgtacattatcacaatgtaagtatctaaaagtattgttcttgtcctgttccgaaatttataggtacaaaccactcattgcatatgcacattccaaattagctaatattcttcatgcaaatgagctagcaaagcgttttcaggtacacatttttttggccttttctcgtttatcttgttcatgatgattgatgactttgatcgttgaagaaagaattagagtttatgagaatgtcgaaaaacccgactagtagtattagcaacaattaagacaaaatgttagtgcaagcacagttgttcagtgcttgtacttgtgtggtagctaacccatttgatttactcttcattttttagtgatgaaataacagtgtggatatatcaccccttgggaaataacaatcttgattccattcaggaagaaggatgtaatttgactgcaaattccctgcatcctggagtgatcctcaccaatatcactcgttatgtcgtcacaaacagcgtgatggtttcaatcctttctgtgggaaacctctttctgaagaacacacaacagggagctgcaaccacatgctatctggcactgcatcctgaactgaaggatgtctccggcaaatacttcgcggactgcaaggaagccacgccgaggcctgctgcgagagacgcagagctagcgaagaggctatgggatttcagcgaacagctcgtggatactaatcgtcgtggagaattcaacagacaaaaatgacactgtttagactgtctgaaattctgaacctgaccatgtctcaacctgagatccttcagatacagaattttattttttatttctattttttattttttttcaatggaatgatacagcttatataatatgaccatagagctgtttgtcagtactgttgtttgcatgtgtaaacaaattcaaatgcattaataatcagcctgctttttttgcc

SEQ ID NO: 15405 - DNA, 1869 bp, Oryza sativa
  ref <308>: DATABASE ACCESSION NUMBER: AK065929
  ref <309>: DATABASE ENTRY DATE: 2001-12-06
ggctcgctcacgctgttgcgttgcatgcgcaatgtcgcagcagcacggccgcggccacattgcccactgcctcggcggcgccctcgccggccgagacaccgtcgccgtctccggcaatcgccgcctgaccggcgctggcctcgccgacggggcgcgtaggctggccgccgccctctccaacctcggcgtccgccgtggtcacgtcgtcgccgtcgtcgccttcaacagcatcgagtacatcgagctgttcttagccgtcacttacatcggagggatcatcgctcctctcaactaccgctggagctttgaggaggcctcacaggcactggagcttgtgcagccaacagtgttcatcttcgatggcagctacagctcatgggcgcttcggctgaaggagagcaacagcttgacatcggttaatctttacctcttcctggggaatctctgcagcatcagccaagctgcaaactttgtatcagttgtatcagttgagcagatcaagaggagctcaggaggaactactagagcagtagagcctgtgtctgctccaaatgatgttgctctgatatgcttcacatctggcactacgggacgaccaaagggtgtagcgataagccatacatctttgatcattcaatcccttgcaaaaattgccattgttggctatggtgaggatgatatctacctgcatacagctcctttgtgccatattggagggatctcttcatgcttggcaatcctgatggctggaggctgtcatgtcctgatacctaaatttgacgtgaaatcggctttcgacgccatcctagaacacagagtgacttcgttcatcactgttcctgcaatcatggctgacctactatcctatgctcgaagatattgaaccacgggatgaccgtgacaaagattctcaatggcggtggcgggttgtcgagtgaattgataactggagcttctcacttatttcctaatgccactatcttctcagcttatgggatgactgaggcctgttcatctctgacattcatggttctcaccaggccaaaaattcaagaacctaaggaccagttaggcagctcttctgaaggtgtgtgtgttggcaaaccagcgcctcatattgagatacagatcaacagaaatggaagtaacagtagttcttcttcaccaattgggaatatcttgacaagaggcttacatacgatgtccggatactgggtgaacaacagcatagacacatcagattctgtcaggaatggatggctcgacaccggcgacattggatgggtggataaaactggtaatctgtggctcatggggcgacaaaagggaagaatcaaaactggaggtgaaaatgtgtacccagaggaggtagaatctgtactgtctcagcacccaggtctagctaaagccgtggtgattggcatgccggatagtcgtctcggggagaaaattgttgcctgtgttagcatcagggatggctggaactgggttgatgcaagagctgtgcacaagggggaaggcagagaagtctctgcacagatgcttcaagaccattgccgtacaaacaaattgagcagattcaaggtgccaaggatatattatcagtggagtaaaccatttccagtgacaacaacagggaaaattagaagagaacagttaaaggctgagatattagcaagcatgaaactacacagcaatttatagtcttaggctattgttagtgaccatggcagcacaaaaaagcacattatgttcttcatcttcagctggtggtacatgcacatcacagcaatatcccaattttggtctctctttttcatttttacaggcagaatgctatcctacttgttatttactgaatttgagtcc

SEQ ID NO: 15406 - DNA, 2752 bp, Oryza sativa
  ref <308>: DATABASE ACCESSION NUMBER: AK065930
  ref <309>: DATABASE ENTRY DATE: 2001-12-06
gctctcctcccgtgcttctctctcttattcctctctctctctctctcttgagggctcgcgcagagcgaaggcgagaggaggaggaagaggaggagagggagccctagccctgcccccagccggcgcaggcggtcgctagggttagggtctccccccgcccgcgccttccttccttccggccttttcccgtcccctcacctgcggcgtgtgcgcttttctcggcctcgcggcggcgcggcgcggcgcgagccaatgccgtgtgtctgagtctgacccgttgattcttggcggattgatctggaggtgggcttgttggggttgctgtggtagccgggagggaggggaagcggcggcgtttgtttctgaggatatttttggtgcgagatccggcggggcggcgagatgcagcaggatcagcgcaagaagagttctacagaggcggattttttcacggagtatggcgatgcaagtcgatacaagattcaggaagttattggtaagggaagctatggggtggtgtgctcagcgatagatgtccacactggagagaaagtggcaatcaagaagatacacgatatctttgaacacatatctgatgctgcacggattctccgtgagatcaagcttctgaggctgctaagacatcctgacatagttgagatcaagcacattatgttgcctccatcgaggagggatttcaaagatatttacgtagtttttgagcttatggagtctgatcttcaccaagttataaaggctaatgatgacttgacgaaggagcattatcagttctttctttaccaactactccgggctctgaaatacattcacactgctaatgtttatcaccgggacctgaggccgaagaatatattagctaattccaactgcaaactgaaaatttgtgattttggactggcgcgagttgcattcaatgatactccgacaacaatcttttggacggattatgttgcaacaagatggtacagggctccagagctctgtggatccttcttttcaaagtatacaccagccattgacatttggagcattggatgcatctttgctgaggtgctgacaggaaagcctttatttcctggtaaaaatgttgtccatcaattagatttgatgactgatcttctgggcacgccatccatggatacaatttctcgggtccggaatgacaaagcaaggaggtatctgagtagcatgagaaagaaggagccaatcctattttcgcagaagtttcctagtgcagatcctttggcgttggatcttctacaaaaactattagcattcgatccaaaggaccgtccaactgccgaagaggcattggctcatccatacttcaaagggctcgcaaaagttgagagagaaccatcctgtcaacctatcacaaaaatggagtttgagtttgagcgtagaagagtgacaaaggaagatataagagagttgatattccgtgaaatactggaataccatccacaattgctcaaagactatatcaatggcaccgagagaacaacctttctatacccaagtgctgttgatcaatttagaaagcaatttgcccatcttgaagaaaatggtggaaatggcccggtaattccaatggatagaaagcacacttctcttcccaggtctactattgttcactcaactccaattcctgccaaggaacagccccgcattggcccatcaagggataaaccatctgatgaaccctatagcaatccccgggaatttgacagattttctggcaatgccccgaggacctcacaagctccacaaagagtgccaacagcaagaccaggaagagttgttggtccagtattgccttatgaaaatggtgccacaaaggattcctatgacgcacggagattggcaatgaactcagggtatcctccccagcaacaaatccctcaagcttatggttattatcagatacccggtaagtcagcttgttctgagctgtcgcaggccgaaaggtatacgctgcaccagcaggcctacacttgcgcaaacagtgccactgtgactgatgttgctctggacatgagagcacccccgttccatctatcaggagggccgaaaagcgattcgtccgaaaggttagcagcagagacaaacctatacacgagatctctcaatggcctcgctgctactgctgcgggagtggcagcaagtgcgcacagaaaggtcggtgttgttccctacggcatgtcgaggatgtattagtgcccaaccatggcacatcctgcatgcccaatgggagctctgatgctagcttgcggcgaagcattgggaacaaagtggcagttcaagctagtttgggcaccaagagcacagggcaatccaaggttgacgacgatgcctaagaagttgcattggtgccctgctgctcctgttcctgcttgatcaggaaccaccaccggaggtgtcaaaagcttttcaactctctattcgctttaggcaaatcagcttgtatctgcctgtgtgtgtgtaagaaaatgtgcccttcgttgcacacttgaagggggtagtccagtggcttgtaatctgagcatattttaggcgccaattgtatttctagggtgaggggacaaaagggaaaggaaggaccactaaccttttcctcttttttttttctttttccaatgttgtatagagatgtttctcatatcaaaagtgctacatcagaatgacttgagaaagatataaagcagacaattgcgcggtttaccgtagcttc

SEQ ID NO: 15407 - DNA, 2843 bp, Oryza sativa
  ref <308>: DATABASE ACCESSION NUMBER: AK065931
  ref <309>: DATABASE ENTRY DATE: 2001-12-06
tattctcccgcggggacggcggggagggcctcggcggcggcggtggcggcgccgcgtgggatgcgtcggcgtcgcggctgtacgtgtgggacccttcggcgcgaggcgtacaccggatatgcgtgcgggttcgcgatgcggaggcggggaaggacggggatgatgtcgccgtggaagccgccgtgccttccgagatgttgatgccggagactgatcttggttacaaggtcactcatttatcacttaataccgacggttcatcgctactacttgctggatcacataacataagtattctgtatgtgcatgagagggtttctgaagatggtgataaggtcatatgcaggactgtgccagttgcttctcagatcttacctagcaacaatgatggcatcaaagtactgcaaacatcgtggcacccttttagcagtagtcattttggagtcttgacatcagatgctgttttcaggttatttgatctgtcatttgatttagagcaaccagagcaggagttctatttgcaaccaattctacctggcaaatgccagaatgcttcatcaatttgtccagtggcattctcatatgggagtgatcatctgtgggatagattttcggttttcatcttattcagcgatggttcaatttttgtgctctgccccattgttccatttggaagcgattacaataagaagcatattcaagaaatatatgaagatgttaattcatttggattgaaatcctcaaaccaaaatgttgtcaccaactcacgtttggcaattgcttggttggaagcaacgtttcctgacttgtcacgtcagccagctgataatagtgcattgatgtctagagctcatccatacgcatcattagatgattctctaactttacagggacctctttgtagagtttgcgaagaaaacaatgaacctgaaagcaagagcaactcttgtgaaggcaaagctgtgggttttgtgtatagttctgttggcaaagattccattcttgtaactgcctggggtagtgggcaactccagattgatgctcttgctgatgaaattcaaccacagtggagcataggaattcctacccgccttaatgttgattcacatgggcagataaagagtgttgctatgatatgtgactctaattcagaagattcttgggccatgcgatcgtatcgcccgtccagtacgggatcaaatgtgaagagtaatactgatgctgtctggatggggcattctcctcctttgctaagactcgcaattgtagatttagcactagcaaaaacttccaatgatagctctttatcattgtttctagatccccttgttccagagagattttattgtgcccatggtgggggacttgacatggtcacactgcacttcctgccattttcataccctgaaatggcatccactccaccctctgtgcatcctatcctcactacaggaaacaatgaggcaaattctcccttcctttctggttttgttaccatagcagatgcatatggccatgtgcagttagtcagcattacatgcccaggtgagtgctttgtggtggagatgaagggttggaaggaaccaacgcctcttcagcttgacatagacagcaagagcattaaggacgtggaatcttttacaactggaatgatcagtaaagagctcatcgcaggtccagatccacccatagttccatcttcatcaagcttgaggtcattgacccctgactctattgaaggaaaatccactcttcatcactatattaaagttttccatgagtactacgtggagtatgggcataaggttttcattgagctcaaggaacatggggattacctgaagacagaaattgaggacaagcagaaacgcttgcaagcagtgaagcaatcacttctatccatagaagccaaagaccaagatataaacaaccggataaatcgggcctttaaggtatacgatttgttagaaaaacgcatcgagggcttcaagatacttcctgcggcaaacaagaaaccattgtcacaagcagagcaggagttcaaagcacagctagataggtttgcagatgtggagctggatgcgttgtgctcttcaatcactgctctgagtgcgaggatgaaacgatttgctcacccggccattggcagtgcggctggtacaggaatgtcaacatggcagacaccaaaggtcggaagaagccatgtttcggactcccagatgtcgttactaaaatcttcgcttgagaagctctctctccttaatgaggagaacaatgtaaagctgaggctcattgagcatgaactcaagaaccaggagcaataggtctttcagaacaactgtgtattacaagtcctcacagattctgatttctcgagcttgttatcgcccttttgaatcaaatcgctaccagtccactgtctactgtgggtgtgtgtgcagagtgcaacttcaggtgttactctgcaaggggacggcatcatgaacaagcctgttaacactcgaagcgcgtatcagcgtgaaggaaatcatgtaacgctacttgcaatgaccaccagcatgtgtatccaatagcggttttgataacttgcccactgtagtagtttctcatcctggggattatgggcgtatttaagtcttgatttcttcgtgcttcactgaatttgcacggtcagaggtccaaaccgaacttcaaagctgacgaggttgagaatgttgctcggtcttgattatcaacatggctgcatgatgttaccagcttgtctgctttgacgatgtaaaccagttgggagagttctgtgcgctaatttgcttgcgtctcgtggtatggtttttcagttggcg

SEQ ID NO: 15408 - DNA, 1566 bp, Oryza sativa
  ref <308>: DATABASE ACCESSION NUMBER: AK065932
  ref <309>: DATABASE ENTRY DATE: 2001-12-06
ggagcgcgacctcgccgcgccgcccatggtcctatccacgccgcgtcaggaggaagcagagaagcgtcggcgagtaggtcgtcggccggccgatggaggcagcgacgatcccgagtcgaaggtgcagtagagatggcaacaggatgaggccgagaggatgccgacagtgaggttgaccggtagggggagtcaagattgtcaggggaagcaatagcggtggccttgggccttggatcccggtggcgaggtcgcgctcggccatcgagcccacccccatggcgccccggccatcgatggccggctccgagttctcctacgcgttcgcaatcgtcgccgatccaatctgtactctgatgagagaaggggatagcgttggcaccttggcagcagcaaaggagaggcgcagtcaaagagagtcacgcacgcagttaggggaagcaggcaaggcgagttgggagaaggagaggaggaggagcgagcaatggcggcagcagcagcagctttgcccaccgctgccgcttttccccacctctcctccgattaatcccctcctcccatttctccgcctcccctacctactcgcgccgccgccgccgccgccgtcgcattgggcggcaaacggcctgatggagcagtacgaggaggagaagattggagagggcacgtacggggtagtgtacaaggcgcgggacaaggtcaccaacgagacgatcgcgctcaagaagatccggcttgagcaggaggatgagggtgtcccctccaccgccatccgcgagatctcgctcctcaaggagatgcatcaccgcaacatcgtcaggttacacgatgttatccacagtgagaagcgcataggtcttgtctttgagtatctggatctggacctgaagaagttcatggactcttgtccagagtttgcaaaaaaccccactttaattaagactttggtttagccagggcatttggaattcctgtccgcacatttactcatgaggttgtaaccttgtggtatagagctccagagatccttcttggatcaaggcagtattctacaccagttgatatgtggtcagttggttgtatctttgcagaaatggtgaaccagaaaccactgttccctggtgattctgagattgatgaattatttaagatattcagggtactaggaactccaaatgaacaaagttggccaggagttagctcattacctgactacaagtctgctttccccaagtggcaggcacaggctcttgcaactattgtccctactcttgaccctgctggtttggaccttctctctaaaatgcttcggtacgagccaaacaaaaggatcacagctagacaggctcttgagcatgagtacttcaaggaccttgagatggtacaatgaccctgctatggctttacattgaattggcttatgtatgggctgggctgctcatttcattccttgtgtgaacgctgtgcccttcgtttgggcatttttgtcattcagctggatatatttcaaatcttgtgtgtttgatatgtatattcaggaacgctaaatagatcaccgtcttggcctcg

SEQ ID NO: 15409 - DNA, 2012 bp, Oryza sativa
  ref <308>: DATABASE ACCESSION NUMBER: AK065933
  ref <309>: DATABASE ENTRY DATE: 2001-12-06
gatcttcatctcgcagcagagttggagactttgagctctcaactgaaccccaatctgcgaggtgggagaaggaggaggagatggacggggagcaagaggcgcggtggctggcggcgcagggggtcgccgtaggtgccgacatggtcgcggcggcgctccggcagctggagttcctcgcggcggtggaccgccgccggtggctctacgaggggccgctgctcgagagggccatccacaggtacaaatcatgctggcttcctctcctttccaagcacactcaggctgctgttgtagatgggcctttagttgttcctcttgattgcgaatggatatggcactgccatcggcttaacccggtacaatacttaaaggactgcaagagattgtatggcagaatactcgacaatagcaatgttcagtcttcgattagagcagaatccaagcaccagtctgagaaggtttgggctgagcaatatcctaaggagccctttgagctggagtacacaagctcttctgacaactcaatttatgcaaatgctggagctgcagaggacatttcttatgatttggtcgcagctgttaagagacagtcttctttcttctaccaggttgacacaccaactatgcatgatcagcgatttctggaagaagctttagctcggtacaaaggattcttgtacctgatcaagacgaatcaggagaacaaaatgaagctctttcgcgtgccaacctatgatgtggatgtcatctggcacactcaccaactgcatcctgctacctactgccatgatatgctgaagctcattggacgagttctggagcatgatgacaccgatgacgatcgatcagaaggaaagaagctcgatactggattttcagggactaccaaacagtttgagaatgcctttggtgcaagatactggaaggctggtgctatgtaccgtggcaacttgccgtctcctgtgacatccaatcctcagatgtttattagtgaggtggatggtgaatttagtgttggcaaagctgagtcgcaaattaccattcttgaaacaacagttatagagttattcttgcaaattgtggacatcaagaacttgccacctgcaattccaaaggaaaatgtgtacatatggttcacaaagaatcaaccagacatgttcatcagtgatggtggcaggctggatatctctacaaaaacagggaagtcgattggagccagtatccaatgtgagcctactggtgaactcattctaacagtactggttgatcgggaatcatcatcgaagaaacccaaaaagattgggaagatttctatccctcttcaagagtttacatggtctgattccaagctctcctttgagaggtggtttgaattgaaacctcatgatgggcatgccagttcacctatcgtcagccttcgagttgctgcctcttccactgtcccagtgaaggctcagcaggttcttagcatgatcaggacagaacctttctctcttaagagttttctgtcaccgaattccatcaaggatcaaaagatgagctgctggactcactttgtgtatgattgcaatactgaacttatccgtcttcaaattagggatcagaaggcaaagaacggcatggttgtcgctcgggagttggtcggagtaacaaagtcatcaaagaaaccatttaagctagcagagttcgtggacaacgggaagaaggagatcgctctctggttccctgaaggtttagctgagtggaggagcaaccttcacccttggatctatgagtcttagagcttcgcgcctataatcgatcacctcttggtggctagttctcgttaaatatttgagttttgtttcagagttgtcatctggctgcctcctgagtcaccattataattctgctgtgatacaatcacagttatatgttgcctgaacttatatggctttttaagtttctggattggatgtgatgggaaaataatactagcagtcagtttttgcttataaatgtcgtaatatctt

SEQ ID NO: 15410 - DNA, 1810 bp, Oryza sativa
  ref <308>: DATABASE ACCESSION NUMBER: AK065934
  ref <309>: DATABASE ENTRY DATE: 2001-12-06
gagtcgtcctcgtcttcttccacctcagcgacctaatcccatcgccgtcccgtcgcggagctcaactgccactcccattcctccacagttccgtaccttcccggccttctccttcctccctttcggctcgggatccggctgaagcagctctgccgcgacgccgacaccgacctctccgtctgcgtcctcgagaagggctccgaagtcggtgcgcatgtattgtcggggaacgtgttcgagccacgagcgttggatgaactcatcccgaagtggaggcaagaggataccccaataagagtccccgtctcatctgacaagttctggctgttgacaaagaataaggcatggacacttccatctcctttcgataacaagggaaactatgtgataagcttgagccaaatggtgcgatggatggcctccaaagctgaagaattgggtgttgaagtatatccaggttttgctgcgagtgaggcgttgcaaccaatgatgttggtattgctaaagatggctccaaaagggaaacttttcaacctggtgttgaactaagagctacttagaaaatgcagggcgaatgacactgttggccgagggttgccgaggttcattatcagagaaaataataaggaaccacaagctcagagagagtgggcaaggccagcatcagacatatgctcttggaattaaggaggtttgggagatcgaggaaggaaagcacaagccaggttctgtgattcatactgtagggtggcctttggactcgaaaacatatggaggatcatttatgtatcaccttgatgatagacagttagcgataggtctggttgttgccttgaactatcaaaatcctttcatgagcccatacgatgaattccagaaattcaagcaacaccctgctgtcaggacaattttggatggtggaacagttcttcagtatggtgctcgtacgttgaatgaaggtggttttcaatcaataccaaatccagttttccctggaggtgcaattattggatgctctgcagggttccttaatgttcccaaaataaaaggaactcatacagccatgaagtcaggtatgctggctgcagaagcaactttcaaaactcttgttgaaggatcttcgatggaactctattgggagaatctcaagaagtcatggatatgggaagagctttatagagctcggaattacagaccagcatttgaatatggatttattccaggcattgccttgtctgcactggaacgatacgtattcaaaggaaagtccccctttaccttaaagcacgggatacctgaccatgaagcaacagatatggccagtttgcactcgcctattcaatatccgaaaccagatggtcaaatatcctttgacgtaccaacttctttatacaggagcagcacaaaccatgagcatgatcaacctcctcatctccgtttgagggatcctacagtaccggagagagtaaatcttcctctgtatgctggaccagagtcacattattgtccagctcgagtttacgagtatgtcaccgacgagaaaggtgaccagaagcttcacataaatgctcaaaattgtcttcattgcaaggcttgtgacatcaaagatccaaagcaaaacatcgaatggaccgttccagaaggtggaggcggtccagggtacacagtaatgtagacgatagcaaaatactgcctgataccatgaaaacattaaccgaaaggcaataaattatcatcatgtatagaggacatcatgaaataatgtatggtatatttcttctggtcaatgtgaattcaacctatacttgtc

SEQ ID NO: 15411 - DNA, 2318 bp, Oryza sativa
  ref <308>: DATABASE ACCESSION NUMBER: AK065935
  ref <309>: DATABASE ENTRY DATE: 2001-12-06
gattgtgtattagatccatggtttgtccaaatatgttgttgaggttgctgttcctcgtctgctgctcgtcgtcgttggcggcatcagcagcagcagcgtcgtcgtcgtctggatctgcatgcagctgtagcagcagcagcgacgagacgagctacagcttcccctccacgcgtatcgaggacaccttggcgctgctcgacgacgcagaaatcagcagcaacaatggcagcaccatcctccacctcacgccggcggcctcctcgaacaagtccggcaccgccctccttccaactccggtcacgctatggcggcgcctcgactaccagacgacggcggctcagccggggagctattccaagcaggatgcgtccctgaatacctccttcaccatgagagtccagtatgcgaatgcgaagtattcgccggccgacgacgcagcagcggcagcagcagggctcaacaacggcctcgcgttcgtcatcgtccccaccatcaacggcccgccaccaccgggcagcgccgccgccttcgctgtcgagttcgaaaccggcgacaaccgcagcatcaccgtcagcatcacaaccggcggcaacatcatcgccgctgcaacggccacaacgacgacgacgaaccagacgaacagctactacgcggtgtggatcgactacaacggtgagaagcaccgtttgctgatatacatagatttgcaggaccgaccaaaaccgcagaagccctgcctcgacgtgcccctcaacctcagcagcgtcgtccccgaccgagctttcatcggattctcggcgacgacgacgacgacgacgacaggaggatcatcatccgccatggatgagctgctcctccatcgttattccatcttgagctggagcctgacagtgaaactacctccttctccacacggcctagacttcgagtggaaggtgatacttcccgcggtggttggcaccgtcgccattaccgccatcatgaacgtcatagtggccgcccagtacctcaactccaagtacaacaagctcaagatggagctcgtcctcacggaggcgctccggcgactccccggcacgccgagggagttcaagcacgccgccatacggaaggccaccaacaacttcgacgaggggaggaagctcgggaatggcggcttcggcgccgtgtacaggggcacgatacggtcgtcgtcgtcgtcggccgggaagaacaaggccaccaccgccgccgccgccgccgtgtcgtcgtcgtcggtggaggttgcggtgaagaggttcacccgcgacgagaaccggtgctacgacgacttcctcgccgaggtcgacatcatcaacaggctgcgccaccggaacgtggtgccacttgtcggatggtcttatgagaagggagaacttctgctgatatacgagtacatgcccaacggcagcctcgaccggcaactgttccccaaggaaaaacccggaagaatcctcggatggacgacgcgctacggcatcgtgacggacatagccgcgggtctccactacgtccaccacgagcacgagcacatggtgctccaccgcgacatcaaggccagcaacatcctgctcgacgccgccttccgtggccgcctcgccgacttcggcctcgcccgcatcgtcgtcggcctcgacaagaactcctacaccgacgtcggcgtcgccgagacgtgggggttcatcgcgccggagtactccgtcagccacaaggccacccgcaagacggacgtgtacgcgttcggcgtgctgctgctcgagatcgtcaccggcaggcgagctctctgcaagttccaggggacgttccagctgctcgtcgactgggtctggaggcttcaccgggaggggagcctgctcgacgccgtcgacaatggcattgcttcttctaccgaagagtttgatgcggatgatgccattcggttgctgctgcttgggctggcgtgcagcaacccgaacccgtcggaccggccgagcatgacggaggtggtgcaggtggtcgccaggtcggcggcgccaccggatgtgccgcccgtgaagccggcgttcgtgtggccgcccgagggtggggtggaggtggactctgatgacgtcgactcgtcggggagcgatgtctatgcgagtttgtgtgaatgggaggaagaggagacgtcgagcagcgatgcccttgcggtgagagtttcatcaggatatcactaggagcaaggcgtgggtcgttgttaattaactagcatggtggcccgcgtagattgcgcggctagtatcattatattttctcttatataatagcatatatgttttttc

SEQ ID NO: 15412 - DNA, 3338 bp, Oryza sativa
  ref <308>: DATABASE ACCESSION NUMBER: AK065936
  ref <309>: DATABASE ENTRY DATE: 2001-12-06
ggttttttttttcttcttttttctcgcttaaattcacccagtaaaaaaaaaatttaaaacaaaagagaggagaggagaggaagaagaggaggtggtggaggaggaggaggagaagctgcttgtgctgctgctgcgaatcggaggggaattcgagggggcggggggcgcgaatccggcgggggaattcgcgcgattcgggcgtggccgcgggggatgtgaagatctggtggggtgatggcgacggcggaggtcggcggcggcggcggtgagggggatgctgctgccgcggcggtggcgcgaggcggcggcggcggaggaggaggaggaggaggggaggacgcgctgttcacggagctgtggagcgcgtgcgcggggccgctggtgacggtgccgagggttggggagaaggtgttctacttcccgcaggggcacatcgagcaggtggaggcctcgaccaaccaggtaggcgagcagcggatgcagttgtacaatctcccatggaagatcctgtgtgaggttatgaacgttgagctgaaggccgagccagacaccgacgaggtttatgctcagctcactctgcttcctgaatcgaagcaacaagaagataacggctctactgaggaggaggtgccttctgctccagcagctgggcatgttaggccacgggtgcactcattctgcaagacattgaccgcctcggacacgagcacacatggcggcttctcggtgctgcgacgccacgcggacgaatgcctcccaccactggatatgagccgtcagcctccaacacaagagctggtggccaaggatctgcacggtgtggaatggcgctttcgtcacatattcagaggtcaaccacgaagacaccttttgcagagtggctggagtgtgtttgttagtgccaaacggcttgttgctggggatgcctttatctttctcagaggtgagaacggggaactgcgtgttggagtcaggcgtgcaatgaggcagcaaactaatgttccatcttcagtgatatcaagccacagcatgcatcttggggttcttgccacagcatggcatgctgttaacacagggaccatgttcactgtctactacaagcctaggacaagtccagccgagtttgtggtcccttacgatcgctatatggaatcactgaaacaaaattactccattgagatgagatttaagatgaggtttgaaggtgaagaggctccagagcaaagattcactgggactattgtcggaatgggggattctgatccagctggctggcctgaatcaaaatggcgctcccttaaggtttatttctttcgccactttccatttaaataacatttattttctgagaatttcttacagatttttgtgttacttaggtgagatgggatgaagcttcttccatacctcgccctgaaagagtttctccctggcaaatagaacctgctgtaagccctcctcctgtcaacccactaccagttccaagaaccaagaggcttcgtccgaatgctaccgctttgccggctgactcttctgctatagcaaaagaagctgctacgaaagttgtggtcgagtctgaaccaaatggtacgcaaaggaccttccagacacaagagaatgcaaccccaaaaagtggtttcggcaatagcagcgagttagaaagtgctcagaaatcaatcatgcgtccatctggatttgatcgtgagaaaaataacactcccatacagtggaagctaggttcagatggtcggatgcagatgagcaagcctgagagttacagtgagatgctatctggatttcagccacctaaagatgtacaaatcccacagggtttctgttctttacctgagcagattactgcaggccattctaacttctggcacacagtaaatgctcagtatcaagatcaacagagcaatcacaatatgttccccagctcatggtccttcatgcctccaaatactcgccttggattaaacaaacagaactattcaatgattcaggaagctggtgtgttgtctcaaaggcctggaaatacaaagtttgggaatggagtttatgctgcactgccaggccgaggtactgagcaatactcagggggttggtttggccatatgatgccaaattcccacatggatgatacacagccacgcctgatcaagcctaaacctctggttgttgcccatggtgatgttcagaaagctaaaggtgcttcatgcaaactatttggaattcaccttgacagcccagcgaaatctgaacctttgaaatctccatcaagtgttgtatatgatgggacgccacaaacaccaggtgctactgaatggcgccgaccagatgtaactgaagtagagaaatgttctgatccttctaaggccatgaagccacttgatactccgcaaccagactctgttcctgagaagccttcttctcagcaagcttcacgaaacatgtcgtgcaaatcacaaggtgtatcaactagaagctgcaagaaggtccacaagcaaggcattgcacttggcaggtctgtggaccttacaaagtttaatggctatgaagagttgattgctgagctggatgacatgtttgatttcaatggtgaactgaagggtcctaagaaggagtggatggttgtctacactgacaacgaaggtgacatgatgctagttggggatgatccctggattgaattctgcgacatggttcacaagatcttcatctacacaagagaagaggttcagcggatgaatccgggaaccctgaactcaagatcagaagatagtcatgctaattcaatggaaaggggctcagtcggcagagaaatgcgaggctgcttgtcaacctcgtctcttaattctgagaactgctaatgctttcccatctggtcttttgaagtaacatgggagacaagaacgcgatgcatcgttataagaaaatgcatttcgtagtggagttaatgctttttttccccctttgatgtattggataagctcaaagtaccctatttgtagatggtgcttgtccttggtggtcaagttgcactcttatttgctgcagttttggttttctattttggtgaggtaagttgtcagccgccagtcctaccatataaatgttggtatgcgtagaaaagtaagctcagccctcccaccctgcacttcctctctctcagcactaagctgccacctccttgtaaatagcccctgtttaattgagtctaatatattatctaccttaactgacattcctttgtttcatcttgctaaattatagcagtagcctggtaagattattgtagcccaaattaacatgtgatctgagattttatttttgctttc

SEQ ID NO: 15413 - DNA, 3259 bp, Oryza sativa
  ref <308>: DATABASE ACCESSION NUMBER: AK065937
  ref <309>: DATABASE ENTRY DATE: 2001-12-06
gccttcttccgatctcccaccgtcgcctgggcgcctggcggtttgctccactccataggcggccatcgtcttctcaaccagaaagcttctggctgtacagcttggcgggatacaagacgacggtctgccgtcggcgatccgcagtcgccggagctgaaggtggaagcggccaacacggcagtccgtgcagccgcttgagaattttttgtcatggcagtgaaaagatgcgcagaagtgccgatatctgctaggccgggaaagatgatgcggattgctattaagtcttggtcaaggttcttgcccccttacatccctgacgatgtgatcttcgacattctgttacggctgccatccaaatctcttatccgatttaagtccgtgtgtaaggcttggcacgccataatatccaacccctgtttcatcagtgctcacctcgagtgctctaagcagaagccatcgatatttatggtccctggtgtttacgagaagcagaataatggcgagaatacttccttcctgatgggcctctatcagtatcagggtggtaatataatggaacaaatccatgtacaagactttccacaaggcattggtacatggagtcgtccgatccactgcaatggcatgctcctcatttccaccatgaaccacgaaatgattgtctgcaacccatcaactagagagattgtctccctgccaaaagggagttataaccttcatgcgggcccaagggctggatttgggtttgaccctcacagcaacaagtataaggtggctagatttttctaccagagggacgatgacacatcagaattggtctgcaagtttgaagtgcttactctaggcactaatttgtggaggcaaactgaggatccgccatatccaattagtgggttaactcctgttcatgtgaaaggcgccatctactggatggttaatacgccactttgccctgatccacccaatgcatttcttaggttctgtttgactaacgagaagtttagtctgcttcagtatcctccatgtaatctaaagcctacccgtttcatagaagtggagggtgaactatgctgtgcttgcttttgcagtcaggtgagcgcgttgaagatctggacctgcaattatgcacagaaccctgaatggactcagcgctgcactgtacagattccacctgatatagttgtgaataatcctgtagcaaggcctcctatagtttttcttcatggaaaaaagctgctactgacatggaatcaggtctaccagtatgacattcaaacctgtagaatggaaaagatagcttcaggggttgaagacttcacgtgctatgatccaaggaacaataagtactgggcatatctggagaaagaagtaacggatatgcatctatttaattatgctgagagtctagttccgattagagaattttgagaagtcacttcattttttgttaagatgtggagccttgcatttcaggcccaaagagtcctcatgaccgtgtccctttgaaggaaatgaaatcagattggcatgcttgcctggacagcaatttcaaggtaactaaggataacctttgcattataaagtttaaaatgtagtggcattgctcatcaaaatacaccccaaaaaacacactagggttttgcagtcccaacggagtaccatgataaagttgtgaaattttactttcaaggacaacctgctgaaatcaaacagtgttgttcttgcagcaatatgcagttacacaaacacatcaaatcccagcgttataattggtgctggcctagtcgcaaagaaagcctgtgaattgggccttgaggtttgcatgttcgttcatatatgtaactagtgtattgtgtcgtgtgtttgtgcgactataacctccctctctgtaaatatgtataataattaacttaatttgttaataacatttaataatttaaattagtatttcctccttttataagataatttgtttattcttcacttgaatttgaatagatgttcagagaacatatttagcaggaaatctagtatgtatttttttaattttacaaaaaagaccatttatttaaataagttgtattgaaatgtcaactgtacaatttttttagcaagttttctgttagttgctagaattaaaattaattatatgattatacttttaaactggtctcgatttttagttctttatggtcagaatgttaatttacaatggtttaaattatcggttgcggctggtggtggactgccactgtttctcggacttctctcttcacaggaagtggttattgcctttcggccacatatttgccaacaataaattcttttatgaagaatttagtatgtacaatctcatgcatcggggtaaaacttttccaggttataaatttacaaccactaaaatatagataaaaatgggcatgcacctaaatcaaccaaacagttcataccagaaataaaaattaaggaacctaactaattgcattaatcattgacggaagatgcagatttcagaaatgccaagctctttcatttggttgtgatgcaatccaggaagaactattaaacattagaaataatccattgcaatataggaaattcgtgtttactggcgaacttctactgcttggtataattccaaattaatttggttgctatggacccgtcagaacagtttttcgtcggattccagattttatggatactggaggtctacaattgcttattaattagctcgatagaatcaaccactacaatctgcacatagagggtgtgagcttccatgttaagtgctttacataggctgatttaaaaacacttgtaatggaacttatgcagctgttgctgtcattagatgatccttaacacttttagcttccagaatgaaaaggattaagtatttaaactatggatgagggcttcataacctgtatgacaacagtggatttccactaagatgcatgcctacattcaaaatctgagttagaaaagaaaatttagcaatttgatacataatacatacccttggattaggatattcttatgagtactttaccatattcactaaactccaggaacacttcatatttaagaaaatgcagtatgagatatgtaagtgcaatcagctactgtgccttttgtcacaggaccttctaggtgcacacaattagtaccagtgtgctcatgctgcagattgctatgaatgctaattggattaacaccatgagttcataagtaataaaccgtttgcagtggcatt

SEQ ID NO: 15414 - DNA, 2223 bp, Oryza sativa
  ref <308>: DATABASE ACCESSION NUMBER: AK065938
  ref <309>: DATABASE ENTRY DATE: 2001-12-06
ggttctcagctagtcaagattacctggcacactcagaaatgtaccaccaacatgtcagtaataaaaacagcctctaggaactaagatctcgacttaggcacctcccacttctaactagacactccaatggaaactattagcaatatctttcacaatgacccactcccacctctaggagcaagagcaaaccaatctatcaagctgagaaaattcattatttctccatatgattcccgttacaggacctgggagacgttcttgctcgtgcttgttgtttattcagcttggatctgcccatttgaactagcatatctgagaaatctctcctggaaggtttctcttgttgacaatattattgacagcttctttgcaatcgatattattctcacattttttctagcgtatctggatcaaaagtcatatcttctagtggatgatccaaaaaggatcgtggctaggttacttagcatgcttcgattatggcgtctccggcgcctcagtgaattatttgccaggctcgaaaaggatatccgattgaattactactggataaggtgcaccaaactaatttctgttacactttttgcggtacattgttcaggatgcttcaattatttaatagctgatagataccccaatccagcaagaacatggataggagcagcaataccaaactacagatcacaaaatctgtgggttcgatatgttacggcaatttattggtccataacaacactcacaacaactggttatggggatttgcatgcagagaatcaaagagaaatgttatttagcatatgctacatgctatttaacctgggattgacagcatacctcataggtaacatgacaaatctggttgttcagggaagttgccggaccaggaattttagggacacaatccatgctgcctctcagtttgctgcaagaaatcagttgcctggacatattaaggacgaaatgctatctcatatctgcctaagatataaaacagaggggctgaaacagaaagaaacattggatagtctccccaagggaatccgttcaagcatagcgtgcaacttattcttacctgttatagaaaaagtctatcttttccatggtgtctcatttacttgcatgatccaactggtaactgaaatggaagcagagtactacccaccaagagaagttgtcatactccaaaatgaagcaccccgagatgtttacatattagtttcgggagcagtggaagagcgggtagagatcgatggaacagaaaaggtccaggaagtactgtgcaatggtgaaatatttggagaaataggagttatctgcagcatcccccagccatgtgctttccatacaatcaaagtttcacaactattaaggctgaacacagcagtgctaaagaacattatcaaggaaaacagcgatgacagacgagttattctgaacaatctttcccagaagatgaaccaagatcacaggttctctaccgaggtgatggaaaaatctttacagatgatgcatcaacactttggagagtacaacagatgttctgcattgaatcaagacaatgagaagaatgaattaaaagctaataatggtcattctatggctttagaatggaaaagagtgacaatacatatgtattcacagaggaacaaaagaccggaggcaccgcttgcaaaagttataaatctaccaggatctcttgataaacttttcgccatagcttgtcagaagtttaacaattatcgtcttacaaaacttgtcaatccagaatttgctgaaattgatgatattacagtaattcgagatggtgatcatctgtttttttatggaaatttgaataaggatgcttgaaatcagcaacgatgcaaagaactgcagataggtatgtagtatacctttcagaaggtaccagattaagataatagtgatcactaatcaggcatgaggcgacttggcatgataatcaagaacatgccacctagggatgtttcgagttgcagtcctgtagttacatctaattttactttagaatgtaaatgtagaattttggagcaatgtagtctctattccgctttcaaaatgttggatcatggcagagggcagccctctatgatctgtggagtttgtaatgtagctatagtgcaacgaaagatactaatatcgtttacaggtactttatagtgtttctccaagttttttttgaaataaatgatgaaacagacatgc

SEQ ID NO: 15415 - DNA, 1954 bp, Oryza sativa
  ref <308>: DATABASE ACCESSION NUMBER: AK065939
  ref <309>: DATABASE ENTRY DATE: 2001-12-06
ggcgagagagagtttttccgattcggccgccgcgcggccgtcacgaaccagataaaatctccacgcagttcccctcaaaaagaaatttggttgattttgatttgatttgattcgtgtgctccccgccgccttcgatccctccaacggataatcgccgccgacgacgacgattcggaggagaagatagtattcaagtgggttcatcaagataatttgtttgcagtgtgctggagatagtgtggtctgaccaggcttgttggggattagtgaagctaagcatcgcagatatctgacaacagagagttgatgcccatgtttgctagcacaatatggatattattgacttgtgttcagacagtgaagagtacttcagcccgtactcagatacagaagacaatcttgattttgacgatcccaatgatggtgttaaccaggtggttttgcacaacacagcatttggcaataatagttcagaactactagtcgggctggatgacgataactggttaaacaacactcatgctttatcctctcatagacctgctgagaatagatcagacattattgaaagcagcagcggtgtcaacactgactgtcagaatagtgcttggcaatacaggactcttccacataccttcatgagcagcagttacaagtctcgtccactttctctaacaggaggtaacaatgttgaaagtacacaccccactgtgaagcctaacactgtgcactataatggaattgggttcccttcacctgctattgcaagtggctacaagccatatgttagttatggccagggtgtttcaattgatgatgatgacgatgatgtctatgaggttctgcatcaaccatttccgttcagtcattcgagtttaggtgacaagaagatcgaggaagaatccacttggaagtacaatggttttcaaacaagttctgcctatggaatcgagatgcctacatctgcaatgtcaacaggtggtgtctctgcatatggaggtctaaactcacataggatctttcctccatcagtgccatacaacaattctgttaacaattttggagtcaatggccttggcactcagagccacttaaatatagaaaagaggctttttggccgtgatgagagggtggtgtatgatgaagccctgaagcaaatcagtcaagaaacaacggaagaaaatttgcctgaaggtgttatgtcagtatcactccttaagcaccagagaatagcattagcttggatggtttccagggagaatagctcacattgttcaggtggaattttggcagacgatcagggtcttgggaagacaatatcaactattgcccttatacaaaaggagagggttgagcagtctaagttcatgtctgctgatgtgggcagcatgaaatctgtagctaaccttgatgaggatgatgaagtagtgatagtcatggacaagaagcaactgaagggtgaatctgtgaatatgctacaggattcaacactgtttccatcatcagaagcagcaagtgatgccgcagatctgaagccctgggctagtctaccggggtctgctgttgatagaatggtaaatgctgtcaaagttgaacccaagaagaaggctagagtgagaccatcgccttcgtcaactttgaggtctgctaatagatcaactgcgggaacactagtggtgtgtccagccagcgttcttagacagtgggctagtgagttggctgccaaggttactgaaagttctaaattgtctgttttggtttatcatggaggttcaaggactaaagatccaactgagttgacaaaatatgatgttgttgtcaccacatacactattgtagccaatgaggtacccaaacaaaactttgatgaggatatggaggaaaagaacagcgaaacatatgggttatgtccagcattttctattggcaataaaagaaagaaagacagcgaacc

SEQ ID NO: 15416 - DNA, 1812 bp, Oryza sativa
  ref <308>: DATABASE ACCESSION NUMBER: AK065940
  ref <309>: DATABASE ENTRY DATE: 2001-12-06
gtgtttgggtttctgaggagattttatctcttaacacatcaagatttagatgtgattccttcaggctttaggctttatttaccgtgccttctagaaacaatcgcctaatgttgcttctcctatgggctcatgggaagttaaacacctggatctgggctctttcctatggtggaaggctagatctgtgaaagattagttgtaggattttgtttttggagatgatgatttgtatcagaggctgtttctgaggacgggccaatggctctcccagtgctgcaaagaactgatttgccgttctgatccaaaaccacttcgtagattgctgtttgcaagtagaacctattttagatctgaggggggagtggtaccagtttgttgacctataaagtaattggattttggattttgtttttgctttgttcatgttcttttggagatgatgatttatatcagaggctgtttctgaggatgagccttgagctcacccagtgctgcaaaagaactgatttgccgttctgatccaattctctttctttatttgcattttctcccttaaaagatctgcctagttttttttggtcaaattaagatggcgttgctatctgatgctttcgaatatgtgctcgagaattgagagcatctactgaaaggcttagctcctattttagggatatgacgaaaaacttattccagaggttgtttctgagggtagatctcttctgcctgtgattaaaccttgcacgtcagtccgatcccattctcagtagatctgagaggacaacctggtctgatttgttcctccgcagttctttggagatctagtgatatttcactgctttctgaggaagattcctattccctatttctgaaagtattgcgggtcagaacttatcacggaagacaaaataagcttagcatggacattgaatccatattccatctagtcttttgctgtttatgtacctgtgtaaccttgctgaatctaggtctgtttcccaaggtattgtcatacaagtaggccctgattgctcatcttccactgaccttattgaatctatcatgtttgggaaatgatgaacaattcatctcagatatcctttatggatttattttcagaatgatgaaaatttgcacgtcagtctgatcccaaagttgtttctattctcatgtttagtcaaattagagtttgccttgaaggcaatttaagcttaaagattcaccatgcatcttaatatccgaatatcgttcacctcaatcagtcatgacacgcttttgatgaaatttctgcaggagctaggaactgagtatctggtcaagccacttggtgatgcagaggacgaggagcattccagtgacttcgagccagatgaaaacggtgagggtgccgaggatgaagagattgatgaggacgatgatggcgatgatgattccgcgaaggcgcaatcctcgtcgaagaggaagaggtcgggtggcgacgatgaagatgacgacgatgatgatgacgatggtgatgatgatgatgatggtagaccctcaaagcgatagttgagcagctcatctggggtcagttgtgtcctctgcagggtgctagaaagaaaataatcctcttggggagaagattgttggtaaatgcttgtagctttaggacatctgtggtttaggtttagcagctcaaaaacttgagagacagtccatcatgttagtcgttagtgcatactgctgatgtgtttgattaacagcctctttgagaacatcatctgtatgaggaaagatatgagaggcttgctttatgctttgtgtagcttctaattc

SEQ ID NO: 15417 - DNA, 1605 bp, Oryza sativa
  ref <308>: DATABASE ACCESSION NUMBER: AK065941
  ref <309>: DATABASE ENTRY DATE: 2001-12-06
atgggtcggaggaaggcgatgatgaagaagtgcccgtcggagctgcagctggaggcgttcatccgggaggaggccggcgccggcgaccgcaagcccggcgtgttatctcccggcgacggcgcgcgtaagtccggcctgttctctcccggcgacggcgagatgtccgtgttggatcagagtacactggacggaagcggcggcggccaccagctgtggtggccggagagcgtccgtacgccgccgcgcgccgccgccgccttctcggccacggccgacgagcggacgccggcgtccatctccgatgaccccaaaccaaccacctcagcgaaccacgcgcctgaaagcgactcggactccgattgcgattcgctgttagaagcagagaggagtccacgcctgcgtggcacgaaatccacagaaacaaagcgaataagaaggatggtgtccaacagggagtccgctcgacgatccaggaggagaaagcaggcacagttatctgaactcgaatcacaggtcgagcaactcaaaggcgaaaactcatccctcttcaagcagctcacagagtccagccagcagttcaatacagcggtcacggacaacaggatcctcaaatcggatgtagaggccttaagagtcaaggtcaagatggctgaagacatggtcgcgagggccgcgatgtcgtgtggcctgggccagctcgggctggcgccattgctcagctccaggaagatgtgccaagctttggatatgctcagtttaccacggaacgatgcctgtggtttcaaaggcttgaacctgggtcgacaggttcagaactcaccggttcaaagcgctgcaagcctagagagcctggacaactggatatccagcgaggtgaccagctgctcggctgatgtgtggccttaagacacttcatccgtgttcgagagagcttgagattctaagaagcagccggtgagaatctgaaaaggctagttgttcagtttcctatttttagtttatgtttgaattctctggctactaatgctcaaaatctgggaaagaatctaaatcgtttgggacagataaaaaattatgcgagaaggtgtagctgacagaaaccttcccaaacaaatctccatcagaacctatatgtaaagtaatacggtatcctctgttactaggtgcatgtgcataactgacaagctgctaagtactaggtactacagtctgaggcaagtatttctggtgttttggtgctgaagaactatgttttagtgcgtttgatctgcggcaatcaaggccatctgatcgaaatttgattggtataaatctgatcgaaatttgattggtataagtataatagtttgattttgatcacctctagtcgtcagcgcctttggtgtatacgctctgtaacatctgttacgaattgatctgttcagtatacttcaacagtcctgcattggttcagttcttggcgtagctctggtgcttctggtgcgcatagcatcggtgtgaaatgtgccacttttcatggcagttgtaatagtaaacgactgcaaaattacggtgtactataattcctaaacaaatatgtgacaattacgatgaaaattatcactg

SEQ ID NO: 15418 - DNA, 1036 bp, Oryza sativa
  ref <308>: DATABASE ACCESSION NUMBER: AK065942
  ref <309>: DATABASE ENTRY DATE: 2001-12-06
gagaaggccagaccacccccaaaacctcctcgttggccgtccagtgcggcggagagagagagggagggaggaaggaggccgccgcgcgatggggggcgacctgtacgcgctcgacttcgacggcgtcctctgcgacagctgcggcgagagctccctctccgccgtcaaggctgcgaaggtgaggtggccatgggtgtttgagcaggtcgacgctgccatggaggagtggatcgtggagcaaatgtatacccttcgcccagtggttgaaacaggatacgagaatctgttgcttgtcaggttgcttattgagattcggataccctctgcccggagatcatcggttgcagatgggcttagcatccaagaaatactggagaactggttaaaactgaagcccacaattatgagtgaatggaatgaagatagggactctctagttgatctctttggcagcataagggatgactggattgaaaatgacttgtctggttggataggtgctaacagattttatcctggaacagccgatgcattaaaattttcaagttcagaagtctacatagtcactacaaaacagggccgatttgctgaagcactattaaaagaattagcgggaatagaatttccctctgaaaggatatatgggcttggcactggtccaaaggtaaaagttctccagcaactgcagcaaatgccacagcatcaaggcctgacacttcatttcgttgaggaccgtcttgcaactttgaagaatgtcattaaagagccagcactggaccaatggaacctctacctggtgaactggggctacaacacaccaaaagagagggaagacgcagaaggtatatcaaggatccaggtcattgatctccctggtttcagccaaaagctcaaatagttaaaccaatgcaaaaatcttccaaatgtattacgcatttctagtgatcactttgacttgatgtgcttaaacagcacagatacttgatttttttcattgaatatacattattatttatgaacttactgttgaacattc

SEQ ID NO: 15419 - DNA, 1260 bp, Oryza sativa
  ref <308>: DATABASE ACCESSION NUMBER: AK065943
  ref <309>: DATABASE ENTRY DATE: 2001-12-06
ggtggacccgtttcaaaaaaaaaaggaaagaaaaagaaatcgcttctaatctctacacccacctccgcttccgctccgccgcgccggccatggccgccgcgtccgcgcgcttcctcctcctcctcccggccgtctccccagccgccccgacccacccgcgcctcctcttctcctgccccctaccgctcgcggctcgcacgcgcctcgcggcctctcggtcgtcgtccgatggcgagggcgacggcggcatcgtcacggggccagcggggggagggggaggcgtcttcctctcgccgcgcgcgctgtcgcagcgcgacgagctcgccgccttccgctacgcgcactccttcccgcacggccgcctcaccgtgcgggcgctcaccccggcgggcgacgacgacgagtccgacgcgctcgtccgcctcctcgcgtcgtccttcgccgagaacgtcaggtgggcacccgcgcagcggtacgagcagctcctcgcgttcgtcatccgccgctacctcttcgagcgccgcggcctcgccccgcacgccgccgtgctcgtggggtactaccgccccgccgccacgggagacggggatgaggaggagggcgagggcaacgaggacgacgacgactacggggagatggcgtgcacggcggaggtgtcgctggacgcggtgggcgcgcccggtgccccgcccacgcccacgccgccgcttgacttcccgtacatttgcaacatgactgtcaagacgtcgttgaggaggagaggaattggaaaacaacttcttaaggcatgcgaggatctgattatcaagatggatgccaaaaggcacgtatatctgcactgtaggataatcgaccaagttccattcaatatgtacaggaaagcaggatataacattgtccagactgacagtattttggtttggctgagcctccaaaaacgcaagcacttgatgagcaaggaattactgcaaacttctgttagcagcaggagtacagccaaagattttgatgataacaaattgacaagctgagcatggtagagaaccatcaggtattcataagattgaattttctgtatagctctatgtttctatttcaccactaatattttcatgtgtatattttttctgttgaatatctttatgataaaactagctaatgctgatcaagtggccatcagcccagcacaaaatggttatggaaaccactaaaatgttgtagcccataggctctcgctaatcagaagtgatttcaaactgc

SEQ ID NO: 15420 - DNA, 4240 bp, Oryza sativa
  ref <308>: DATABASE ACCESSION NUMBER: AK065944
  ref <309>: DATABASE ENTRY DATE: 2001-12-06
ggccctcctctccagatccccttcctctctctcgatcgccgccgcctcctcgattctcagcgcgcgacgcaatctatccccccggctcccgcgcttctcccctccctcccgcgcggttcccgcgcttctcctctccctctcccgctcgcgaaattgcctacctatatgacagagaaatccagttgctccaaaattccccatcgccatattccgccgcttccgatctccctcttccgccggccaccgaatcgacagccacctcgaccacagacccgctcctcttccaccttgtataatctctcccgcccccgcaagaaattcctgcctaaaaccctagttccccaccaccaacaccatgtctcgtcggaggaagagggaggtagcgccgcctcctcaggccgtcgtgagctctactgctccattcgctgttcctacgtcgcaggcagcgccatatccatatgggggtctcgggttcccgccgccaccgacagcttggcttgcttctccacagccacaagccatgcctggctcttctgctttccatcctcctgcggccggcaagactgatgtgcatcctgatcttgaagaatggtatgtctgtcaattggctttgttagttctgaatttgccatgctgattactccttttagtgctaaataaaaaaaaagagcatgtactgatttacttatttaagtgatgtttctttgaaaaacaaagttacaaagcatgcactgaattctatttaggctaataagatttgatatccatttgtgactgaaatctgaaacaatttgattgtggttattgcactgaaattttacagatattgtttgcatttaaaaattgttgacataagtgaccacaagctataagtttcggtgggatcataataaaaacctgaaacaatttgattcgattttcttgcacctaaacacatgcaacccatcattccaaatttaagcacacaatgttcagaattatatttctaatcagcatggccagtggcgaattcacctcccgtgcagctgcccgggcttcacagcgacgatccttcgctaaaatagattaattcccgggcagtgtgtatgctagttagaggtaataacggcaagcatgtaggctgcaaccgacacttgggttaggcctcggctgcctatggcatgcatgcctcacaagtactagcctcaatgcgtcacacggacatgtacagaagcattgaacaacttgctaagttttaattctaataccagttccttgaatgaatagactaacttattgttgctagagtttcaggcataatgtaatatttagatgatatatatgagataagtcttaaaataacagagttacatataagataagtcttaaaatatcacaatgttaatttttatggctttatacaaaaaaaatgaacatatttaaatattgtagcagtttatttgttagctagccttgcccaggcagtttattcagttgaactggtccccaacaaaataaattggctgtctttttaataaaaacccaatagattagtgggcttctgctataccttgtttgcaccaatgtagtataggctcgtctgttagccctttgtactggatgagtgcatgtttattttagtagtgtatagaactccatttacaaactgaatggccattttcttgttaaaatattatattattcggacacaacttgaacaagatttgcatgttcatgtgttctatacggggggttgaatctcgtccgcccggcggtttcgttaattttatcaataccccatcaaaccatgtccatcatgtggccgaagggagtccatcacagcccatcaatgttgtgaatggacatgtcgctaggactgataagcgcttgtcatggatgaaggatgaagacttgagattgatcagtgcttggctgaacaactcaaatgatcctatagaatcgaatttcaagaagaatgataaatattggggcgatgtagctgcagcttacaacagcactacaccaaaaaaccgagctagactagttaagcaagttaaggatcgttttggtaaaattaggaagaaggtcgggaatttttgttgctcttggaaggaggttaattcattatatgctagtggggagtctaatgaagatctgatgaacaaggcacagaaaatatatgagaatgacttcaaggatggtccattcttgtttatgcactgttggaatgaactaaaaaaacaaccaaagtggcatgcatatttggagcagcttgacaagtcaaacaaaaggaaggcagattacaatgatgttatcccccttgatgatgaagaagatataccacgaccaataggagccaaggcatctaaggcgcaacgtagttgcaaagaaaagagcaaggtccaagtttgtacaactgagcttgaggatgacatccgtaagtttatggatgcgcatgcagcaaccaaggaagggcaaaatgaagtgttagagacccaaatacgggtttctattgacaaccatgcagccaaaaagcttagtcgccagacagctatgattgaaacctatcgagacttaatgaacaaagacacaaggaagatgcctgacgatatgagatctgagcttgttcacatgctgaaatgcatgagagaagagatattcaacaaaaatcagtgagactcctttgctactcgcatcgtagagaagatcaagaccaagtttgcagctgggctactcaagcgctaaagtggaactaggaagaccattgcaagggatcatgaagaaggtcaccgacgtctagtggctgattactttgcaaatcagccactctaccctgagagaatgtttcgcacaagatttcgtatgcgaaagcatctctttttacgtatcgtgcaagccttaggtcaatggtctccatactttactcaaagagaagattgttctggtcgcactggcctttctccacttcagaagtgcacagcagcgatccgtatgttagcatatggcactcctgctgatgctttagatgaatacttgctaattggcaaaagcacttccttagagtgcttggacacttttgcacgaggggtagttgaggtctttggtgggcaatacttgcgacggcccacaagtgaggatatagatcatatactacaagttaatgaatctcgtggctttccgggtatgttaggaagtattgattgcatgcactggaggtgggagagttgtccgagagcttggaggggacaattcacccgtggtgactataaagtcctaacaattatccttgaagcggttgcgtcatatgacctttggatttggcatgctttctttggtgtcgctggttctaacaacgatataaatgtgctgaatcagtcccctttattccttgaacaagtgagaggggaggctcctcgggttcatttttctgtaaatgggaatgagtacaacaatgggtactaccttgctgatggtatatacccagaatgggccagcttcatgaagacgatatcacttccacaaatagagaagcataaattgtttgctgaacgtcaagaaggtgcaaggaaagatgtggagcaggcttttggggtattgcaagcccgtttcaacattgtacgccgtccagcaaagaagtggaagcgaaagagtgttgggaaaatcatgctagcttgtgtgattctccataatatgattgttgaagacgagagagaggatgcaatatgtgacattgacctcaatagaattcctaggacatcaatagttctgcctcctgaagtaacttgtgatgataacccatgtttttctgatgtgctacgtaggagatctgctattcgtgctcgttcagtccatacccagctgaaaaatgatttaattgagcatatttggaatcggtttggaaataggcagtcaacataaacatggaagatgttctcttgtccaattcatggtgctgaacttcttacagcaaatgatggtagttcaggcaatggtcatatgatgcaatggttcaatgaagagtctctctttgattagatgaagaaatcgttatctatctgttagataacatatttatgtattttgcttaatgtcacattgtttgtgacttttggatttgtaaaccattaagtatgttttgttttatcctctattaccttgtcggttatttagacatgcactaccctatccttttgtttagacctgggatgatccattaatctacttgctatggtattttatttatctgttgttggtgccttgt

SEQ ID NO: 15421 - DNA, 2088 bp, Oryza sativa
  ref <308>: DATABASE ACCESSION NUMBER: AK065945
  ref <309>: DATABASE ENTRY DATE: 2001-12-06
gagccggccggaggaggaattaagcaacaagctaagctaagctagccagaggaaacaacaaggaaaaggagagatcgatcgagcgatggagcggtcgacgacgacgacgacggagcagcagcagcagcagcagcaggggcggaggagaggcgcaggatggcggcgttgggcggtgctggtggcgacggtgtggatacaggcggtgacggggacaaacttcgacttctcggcctactcgtcggcgctcaaggcgtccctgggtgtctcgcaggaggcgctcaactacctggccaccgcctccgacctgggcaaggcgctgggctggtcgtcgggcctcgccctcatccacctccccctccccgccgtcctcctcctctccgccgcctccggcctcgccgcatacgccctccagtacgccctcatcctcgactacctccacctcccctacccgctcgtgttcttgatctgcctggtagcaggttgcagtatctgctggttcaacacagtatgctttgtgctctgcattcgcagtttctcctcgagcaatcgcccactggccctctccctctccataagcttcaatgggctaagtgctgcattctacaccctctttgccaatgccctctcccccttttccccatctgtctacctccttctcaatgccattgtccctctcgtcgtatctcttgttgcactgccagcaatactcctctgccacccacatgacggccacctccacgttgtgcccaagcatgacaaacgtatctttcttggtctctacctcctcgcgttcatcactggcatatatctagtgatcttcggctctttcaacacaaccaactccactgcatgggtggtccttacaggtgccatggtcctcctcgccctccctctcatcatccctgcctcctccagttgttctcatgtggacacacatgaccctgaacctactgttcaactcaaccacgaagattcaagaaaaccacttttgctcaatagtgaccacagcacagagtccaatgccatgatgcagaaaacagtggaacacccaatgcaggattgttgcttgggaacagtactggagaagggacgcatgttggttctttgtgaggagcatagtgcaaagaagcttatccagtgcgtcgacttctggctatactacatagcctacttctgtggtgccactgttgggctagtgtacagcaacaacttggggcagattgcacaatcatttcaccgggaatctcagctcaccatgcttcttgccgtctactcctcctgttccttctttggtcgccttctctctgcacttccagacttccttcgcaggaaggtttcgtttgctcggacagggtggcttgcagctgcgttggttcccatgccaatggcgttcttcctaatgtggaaattgcatgatgtaaacactctggtagcaggaacagcactaattggtctaagctcaggcttcatctttgctgcagcagtgtcagtgacctctgagctctttggaccaaacagcattggcatgaaccataacatcctcatcaccaacatccctcttggatcacttctctacggtcagattgctgccctagtgtatgatgcaaatggcctaaagatgtcagtaatagacaaccgcaatggcatggttgacactatggtggtttgcatggggccaaagtgctactcaaccacattctttgtgtggggttgtatcacatttcctggggttggtgtcaagcataatcctattcttgagaacaagaacagcttacagtgctgctggtggtcagcaagttgtaaacaccttagcgaagtttcgacttgacagaactccttgatctgttccttactgctatgaaaccatggctactttgtacaagttttgattgagttctaggtgaactaggttagtagataacatgcatgtaaataaaatcatcagagagaatcgcagagaaagaagcagattaggatagcagttccatttacagggcattgatgttgagttgttgacatccaagatgccacggaattaattttgaacaattgtttctaacataaatagtaaaatcaagaacgtttctc

SEQ ID NO: 15422 - DNA, 1748 bp, Oryza sativa
  ref <308>: DATABASE ACCESSION NUMBER: AK098944
  ref <309>: DATABASE ENTRY DATE: 2002-08-28
gttcgggcagagatggagaactacaacagagaagaaggagatccatctacacatatatgaagaacacacgcaagagaaaacacagggcctcggcggaagggcacgccaacgtgtgcgcggccggccggccgaaggcggcgcagcatggcacaccaaaagtgtggcccgccgggggcgccgctcgatgctggaagatcaatctacccggagacgaaggctgcgacaagatcgacgccacgccgtccaggacgatttcatctaacattgtccagttcttctgtttatctctttctctctctacatgtatatttcaggctttcagcacatatatgcatggacagtcattcaactcccatcaatccatccattggcggcggctgcgccgaaggcagaacacggagggaggaagaacacgacggcacgagagaagccggtggctgccggccggcgcatccgacgctcggcgagggtacaggcggtcacccaagagacggcgccaggcgatcgacattcgtccagtcatccctcttcctgatgagaaggtacagcacgccggccggcggctggacagaatgacagaggagagaggcagtgcacggtcatctacaccagcacgccaggccttctctttctttcttttttacagattgatcatggagtcgagggggcacagatgtagaaccacggcaaaagagaggatccatccatcaactcctggcatcaacaagatcgatagatcaacacacttccatcccgagaacactcaacacacataacacatccatcccgaaaacactcaacacacatctatccattgacgatcaacccatccacggtggcggcgagcgacttcggccggagcaccggcgtccggcaggagacgcggcgctctgatcatcggcaagcagagatcaatggctgctcaaggcaaaagaactaattagattggttccttcttttcttgttgcagaacatgcatgcatgcgtaggagatgtacatatgcgggtgctgttgctgccgtagtagttgcatcctctgtacgtgctccccgggaagtaatcgtatcggcgccaccgcccaccgctcatccgagtcgacgagatgctggttatccctggagtcgacaccgccaatcgagtcgccggtgatgcatccacctgaaactgcggcgtcgccgagatgccgagatgtcgggcgtcctcgctttgtcggctgcaagtttcaccgcggcggactgaccatgtcggagtcgtcgtgacgctgctctgctggggcacgccaggatcgccggaggcccggagccaccgtcgactgccaagactcctgcttccaccacgcacagcgtatcaaatcatggccgcagccctttcccccgacgcggccgatgttcggcgctgctactgttctcacgacggcgatactatcttcctcacgatggcagcggcgccgcgtgcagatgatggtggttatcgatctacatcaacaaatatcgtcgggctacagatcagatcggcgatcggcggcctcatgtacacacatcgcatggcagcaacacaagccgaagcaaagcagcagcatgccgagtcaactccattcagcaaatacatggtgtggcaacgtggccgaccaaccggagggtgacacatcatcaccatgcttcagtgccatgcataagaagttgtcaatgcgatggctaaacaaatcctgttgatttcaagctttttcaattcgatgctgagctgtggtt

SEQ ID NO: 15423 - DNA, 1007 bp, Oryza sativa
  ref <308>: DATABASE ACCESSION NUMBER: AK065946
  ref <309>: DATABASE ENTRY DATE: 2001-12-06
gactcagcaacagctcgcagctcactctctcactctactactcgtagctaagctagctcgcgccgccgccgccgccgtcgccgccgccatgagcaaggagaagcaccacaagcgggagcaccacctccggcgatgctgcggcgggatggcggcgtgcatcctggcgctggtcctcgtcgtcggcttcatcgcgctcgtcgtctacctcgcgctccgcccctccaagccgtccttctacctgcaggacctccagctccgctccgtcgacctcggcgacccctccctctccgccaccgcgcaggtcaccctcgcctcccgcaaccccaatgaccacgtcggcgtccactaccgccgcctcgacgtcttcgtcacctaccgcgacgaacccgtcacggtgcccgtctccctcccgccgacctaccagggccaccgcgacgtcaccatctggtcgcccgtgctctccggcgagtccgtccccgtggcgggcttcgtcgccgacgcgctcaggcaggacgtcgccgccgggtacgtcgcgctgcaggtgaaggtcgacggccgcgtcaagtggaaggtcggcagctgggtctccggcagctaccacctctttgtcagctgccccgccatgctcgcctccgccggaccaggcggcgtcggccccatgcctctcggcggcgcctccgccgccgtcgtgaacggcaccggcgccggcgccgtcgcgtcgctcaggttcacgcagccgacagggtgcagcgtcgaggtgtgagtcacaaatttgagtagcggctagtggcaatatggtaattaattaagttcatcggtcgcgttaatccgcaagctgttaattttttttttgtgttcatgtagctcatgcatactctatgtgagagaataaagttacgtacgttcatatgtataccattgcaacacattaatttcctatatgaagtgtactagtataatttcgttgctgtaatttttgaattattgttaataatatatattcaggt

SEQ ID NO: 15424 - DNA, 4851 bp, Oryza sativa
  ref <308>: DATABASE ACCESSION NUMBER: AK065947
  ref <309>: DATABASE ENTRY DATE: 2001-12-06
ggattcggtggcaaattcatccagatcaatccccgtctccggatcgagagaaaagaagaggaacggcgacgcgcgtgtacagcctcgcgccgcctcgcctcgcctcgcctcgccggggcccactccgccgcctctccgggagccgcagcccgcagttcgccaccaccacggtccacggtgcgcgcccgccgggagcaccagccgtcggcgccggaatcgatcccccgtgctgccgcctcctgtgcggggacccgagccaatgcctcgcttcgtcgcctgcggcttctgcgacctcttcgggagtacacatatggatttgaagcactgaaatcttttctgtttttgttgtttcgctgatagtagttcttgtcttgtggtgcgatccggtttgtcttcctccacaccacaagatattgcacttatcgatggaaaacagtgcgaagaaaaggaggaagaattggatccggtagtaatggaagaagcactggactggtctttctgcgaacccttgctgacagttgccatatctttgatggacagagctttattctactttggtggtgtcaaggagaaggagaaggggagcaagaaaagatttggtggtgtcgacaaggagaagatattggaacgactcggacatgttcgagcaatattcgatgagttccgtcatctggttctgaccaatctgaaaattccgttcagctacaatcttaaagaaatctggagtttcaggattgacattgaggggttcgagcactggatcgaggagatcgaataccgtgggctggtgggacagggtcgccacccgaccttcaatattctcaaggcaaagatcaccaacaagtttgcgaaatctcctgattcgtatgccatacgggaagggctggatcacctgatgaggttagcggatattgcagcacgaatacggtatttacgatttgagatctctgtatcctccagcagaacaaccactccggtggcagttggccgagggagggagaaggaagatatagaggtggttagccgagggagagagaaggaagagatacagctctttggccgagagagggagaaggagcagatagtgcagtggttgatcaagcaaccagctgagaactctgagtctgagatcttcagcactgatcatatccggctttttgcaattctgggtgtggctggcatggggaaaactgcacttgccaaggtagcttgccaagaacccattgtgtcaaccattttcgactttgttgtgtgggttcaagtgccttatgatttcactacagagacaatagcaaaaatcataatggaaactgttaccagtgtgtcgcctgaatactatagtttaaagtttctgcagcacgctcttacgggcaaaaggcttttgcttgttctggatgatacctgggaagacgaaagtgtgaagaagtgggaagcactggtggctactctcagtaactgtaagagagggagcagtatcctgctgacaactcgaatgcaatcagtggttgatatggcagcagaagctgtagggtctccagctgaatgtctggaactggatgaattgggcaaaagtgacaatctcttgttgttcatgagtcggttgccttctcaagtgcattctgaaggttattatcatcttcggttgatcggtgaacagatagccgaaaatactggaggatgcccacttgtaacagaaaaggtcgcttcatggttgggatcatgtgtggagaaccatcattggaatgccgtcctacagaaaggctggcagaaactgggacttaatgccatttttgcaagttctaggttgagctatgaacgtctaccttcagaactgcaaatttgctttagatactttagtatatttccaaagggatacaaatttaacaaggtggaattagcaaacatgtggattagttctggattgataccttttggcttatcgaaacaagatgatactggcttacagcataagaaggctgcctacctgtttagtgcagaggatgttggggaacaatactttgctgcattagtaaggaaatcgttcttttgccgtttgctggaaacagacccttctaatggaaatatgaaagaatattatgtcctgcataatttgatgcatgactgtgcacagtttgttgcacgaaatgaatgcgcaagagtagatgacaataattttcaagatgtcaggcggacaacagtacacttgtctattgcacattgtggctctttaagagcaatcccccctataacaaatttacgtactcttattatacaaagtgaattttgtcttgatcaagaggctgaacttatgcttggagaagttcttcgtaaatcggcacgcttgcgtctgctatacttggatgtgccatccctctctaatgcacttgatgaaatccccagtctaacacagctccgttacctcttcctgttttcatgtgataagtctcatattcgaagtatccttaaactctgtcatctgcaagtgttcaagctcaaatatttcacaggtaaacaagcagacttggatggcatacggaacatgcgtttcttgcgttgtcttcatgttcctgacagtatgttatcaaagatacttaaaactgggatgccaacaacacttcaggagttacaagaattcgaggtagctaaaaatgatggtcacatgttgagtgcattgagtactttaacaaaccttaagcgactcagcctaagaaacctccaaaatgtcaggaactgtaaagacgcaatggagatcaaattaaaggacaaaccagacatgatgtttttgtcactatcatggaacaaacactcaaatgatccagaggatatagatcatcaaatcatcgataacctagaaccaaacaaaggaattcagcagttgcatgtgtatggatacaatggagtccaacttccggtttggatcgagacttcatttctcatccatttggtgtcacttgagcttcaatactgcatggaatggaggaccctgccatcatttaaggagcttagttcactgaagtatctaaagctggaacaccttttccaattaggctcggtgattgaggagcaatctgggagcatagaatcagataatgcatttctgcccccattgctcaatacgctgatcgtccggtggtgccctaacctgaagaaactccctgctttaccttgtacccttgagaaattaataataaggcatgtttggcttgcagttctccctagattacatcaggcatatgctagcacatgtgaatcattatcagtagattcgcgtctttctcttttgcacattgaaagttgtgcacatttgacttctttggatggtctcctagatcaacagcaacatcttcagcacctcaagacattactcgtgagacattgtgcaaaactatgccatctaccggcaaatggtttcacagaattacatcacttgaatttcctagaaatagttgcatgcccaatgctgaggaatgttaagactgacagcaatctgttccctacatcactcaataacttggatatcaatccatgctgtcatattgaggcttcagttctcatgtcactgccaaacctcacctatctcagaaggttatcattggtcagttgcagtagtgtagaaaaacttccatcagatgaagtgtttaggacactgaaaaatctcaatgatatgttgatagccagatgtgaaagcttgttatcactcggtgggcttggagctgctgcctccctgagaactctatcaatcctgtactgtgacaaaatctattcttcatcatctccacaggctggctgctcctttatgctatggaagctcaaagttgatcgtgaagccatgttgctggtggagccaataaagagcctcaggtacaccttggagctgcatattggtgatgattatgcaatggattccttgccagaggagtggttgcttcagaatgcttcttcactccgtttgatcgagataggagttgctaagaatctgcagaccctacctactcagatggaaaagttggtatcactacagagtttgcatatcgaaaaagcccctcgaattcagtttctccccaagctgccattttcacttaataagctcacaatctggggctgtgacccaaggtttctgaagctctatgaaaggaatgttggttcagactggggaaaaattgaaaacattgatcatgtggatatgaaagcctactctgaagaaacaagcgatgatgatgatgataagattcagcatttcgatgacagcatcagctatccttccagccaatttattgtcatagactaaatacctgtgcagcatgtggagacatttgtctaagactaagaaatggctgagcatttggatatgattcaaatcttgctcctggtaaagtgcaatgccagaatgaggtcttacagactcactttacgttctgtggtagcactgaatgatatgaacttcatagacccggattccagggagggtccaaactccagacgatacagcatgcagttttgcagtgtggtgactaataaccacaccagcaggttcagtatgaagccatgaagagattggatggtaatcagctattcatctgcagactggatcacagggatctggagtgtgatgccagaagcatactcactgatgatgtatatatgtgctgatgagtagtttaagcacaagaattctgctttactcatgagtcctgacataagttttcttatctattacgtaggtggtacatctctgatgggattactgtgcctaaggcagtttctgattgttctgtgcatgaatgttgtgttgcatttgggttttaaatcaatggaactggccactgggtaagggatttgtactggaattgt

SEQ ID NO: 15425 - DNA, 3585 bp, Oryza sativa
  ref <308>: DATABASE ACCESSION NUMBER: AK065948
  ref <309>: DATABASE ENTRY DATE: 2001-12-06
ggcttctccggtggttctcttctcttctcttatcccccggagacgccgctgcggcgccaccccctcctcgccgtggacctcggggtgggagcgtggcggcctgcacagccggagctcagctcgcccgccgcgtcggatggacgccgcctcctgctgccgcgtcttctcgacgcagagatgccgcttcccgctgcggaggctggcgccgccgatttcgcggcggccgttcggcacggagtcgacgagtgagctgttcgccgcgtcgacctcgaagcggcgctcccgggggcccgtcatggcggcgaagaaggccgccgagggtgctaaacaagaagaggggaaatacaaacacacggtggatctaccaaagacaacttttggcttgagagctaattctgttgtgcgggagccggagctccagaagttgtgggaggagaaccaggtgctcaagagggtatcagaaaggaacactggggctacatttgttctccatgatggtcctccttatgctaatggtgatcttcatatgggccatgcactgaataaaatcctcaaagatattataaaccgttacgagctgcttcagaatcacaaagtttcttttattcctggatgggattgccatggccttccaatcgaattaaaagttctaaagtcactggacaaggaaacattgaatgctctgacacctataaaattaaggcagaaggctgcaaaatttgctaaagcgacggttactacacaaatgaattctttcaagcggtttggtgtatgggcagattgggacaacccttatctaactctgtcaccagagtatgaagctgctcagctagaagttttcggccaaatggttatgaaaggatatatctaccgcgggcgaaaacctgttcattggagtccgtcatcacgtacagctttagcagaagctgagttggagtattcagaaaatcatatttccaaaagcatgtatgctgcattcaagatcaccaatctgtctaagcctgggttgctggaggaatttctccctaatttatgcctagccatatggaccactactccatggacgattcctgctaatgctgctgttgctgtgaaccctgagctcacttatgtagtagttgagctgcaatctgtactagaaagtgaatcaacatctggtggaaatcaacgaaagcttgggagtattttgagccctgggagtcagaaaccatttatcatcgtggctgctgatcttgtctcagctctagagtccaagtggggtacaaagcttataatccagaaatcatttcctgggtcagccttggagcactgcaggtatattcatcctgtgaatggcaatgaatgttctgttgttcttggaggagattacataacaactgaatctggcactggccttgttcatactgcccctggccatggtcaggaagactacataacaggtttgaaatatgggcttcctattgtgtctcctgtggatgatgaaggaaacttcactgctgaagctggacaattcagtggtttatctgttctgggagctggtaatgccgcggttgtgaattatctggatgaacagtgttctctcattttagaggagccttacaaacacaagtacccctatgactggcggtctaaagaaccaacaatattccgagcaactgaacaatggtttgcctcggtgggtggtttccgtaatgctgcaatggatgcaattaggcgagtatcttggattccttctcaggctgaaaataggattgtggccatgacttcaagccgttctgactggtgtatttcgcggcagagaacttggggggttcctattccggtcttctatcatgtagactcgaatgaacctcttataactgaagaaactattgaacacatcaagggtatagtgtcaaagaaagggagtgatgcctggtggtatatgacaattgaggaacttcttcctgaaaaatatcgtgataaagcatctgagtatcgcaagggaactgatacaatggacgtttggtttgactctggctcctcatgggctgctgttttggcacaaagagatggccttaattttccagcggatatataccttgaaggttcagaccaacaccgtggatggtttcagagctcattgttaaccagcattgctactacaggaaaggctccatattctagtgttataacccatggttttgtactggacgaaaagggtttcaagatgagcaaatctcttggtaatgtggttgatcctgggaaagtaattgttggtggtaaaaattcaaagcaagaacctggctatggagcagacgttcttcggctatgggtttctagtgttgattacactggagatgtgttggttggtccacaaattttgcgccaaatgtctgacatgtaccgaaagctacgaggcacaatgcgattcctattgtcgaatctccatgattgggaaccagaaaattctgtgcgctacagtgatctaccgaaaattgacaagtatgcacttttccaactggaaaatgttgtgacttccatgaaggatagctacgagaactaccaattctataaaatataccagatcctccaaagatttgctattgttgatctctccaatttctatttggatgttgcaaaggatcgactctatgttggtggccgagttagctttacaaggaaaagctgtcagacagtcctcagtgcgcatctgctctatcttgttagagccattgcccccattatgccacatctagctgaggatgtatggcagaacctaccgtttcaacacacactggatgatggatctgttgctgagtttgtttttaatctaaaatggccagttaagaatgaagaatggctctcggttccaaaggatgatgttgattttctgagtgttatcctcgagttgagatcagaggtgaacaaaattttggagagtgctcgaacaggaaagctgataggctctagcttagaggcaaaagtttatctccacgcggaaaatgctaacacagtgtccaaactaaaggagctggtttcggcaaccaatgacgctgatgctctgcaccgcctgtttatcacatctggggtggagatccttccttccgtaagctccgaaactacatctggtgtatcctacactggaacttttagcagtgagcgcaccggcaacatctggattggtgtgactcgcgccgatggcgaaaaatgtgagaggtgctggaattatacccgagacgttggatctttccttgaccatcctactctttgtgcccggtgccacggtgtcattgatctgccaccagttcctgctgccgcggctgtcagctgaggctgctcgagagtgacaaggaccactatcagcttcatttgaagattataggtggaattaattgtttttgttctacaattttgttcccctctgaccgatgatgctagaggaaggggaaacttgaagagggtttcggaaacttagtttctaacttcatttgttgcgtacaataagttgtaccttgatttttgaccattgcttggcttcctggagctgtaattgtatatttgtattgcagaactcacacggattaaagatggaaacagttttgc

SEQ ID NO: 15426 - DNA, 1093 bp, Oryza sativa
  ref <308>: DATABASE ACCESSION NUMBER: AK098945
  ref <309>: DATABASE ENTRY DATE: 2002-08-28
ggggtcgtcctccttccgttccgcgtcctctcaaaaggttgggaggaggaggaggcgacgcggagcgcagcagtgtgagtagtggtaagccatggaccgcgtgcagctcctcctcgtcggtctccccgccctcctcttcctctccgacctctcccacatcttcgcgccgccgccgccgcatctccggcacccccaccaccacccgccgcaccaccatccccatccgcctcaccaccaccccccgcatcacccccacccgcctcaccacccgcatccgccgcatcacccccacccgcctcaccacccgcatccgccgcaccatcacccccaccctcaccccgatcccgccgcggaggccatacaggctaacgttgatggagctggatatggcaccaccgtcgagctgcaattctgcgcctcctgctcgtacaaggggactgcaatgactatgaagcgcatgctggaaacatcatttccaggcattcatgttatcttgcacaattaccctccacccttccccaaacgtgtacttggcaaacttgtgccaattcttcaggttggagccattgcaacaataatggctggtgatcatattttccccagacttggaatggttccacccccatggtactactcactgcgtgtcaatagatttggaaccatggcaacaatctggctatttggcaattttgcgcaatctttcctacaaagttctggtgcctttgaagtttactgcaatggagatttggttttctcaaaattagctgagcagaggttccctagtgagtttgaactgcgggatctcatcaacagcagattaccagattctctggttgggaaaaatgtgggaaaatccttgtcttagacaatgacattggaatatcacatgccaatgcgacatcttgctatcaaggtagtactatattgtttgctgtttgacgtcgagcagtttggaagctctgcagcttgtctgtgaacactactattcaattaaatggcttgtaaaggataacctagagtgagatagtgactcaattgtatgaacttattagttatgccacaaaaaaaatcatcatttcctgtttattttctg

SEQ ID NO: 15427 - DNA, 1755 bp, Oryza sativa
  ref <308>: DATABASE ACCESSION NUMBER: AK065949
  ref <309>: DATABASE ENTRY DATE: 2001-12-06
ggccttctcttctactccccccaccacccccgccttcgtgcttgcgtgtcgtcgcctcacctcgcgcctccgctactactgcttgtctgctgctgcagctgctgttattaccataccgcgggagaaggggggccgaacccgaaggcgtgcgagagggaggtgaggtgaggtggagccgtggaggcgcttgtttcgcgtgcgagacggtgcttcgtttcgcctcacgttttccgagggctacggcgacttggtgggagcgcggagaaaatctagcgagccgtcggagttgggtggcgcgcggccggctgtgcttctgaaggaggagtaattggagtagttgcttgccatggccgagatctgctgcgaggaggccatgtcgccgccggccactgccacggctgctgtcgcggcagcggtctccgcctcggccgccgcagccgtctcctcggcgatagacaggcggcgccgcaggatggagatgaggcgcatccgcatcgcaagtgatctcgagctgcaggccggagaggatgggcgccctggaaagcggcagaggctggcgcacacggcgtctggcgccccgcgtcctgacgaggattcggcgtctgagcggccgagttgtggccgtacggaggagttcccgaggtatggggtcaccgctgtgtgcggccgccgtcgcgagatggaagacgccgtgtccatcagaccggacttcttgccggcatccggcaagttccatttttacggcgtcttcgacggccatggctgctcccatgttgcgacgacgtgccaggacaggatgcacgagattgtcgccgaggagcacaacaagggggcctccggcgaagtggcgccttggagggatgtgatggagaagagcttcgcgcggatggatggggaggtcggtaaccgggcgtccacccgcagcgacgacgagcccgcctgcccgtgcgagcagcagacgccttcgcgtcgcgaccacgcgggttccaccgccgtcgtcgccgtcgttagcccaacacaggtcgtcgtcgccaacgccggcgactcccgcgccgtcatctcccgtgccggcgtccccgtcgcactatccgttgaccacaaacccgatcggcccgacgagctggaacgaatcgaggcggcgggcggccgcgtcatttactgggacggcgcccgggtgctcggcgtcctcgccatgtctcgagccatcggggatgggtaccttaagccgtacgtgacgtcggagccggaggtgaccgtgacggagcgcaccgacgacgatgagtgcctgatcctggccagcgacgggctatgggacgtcgtgaccaacgagatggcgtgtgaggtcatgagggcgtgcttccacaacaacggtccgccggcaccggccgcgcggccgagcggcgtgccctcctcggccgaggcggcggaaaccgagaacggaggagccgcatcggtgaaggggataagcaaggcggagtcctccgacaaggcgtgctccgacgcggccatgctgctgacgaagttggcgctggcgcggcggagcgcggacaatgtcagcgtcgtcgtcgtagatctccgccggggattgtgattcttggcgcaatattctatgctccatgattgctttctttcttcttcttttttttattctaagttaatttttcccttcaaatttcttccttatttctctgtttagttttagttctactactagctcctaccaagataaatgaatataatagccttttttttcgc

SEQ ID NO: 15428 - DNA, 1206 bp, Oryza sativa
  ref <308>: DATABASE ACCESSION NUMBER: AK065950
  ref <309>: DATABASE ENTRY DATE: 2001-12-06
gtggagcaaatcgtggccgatcttgtgttctagtgagttgctgcagccatgaacaatctcttctctagctcgtggaagcgcaccggcggcggcggcggcggcgacggggatattgaatcgggcggcggcgtggagatggcgccgccgccgggggcggcggcgggggcgagccttgataggttcttcgaggacgtggagtcgatcaaggacgagctccgcgacctggagcggatccagcggtcgctccacgacgccaacgaggggggcaagtcgctgcacgacgcggcggcggtgcgcgcgctgcgggcgcgcatggacgccgacgtcgccgccgccatcaagaaggccaaggtggtgaagctccgcctcgagtcgctcgaccgcgccaacgccgccaaccgctccgtccccgggtgcggcccgggctcctccaccgaccgcacccgcacctccgtcgtcgccggcctccgcaagaagctccgcgactccatggaatccttctcctccctccgcgcccgcatctcctccgagtaccgggagaccgtggcgcggcggtactacaccgtcaccggcgagcagcccgacgaggcgacgctcgacaacctcgccgagaccggggaaggggagcggttcctgcagcgcgcgatcgccgagcagggccgcggcgaggtgctcggcgtggtcgccgagatccaggagcggcacggcgccgtggcggagctggaacgctcgctgctcgagctccaccaggtgttcaacgacatggccgtgctggtggcggcgcagggggagcagctcgacgacatcgagacccatgtcggccgcgcgcgctccttcgtcgaccgcggccgcgagcagctggtggtggcgcggaagcatcagaagagcacccgcaagtggacctgcatcgccatcatcatcctgctcgtcctcatcctcgtcgtcgtcctccccatcgtgctcaagttcgtcaacaacaacaagagcagcagcagctcgccggcgccggcgacgccgtcgccgccgccgccaacggcatgatggtcgtatgatagtccatgttgagttcatacttcatagtgagagatttctatttttttgtcgggttttttctttcgtgattgtaattacttctgtatgattagttgatcgtcttgattattatacatatctgattcttctaaatatcattgcatttgaaactgc

SEQ ID NO: 15429 - DNA, 2876 bp, Oryza sativa
  ref <308>: DATABASE ACCESSION NUMBER: AK065951
  ref <309>: DATABASE ENTRY DATE: 2001-12-06
gagcgtggtcagttgtggcactcatcagagctgggagccatggccatggagaagagccgggtcctcatcgtcggcggcagcggctacatcggccggcggatcgttgcggcgagcttggcggagggccaccccaccttcgtcctgctgcggccggagatcggcctcaacatcgacaagctccagatactgctggccttcaaggcgcagggcgcgcggctcctcgaggcgtcgctcgacgaccacgatggcctcgtcgccgccgtccggcaggtggacgtcgtcgtctccgccatgtccggcgtccaccaccgcagccacaacatcttgctgcagctcaagctcgtcaaggccatcaaagaagctggaaatgtcaaggtaatttattttctatctgctcaacaaattaatacataattaattaaaagaacatgatttgtctgtgccaatatacccaacaaaaacagaaataacatgagctcctcaattctcagccactcattttttttatctcaatctccctctccctctcttcccttttccatggccgcggatggtgagcgatggcagcttgggaggcaaggcccctctccgtctccctctcttctcccactctctcctcttcccctcttccatgactagacgatgagcacaagcaggcgtcggaggtgacgttgcagcggtgggatgaggtcgaggtcacagtggagcctgtgacctggggatggctagatttatctctgtggcgcacgagtgaaggaggtagttgtggaagggggaggtctggcgctgatgttgagccagtgttggagaacatgatgttgatctggtgttatgtgattttttttgtcttgagctcgagaactaggtagcggccatccttgatcttcttttctcacgatcaagaagactagcatgctcaaggacgacatcgtcgcttcactgtcgggagcgcacaagggaggagcatcagaatagtggatgtgtgcgttgtgaatttttagtgtttcagtccttaaaatcatttgtttcatctactgatttgactgtgtttcactgtttttcaagaattgaaacattttttcattaactggagctttatggtgaccgggcaccaagttttaaattgagtatatacttaattcaattgagtatgaattttttaaaaaatatataggtataaacattaacttatttactaactagttcaaacaaatttgaactgaatttgaacatctttttgttagattttgattctagctatatactccctccgtcccctaatataagggattttgacgttttgcttgcactgtttgaccatttgtcttattcaaaaattttggaattattattttttgggacttactttattatccaaagtgctttaagcataacttttcgttttttatatttgcacaaatttttttgaataaaacgagtggtcaaacaatgcaaccaaaatatcaaaatcctttatattatgggacagagggagtagcatccaaatatataattagttaggtatgtaataattgaatataaaataaagttgaatttgagatgttttgtcgctaagtataggtatgaatcaaatttttatgtctagatatatactcacaatttgaaaatttttaaaatttttgagtggatttgtgtattttatatatatacctgatagtggatcatccaatattaaccggattgaaaaaacaaaatgattaataaatagatgatgtaacaattcatgcatgcatgcaactcgtaaattagtccgcctgttgcatgcaaagtagttagatatgcagaacgatttttgttcttcataatattcggtatgtaccagaaccaacgttgaaagagcatatgcctttcctttttcagtatacggcacatactgtgtttttttgtatgacttagtatgtgctacgtattagattttttggttgttgaactatatgcgtttttttttaatatccagtagcagtatatacttttttttttataattgtgtttttgttggggacttgatatgatgatccaaaagtatcagtacatcctataagatgcagaaggtatcatatattgagatgagaatatctagaatagaaaaatatttgaatgagccgcggttctaatctagatataaacgaaagcatatactactagttcagtatataccacttaagattaccaggtaggtactgaacgatacatccctaaaattcaaggtgcatgtgcacattgtagcatgcaatccatgagacatgtaattattttaaggatccagtatagtagtatatattttcagttagtactagaatatacctttttgcttagtagtatagcagtagtatatccttttttttatttaatagcagtatatacttatttttagttaggagtagtatatacttatttttcagtcaatagcagtatatacttatttttcaattaggagtggtatatacttatattcagtcaatagcagtatatatttttttagatagtagtacatactgaattttagctagtactacatacttatcttatcttttttagttagtagtatatactgatttttcgttagtagtacatacttattttttaagttagtagatagtatatgtactcattttaattagttcgtacaagtatctactgtctttttcaattagtagcagtatatacttacttttacataatatacatactttctctgtttcacaatgtaagttattttagcatttttcacattcatattgtctagattcattaacatcaacatgaatatgggaaatgttagaatgacttacattatgaaacagagggagtaacatataacagctgctacatgcaagtatgatgattcaagtacc

SEQ ID NO: 15430 - DNA, 2801 bp, Oryza sativa
  ref <308>: DATABASE ACCESSION NUMBER: AK065952
  ref <309>: DATABASE ENTRY DATE: 2001-12-06
gagaggagtagcgagagaaaaatacacgcgcgaaatttccggataagagcagcgccggcggcggatgtaggcagcgtttgctgttgctgtttttttccctttttttccgtctcgttttgctcccacttcgctgctcccggatccgcgtagggttcttgtgtcgtgtggtggggttatgacccgcggcgctgctctgctttgctcgatttgctgtgcttgccttggaggtcgcctgcttggctgcttttgagagtgagtgtgtgtgtgtgtgtgttttttttttatacctcttttctttttctgggagaatttcccgttcttgggtttggtcttttttgcgaacctttgaaccctttcttgttggattctggggggaagtttatttatgcttaatttggcggttcttgttttgtttcggggagtttagaaaattttcgaggctttgattcgttttgattttgggtggggggaatctcgtcgtgcgaaaggattcgatcgggagagcctaccggagtttggattctcgcgtgcaccaccgcgagaattatgaggggagaagtgagcttctagctagcatctagaaccttctagactctcctcgccatggagacgtccaccataagcttctcctcctcgtcgccgccgtcccctccgccgccgcagccggctccgggcgacatcgacgccgtcagcctcggccgcctcagcaggaacctcgagaacctcctcgaccccgcctttctcaactgcgccgacgccgagatcgtcctcgcctccggaggcggcgaccccggcggcggcgccgtcgtgggcgtccaccgctgcatcctcgccgccaggagccgcttcttctacgaccacttctcctccgcccccgcccccgcccccgccaccgccggcgacaagccgcagctggacctcgacgggctggtccccggcgggcgccacatcggccgagacgccctcgtcgccgttctcagctacctgtacaccggccgcctcaggtcggcgccccccgaggccgccgcctgcctggacgacggctgcagccacgacgcgtgccgcccggcgatcgacttcgtcgtcgagtccacgtacgccgcctccggcttccagatctccgagctcgtctccctcttccagcgccgattatctgattttgtgaacaaagctttggctgaggacatactgccaattcttgtggttgcctccacctgccatcttccagagctgctaaatcaatgtatccagagggttgccaactcgaacctggacaatcgttacctcgagaagcggcttccggatgatctgtacgccaagctgaaggagtttcgcgtgcctgatgaaccacacagtggcattcttgaccctgagcatgagaagagggtcagaaacatccacaaggccttggattccgatgatgtcgatcttgttggcatgcttctgaaggagtccccggtcaccttggatgatgcattcgccatacactacgctgcggcctactgtgagccaaaagtgttagcagaattgctgaaactggaatctgcaaatgtgaacctgaagaactcaagtggatacacgccgctccacatggcttgcatgaggcgagaaccggatatcattgtttcgcttatagaaaagggggcctctgttctggaaaggacacaggatggacgtgatgctcttaccatctgcaagagattaacaagggagaaagaccgcaacgagaaatcagaaaaatgcaaggagagaagcaaggcttacttgtgcattggcgtcttacagcaagaaataaagaggagaccacaaattttggaggaccagatgtctgcagaggagtcaattgctacacctctgctggttgataattttcacatgaggctactaaacttggagaatagagttgcctttgcaagaatatttttcccttcggaagccaaacttgtgatgcgcatagcacaagctgactcaactcaagagtttgctggtctcacatctgctaatttcagtaaacttaaggaggttgacctaaatgagacccccacaatgcaaaacaggaggttgcgagaacgccttgatgctttgacaaaaacagttgaactcggacgacgatacttcccacattgttcagaagttctcgacaagttcctgaatgaagaatccaccgatttgatcttgcttgaaagtggcacagcagaggaccagcaaaccaagaggatgcgcttttctgaactcagagaggatgtacggaaggcctttaccaaagataaggcagccggcgctgcaatatcttcctcaacatctgcgtcttcatcaccaaggtatgagacaaagttaagacctggcaacaagaaagggaagctatcacggtaatatcagcagttaagtctaatctgcagtgtagcttctgaaacatcatcatcttcaccaccaatgcttgatatacttgatataaaggggtaaacagggccttagaaagtggaagttaattatcattggtaatatcagtagttaagtccaatctgttcagcatgctcaacttcaggaaaggtggagaaggaaagtagggaggttgctttgacaagtaggggtgcaatggaattccaactatttatccaagaaaagcagcgagcatatctactaccagtacgactgtagtgtgattacttgtagtggctgtgatctgacatgacgtacggcattggcttttattatgctaagaagttggcaatggtcagtttcactttcacaatgattgtagccctcttgtatgttttaaccaatcaggccgtgtttacttc

SEQ ID NO: 15431 - DNA, 2940 bp, Oryza sativa
  ref <308>: DATABASE ACCESSION NUMBER: AK065953
  ref <309>: DATABASE ENTRY DATE: 2001-12-06
ggtatacacatattcattgcctcattggtactttggttagctatgggctccctacccgccgccgacaagccgttgccggcgctccggtaccctccggctcgccgcgacgacgacattgtcgacgactaccatggagttaccgtgccggacccctacagatggatggaggagctggagtcggaggaggtgaaggggttcgtggacgcgcaggcggccgtggccgaggcggtgctctccacctgcgacgaccaccgcgtccgcctgcgcgggcagctcaccgcgctcttcgaccacccgcgctaccgcgccccgttcaagcgcgccggcagctacttctacctccacaaccccggcctccagcctcacagcgccctctacgtccagcacgggctggggggcggggaggaacctgacgtgttgctggacccaaacacgttcagcgacgacgccaccgtgtcgctcgccatgttcggcgtcagccacgacggcgagcacctggcgtacggcaccagcgcgagcggcagcgactgggtcaccatccgggtgatgcgcgtgcgcgacaggcggcacctgcacgacgagatatgctgggtgaaattctcggccatcgcgtggactcgcgacgggaaggggttcttctactctcgttttccagctccaaagaatgatggggcgccattgggtgctgggatcaagactagtgttaatctcaatcatgaagtctattaccattttcttggaaccgatcagtcagaggacctgttgtgctgggaggaccctgaccatcccaagtacatttacacccctgaagtttcagaagatggcaagtatgtgattctgtcagtcgcagaaacttcagaaccggtaaacaagttgtactactgtgacctctcggctctccctgacggcctggaaggcatgaagggaaaccatggcaatgccatgcttccttttgttaagcttgtggatgaatttgaagcatactacgcactcatcgccaatgacgacactcaattcacatttctcactaacaagaatgctccaaagtacaagctgtcgaggattgatgtcaacgagccacactcatggatggatattctccctgaagacgagaaggctgtcctagagtcggcttgtgcagtccatggtgataagcttctggtaaactacctgtcggatgtcaagtatgtcttgcagatgaggagcttggttaccggggagttgctccatgacatacccattgacattggcagcgtcaatgggatctctggcagacgtgacaattcagaggtgttcatcgagtttgctagcttccttactcccggaatcatctataggtgtgatgtcagcaaggagactcccgagatgaacatatacagagaaatctcggttggtggttttgatcgcacagattttgaagcaaagcaggtgttctaccctagcaaggatggaaccaagatcccaatgttcatcgtgtcgaagaaaagcatcgttcttgatggatctcacccgactctgctgtacggctacggtggcttcggcatgaacatgacgccccatttcagcgtcacccgcatcgtcctcatgcggaatctcgggttcgtgtcgtgcatcgccaacatccgaggcggcggggagtacggcgaggactggcacaaggccgggtcgctcgcgaacaagcagaactgcttcgacgatttcatcgcggctggtgagttcctcgtctctgcaggctacacgaacccgagcaggctgtgcgtcgagggtgcgagcaacgggggccttcttgtagctgcctgcatcaaccagcgtccggacctttttggttgtgctctggctcacgtgggtgtcatggacatgcttcgattccacaagttcaccataggccgtgcatggacctgtgatttcggctgctcggagaagaagaggaattccactggctcatcaagtactctcccctccacaacgtcaggcggccatgggagaaaggtcaccggaggcagcagtacccttccaccatgctgctgacggcggaccacgacgaccgcgtcgtgccgtcgcacacgctcaaattcctcgcgacgatgcagcacgtactgtgcacgagcgtgaaggagagcccacagacgaacccgatcgtcgcgcggatcgaccgcaagagcgggcacggatgcggccgctccacgcagaaaatcatcgacgaagctgcggacaggtatgcgttcgcggcaaagacgatggggatctcttggatcgactgaacaagcctccgagcagttggtgccttggtgggtgctaatgggtttaacttcttatagcatataaccctataaaatttgagagttggatctagaatgagatgaacacaacttctgtatatttttggcttaaaaatatttatgggctagatatggttgtgaaaaaaatccatgggtctcaccaatatttagagattggttagttggctatggtcattagataggtgtctaaaaaaaccgtgatgtgagaaggataaaatttattccctcttacactcgccataagaaggtgagactcaaacctgggtgaatgtattcacaaatatgtgcgctcaccacggtttttttttttagaattacacagtacaacacaggtagtcataacgcacgcacgcaaactttacccctacgagcatcttcgaagattgggccgacaaatccatcttggagattgacgaagtcaccacagaatttgtaatgtaattggttgggtttttatagtgattggcatggtaactttgcatcttctatcttcttatgtagttcgttgaaaaaaaatagtgattggcatggttgatactcgatatgtacatatattacggatttcatcacctattcctagatggaaaacagttgtgaaactatgaatgtataaaaggagcttgatcatgattttctaccc

SEQ ID NO: 15432 - DNA, 3935 bp, Oryza sativa
  ref <308>: DATABASE ACCESSION NUMBER: AK065954
  ref <309>: DATABASE ENTRY DATE: 2001-12-06
gtcgcactatcgcgaataggggcttcgttgtaattggatataggcccctctcccgcgccgcctccgcctccccctcgccccgtccccgtcgccgagcgccgccgccgccccctcaaaccctagccgccgccacccgttcgctctccctctgtcgcgccgccgcctccgcctccccctcgcgccgtcctcgtcgccgagtgccgccaccaccccctcgcgcctttgccacctcctccgctgccgccatcgccggtcactcttccacctgcacgcccgccggtccccaccccgacgacatcgacctccacgcccaccggccgcccaaccccgacgaactcgtctcctgcgtccctcaagcccgcaccggcggcgctcgcctcggtggcacagggggaggaggacgacgaagagaagacggaggtggatgacggcggtggcggcggcggctgcgcgcggacgccggatttggggtgcccctactactacgctccaccgaagacggtgacgacgacgccgccgccgcctcctcctgcggcgtcggcggttggagggtgggatttctttaacccgttttacggggcgcccctctgccgccatcgccgccgccgtgtccacctccgccgtcgtctcggagcgccgttgccgtcggcgaggcgagcagccatctccgccgctgcctccccctccccctcgtgcgccgctgccgtctcatcgccgtcttcgagcgcctccgcctcagggccggcccagcagtgcggccgcactaggccctcaaactcacaggtcccccacctagctccgtaagaatcgtaaagagcgatgccagagccgcttattccaaaacgcgatacgtctgagattgccgccgtgatgagtatgcgatgcgaggcatgtagcgattccatctgttttcgtttcttctaatggaaattgggagatgacttctttcctttcaaaaagaagagtagcgatcccatttatgccattgactgtcgactgtcgggctcgattctagcgccagccaccgtccccggccagccgctccacgagctgccctgaatcgggactgctagagtgcagctgtgcaagaaacgggctcactaccaatctgctcatctgcatatgacatagggggtaagcagcagcaatacagtgttgtcatcgttgccaattgcttctgttgttagtaactgacatctttggcttcatcagctctctatttcttgttcagaggttgagcttgcacgaagtggtgttcggcgtgtgttgtcgactaacttaccgtgcccatccatggtctaattaatcaggaatatttcatagctttgtaatttactgccatgttatggactcactaatatattgtttttttaattaccagccgtcctgatatcatgttattgagaaagtttgtatcgggtaaaaggaaatgataaatgagtttatagaataaagtaaggggccaatgtatgaaaaactgttggatgagattgatattgatatcatcaacaatagtttcacatatagaaatatttgaagaaatttttagataattcatgtaaatactaatttgtattcaggttgttttttgccagatgtggtctccatgcggtcggggtgaggtcttgaccaggctgacaggtggagaagcttggcgtgccttgatgagatcttcctcatgtccatcaccctaggccgcaagcggcgccattggcttctttgccaacacagggtctgctccgccaacgttgttgtcaattgtgtatttgagcatgttgattttgtgtgtgatgtgtaatctgcaagactgcaacagttgatcctatgttgatgacagtaatactatgggagggagggagaagctacgagcattggcccattgtcatggatcatcccagcagactgtgtgccaccaagtagtagatgattggctgctacatccagagacgcttgccaaggtgccacaacgaggaataggccatgaagaagacataattttccccattttgtttgttggctctgtactctcaagaaactagcttccagaggttgtattatcgcgataggtgcatggaggcctgaggaagttgctcactactaatgtcagaatccacatgaatcatctatgcaggtcctgtactgcttcgaactgcaaggaactggcagtacaacctgatcttaatggttttcttgtcagtggagcttcattgacggtaaagaggaatacaaacatattagaataattgtgtagacacaattacctgcctgattcactgaataccgtcttctttcttggttgtgtaccctgaattcatttacattatcaactctagcacggtgatgttttgcctaagatcttcacccttctcacctcggcattgaaaaatgcctgaagaggaacatacctttttccgtttgactttaaagtatgctatgcaactattaatgcttttatttattgtataaaggaaacaccagtgtattggcttgccatatttagtcagtaaactcttgagatgagttatttagcaacattaggaatcatcaatcaatattggcatgaaagcaaccatcatgataatcatgttagttcagttttcatcttgaaatacctatgctcttcggtgtgagcaaattttatttcagttctgcttgggataatcaattatttacagctagctaattatactattgaaacatcaatatcctatatactttgtcacatgttttggttcttatatatgcagcatagctgatatgaatctggcatttttttattgtgtgcaacgatgcaaagtatggcctcataagatccttcgatacatcgcgagcaacgatgcagcgtggcttagttgttttgtgtcttttggcttcaaaccatctttttgaagagaaaaagggtctcaaccttggatctgcatatgaatttagctgatatgattttttggggcaagttttgttttctgtgttgtttcatcattgatgcagcagtaccattcatttgatatattgcccttaatggttccgatgttgaccacttataaaaggtatcatgcatctatctatctatacttctaaagctggctggtcatccagccagctgattggaccacgtggcacagctatatttgcagataaatagatggattagcactgtaaaaaaaaagtaaaaaaaaatagcgttcaattcagtccctctggatcaatctaggtggctaccgaaacaacagccgctcctccgtccctccgtagctgctgggctgcacagcccagtgatgcacgattaggcttggtagtttggacgaatggttcccctccgtccctcacagcctcacgtgtaggatttgtggcacaagtttgtgctgctcctctgctaatcgcatgagtaggagctagcataaatagaagaaaataaaaaaaaagagaaaattagaaagtgagaaagaaataaataaagaagtaaaaaatactactctccgtgtttttatagataacgctattcacttttaaatatcacatttgatcatttatctatctactactacttaaaaaaataaataagaggtgcttccatcgtccgtcaaaaaaaccgggtgaaagaaaaccgggcagaaaaaaccaagtttgtccgataaaaaaaccggacgaaaaaaaaaaaaagtccgatccaaaaaaaagtgaaaaaaaaaccgggcgaaaaaaacacccgtccctggcaaaaaaacacccgatcccttaaaaagggaaaaaaaagtccgagagacaaaccgtttaatgaataaaaaaagcgaaaaaaaaagagtccgattccctggagaaaaaaaatctgatttccctggaagagatccgatctgtattggattggagaaaagaaaaaaaacacttctctaggtgcttctgtcgtccgtcaaaaaacgggagaaaaaaaccgagcg

SEQ ID NO: 15433 - DNA, 1469 bp, Oryza sativa
  ref <308>: DATABASE ACCESSION NUMBER: AK065955
  ref <309>: DATABASE ENTRY DATE: 2001-12-06
gtgcgttcccgcgccaccaaaccaaaccaactcttcgtcgtcgcgccgcttccgttcttccggcggccatggaggacgcagcagcagcagcaaggcggatggagaggcttgcctcccacctccgcccgcccgcttctcagatggaggaatcacccctcctgaggggctccaattgccgggcaaaaggtgccgctccgggtttcaaggtcgccatcttgggagcgtctggtgggattggccagcctcttgcattgctcatgaagatgaaccctcttgtttctgtgctccatctgtacgatgttgtcaacactcccggtgtcacagctgacattagccacatgaacactggtgctgtggtgcgtggtttcttgggccagccacagttggaaaatgcccttactggaatggatcttgtgatcattcctgctggtgttcctcgtaagcctgggatgacaagggatgatttgttcaacatcaatgccggaatcgtccggactctttgtgaaggaatcgcaaaatgctgccccaatgcaattgtgaatgtgatcagcaaccctgtcaattctactgttccgattgctgctgaggtttttaagaaagctgggacatatgaccctaagcgccttttgggggtgacgacacttgatgtagtgagagccaatacttttgtggcagaagttcttgggcttgaccccagagatgtaaatgtccctgtcattggtgggcatgcaggagtaacaatattaccactcctttcacaggtgaatcctccctgctcattcacctcagaagaaattagttatcttaccactcgcatacagaatggtgggacagaagtagtcgaggctaaagctggagcggggtctgcaaccctttcaatggcgtatgcagcttctaaatttgcagatgcttgcttgagaggattgcgtggcgacgctgggatagtggagtgctcttttgtagcttctcaggtgacagagctgcctttctttgcatccaaagtgcggttaggtcgctgtggcatcgaggagatcttatcacttggtccattgaatgaattcgaaagagctggactggagaaggctaagaaggagctggccgagagtatccaaaagggggtcgctttcatcaacaagtgaggccatcttggaatgccccaatttagttcaacatggaaatacacaggctgtgtctttgcttcctggggagtgggaagaacacttgtatcatcttgtctcaaatgtaaaagctgcctacacgatgtttatacagctgtagcagatgcaaaaacacaagtctgctaataaaagttgcttctgaataaaaaggaaccctgctctgatctctgccttgttaattatgtttccctggacagtgaacatctcatcaggtgtaatttgatcttgtgatggacttgcaaattatagaggaaaaagaaaagcggaactaaattttacttcctccgtttc

SEQ ID NO: 15434 - DNA, 3352 bp, Oryza sativa
  ref <308>: DATABASE ACCESSION NUMBER: AK065956
  ref <309>: DATABASE ENTRY DATE: 2001-12-06
gtctgcacctctcttgctcctcaccccagccgcccatcgccgcctgcgcccgcgcgcggccacgccgccactgcctgctgctaccgcgtccgcctctccaagccgccgccgccgccagccagcaactcgcgccgatctgctgcttcttgagacggcggccgcgggcggctgctcctccgctctgtttggccggcgcgcggctccgcctcctgtgcagctgtgcttcccctccggtgttctccctcccgcggcgtgtgacggtagcggaggggcgggactgatctcccgcaatggcgggcgcggtcttcttcctcggcgttcgctgggtgcagatgcttgctctagtctaaatgagacctgcaagagctaaaatctggcagtggagtggtgattgttacagatgaggctacttgcgctggcagttgcaagcatcgtgcttgctaatttgcacctgttgggagttcatgggagggatttgcttctcagctgtggttcaaacgcgactgtggatgctggcggccggagatggatcggcgacatggcccccgggctgaattttaccttaagcagccctggaatagctgcgtcgcaggctgggagcagcaatggcaatgaaatcttcggactggtgtaccattccgcgcgtttctttagcacggcatcttggtataacttcagcgtgctgccggggaactactgcctcaggctgcatttcttcccttacacattcgggaatttcagtgggaatgattcattgtttgatgtcactgcaaatgatttcaagctggtctcgaaattcaacgtgtcagaggagattgtttggaggagcactgtgagcaattcagccatcaatgcagttgtcaaggagtattttcttttagttggttctcgtggtctgcaggttgagtttgatccaagccctgggtcatttgcctttgtgaatgcaattgaggtgatgctcactccagataacctgttcaatgacacagtaaacaaagttggcagcgctggaaatgggcagcttcctcttggtttaagcaacagaggcctagagacaatgtaccggttgaatgttggagggcatgcacttaattcttccagcgatcagtatctgcacagaccatggtacactgatgaagcattcatgttttctgcgaatgctgctcagattgtgtccaacacttcaagtgtaagttatctctcaaacaatgactcctcaatttctcccattgatgtatacgagactgcaagaatcatgagcaacaacatggttgtggacaagcggttcaatgtttcatggcgattctatgtccaccccaactttgattacttggtccgccttcatttctgtgagcttttctatgacaagcccaaccagagggtcttcaagatctacatcaacaacaagacagctgctgaggactatgatgtgtatgtcagggcagggggtattaataaggcatatcatgaagactattttgacaacttgccacagcaggtagactcactctggcttcagctaggccctgactccttgaccagtgcttcaggcaccgatccacttctgaatggtttggagatattcaagctcagcaggaatggcaacctcgcttatgttcttggccatattgacatgggtaaccaaaggggtatttccaaggatagaaataggaaaattttatgggaagaagtcggaattggctcagcttcttttgtgacactgacaagtgtggttctatttgcatggtgctatgtaagaaggaaacgaaaagctgatgagaaggaggcccctcccggttggcacccactggtcctccatgaggctatgaaaagcaccacagatgcccgtgcagccggtaaatcacccttgacacgtaattcatcttccattggtcatagaatgggcagaagattcagcatttcagagattagggctgctacaaagaactttgatgaggctttgcttattggtactggtggttttggcaaggtttacaagggtgaggtcgatgagggtactacagtggcaatcaagcgtgcaaatccattatgtggccagggcttgaaagaatttgaaacagaaattgagatgctctccaagcttaggcaccggtaccttgttgcaatgattggctactgtgaagagcagaaggaaatgattctagtctacgaatacatggccaaggggacattgcgaagccatctttatggaagtgacctcccacctctgacatggaagcaacgagttgatgcctgcattggtgcagctcgtgggcttcactacctccacactggagcagaccgaggtataatccatagggatgtgaagactacaaacatcttgttggatgagaattttgttgcaaagatagcagattttggtctgtctaaaactggcccaacactggaccagacccatgttagtacagcagtcaagggaagctttgggtaccttgatcctgagtacttccggaggcagcaactcacacaaaaatctgatgtgtattcttttggagtggtgctctttgaagtcgcttgtggcagaccagttatagaccccactctaccaaaggatcaaatcaacttggcagagtgggcaatgagatggcagcgccagcgttcgctggatgcaatagtggatccacggctggacggtgacttttcatctgaatccttgaagaagtttggtgaaattgcggagaagtgccttgctgatgatgggagaagcaggccatcgatgggtgaggtcttgtggcatctggaatatgtgctgcagctccatgaagcttacaagcgtaataatgtggactgtgaatcatttggaagcagtgaactgggatttgccgatatgtcctttagcctgcctcatatcagagagggagaagaggaacatcactcaaagccatctagtataagagaagatccagacacttgagggtttctgacatctggtaacccactgaaatatcttgattgaattctagcaatgatcttgttgtaaaattgtgtgatattgttcgtgtaggttcttagctttgccggtttcttctgatttttttttgtgtcctgttcaacaagtgtagaataataggatttttgtagattgtcaaaaaaaaaaaagaagagagaaacatggaagcgtcaagtttttccttgacatcctgctgtaccatgctatttgtttaacaactgggtttaggtcgacctgtgtgacctgtataaatcgtactgataatataattatctctttcaacttatagtaccaaatgggatttggtttctgtacgtcgaatgccacattgaggcgtttcgtcatatgaaatgttatgaagcttgtgattatcatatttgt

SEQ ID NO: 15435 - DNA, 800 bp, Oryza sativa
  ref <308>: DATABASE ACCESSION NUMBER: AK065957
  ref <309>: DATABASE ENTRY DATE: 2001-12-06
gggcgtggcgaacactcgaggcgttatccatggccgccgctgcttcctccgctgtactcctcctcccaaactcgcgagctcccgccgcgctgtcgcggaggagggctccggttccgaggaggggcttcgttgttgggttcgaggggcggagtaggaggggagccgcggggaccgtgcgagcttgcttcaatcctcccggggacgaacgcatcctccgggaggccttgaaggagccagttgcattcatgggtggtgtgtttgctggcctattgaggcttgacctgaatgaggatcctctcaaggaatggatcactaggacggtagaggcttctggagttgctgaggatagccgaaccgatgaatcaagtgagggatctcaaaatgatgcgccccaacaaattgagattgagtgaggggctaagcaggttgttgggaggtgctttccaactatcttaatcagtaatgatggatagcaagactggtctgcagaatatcctttgcctgtaagtttcatgattccatcttgcaggttgttatggaccttaaggtatgaaatacttcatccgtttcacaatataagactttgtagcattggctacattcatatagatgctaatgaatctaggcatacatatgtgtctagattcattaacatctatatgaatatggctaatgcaaagtaatatgaaacggagggagtagctgagtagctggcaatccagaaccgtaagctgttattgctgatttgaatccaaagccactgacgtgacacaagtaatgaatcaatgcagctgctaacc

SEQ ID NO: 15436 - DNA, 3330 bp, Oryza sativa
  ref <308>: DATABASE ACCESSION NUMBER: AK065958
  ref <309>: DATABASE ENTRY DATE: 2001-12-06
gttcggagctcctctcctcgcctccaatggcgctgctcttcccaccaccaccccacgcgctctcccccaaaccccccttcccctccactctccgctccacgaggtcactgcgtctccgccgcgccaccgccgccgccgccgccgccggggccggagtctcctcctcttccccctcgacctcctcgccggagaaggccccggcgctggacgtcgccagcgggaagaggggtggtaagaagaggaggtccctgaagccgagcttcgagaagcaggccatccgccgctggtccgcgagggcgccgtcccagcgcgcctccttcccctggcagcagcagcagcagcagcagcagccgggcggaggtgagggtgaggccgcgggcgatcaggaatccggttggagtgggagctccacgctgcagtccatcgtggattacttcgacttcgactacgattcctcggatggtgatggcgatggcgatggcgatggcgtcgtggtcggcggcgaagcggccgaggcccaggaggatgggccgcgtcccgagccgagcttccttctcgggagccggccggtgtcagcgccgtggatgcacggggaagaagagcccatgacgaaccaattggtttctgacgaggaagggttggatggggatggtgcttccgaggatgagatgggtttagttgatggagacggagacgaagacgaagatttggggagtgaggaggagacgctaagtgagagctcagacggggaattctccgaggattatgcagcaccggccgcaaattcttcttctatgatggattcggtactggaccatgtttcttcaggtggtgggttttatagaggtactaggcggagtagcgtaaattcaattgttaacacaatgaggaattcgatggaggaaagtagtagaaatgctgcgattgagtgtcccgagaccgaggattttgtccagaagctcggtcctgtgctcctcccatgggagagggagggggatgtcgataggccgagaaagcgcagcaacacggagctggctgagaggactatcccagagcacgagctgcggaggcttagagatgtggcattgaggatgaaggagaggatgagggttggtccaggaggggtcactcagctcattgtggagagcattcatcagaaatggagggtggaagaggtggtcaagctgagatttgaaggacctccaagcctgaacatgaagagaactcatgatatactagaggagaggactggaggagttgtaatatggaggtcagggagatcagttgttttatataggggaatgaactacaaccttcgatgtgtgcagtcgtatacacaaactacagaggttaattttgataaaagagttagtagtaatagtgttgaacctatccatgttgaacataaatttcagaagtcaggtgcagatggactgaatcgctcagcatatattgtcaattcctctgaaaaacctacagagacatttgatatcgatagcttcttggatcagttgggaccgcggtataaagattggtctggtcgtggccctattcctgtggatgctgacttgcttcctggtgttgttcctggttacaagacaccatttagactacttccttacatggttaaaagtacccttcggaataaggaaatgacggctctgcgtagacttgcaaggcaaactgctcctcattttgctctagggagaaacagggaacaccaaggattagctactgctatcgttaaattgtgggagaaaagttctattgcaaagattgccatcaagaggggggttccaaatacatgcaatgacagaatggcagaagaaatcaggaaattaacaggaggagtgcttctatcgaggaacaaggagtacattgtcttctacaggggcaatgatttcataacacctaaagtaaggcaagtcttggtggagaagcaagagcaagcaatcacttggcaggatgaggaagaattggctcggcttaaagcatcagcctcgatcagtgtcagacccaaagtatttaaaaatcccccagttgctggcactctcgcggaaactagagaggcaaaatctcgatggggagattccattaatgctgagctcaggaaaaaggagaagaatcacatgattcttacaaaacatacctctcttttgaggaacttgaagagaaaattgattttggcaaaaacaaaggtcataaaagcagaaaaggccttggctaaagttcaagaatttctctctccagcagagcttccaactgatttggaaactgttacagatgaggaacgcttcttacttcgcagaattggcctgaaaatgaaggcctttctaatgcttggaagacgagaagtttttgatggaacagtacagaacatgcacttgcattggaagcatcgagaattagtcaaggttcttgtaaaggggaagagctttccacaagtaaaacatattgcaatatctctggaagctgaaagtggaggagtgctcatttcagttgataagacgacaaaaggatatgcaatcattttgtaccggggtaagaactacaagacgccccaaattttgaagctcgaaacctattgtcaaggagaaaagcattggcacggtctatagagctccaaaggcgggagggattaaatcatcatatctcaaatctgcgagacaagatctggaagctgaagtctcaacttgtacgaatgcaagttgctggggaaaaaccagatgcggagttacttcaaacagttgaggctgatttgtctaaagatgacgataaaatagaggatgaaggagaggaggcctacctgcaaacttacatcagtgaggatgaagaggaacctgaggatgatcagaatgaatatctctgaatcttaactggcgaaacttcggtgagtccgggagaaaagtcagtagtaaagcattgcatgttcatattgtgaaatttctgcagtgttactcaagaggcaggcagttttaagattcatctatggattattgccaacacaaattgacctgcaacagcattagtggcctttgtccattgcgagatcaacgacaaaggatgtagcttgagtgtgtgtggattgtggtgcatggtctgcagttgctgccattcctttttttttttttttttaccttggctacttccatagctccatccatgcctgatgccctgatggccttctacatcctgcagatttgaaaaggtttctgtcaacacacgatcaagttgtctgctgtgcagaagtttgcaaagtggcagtgtataaatcaggctcgtgtgagttcgtttcattttgcagaagctgtaattatatcatgccatttt

SEQ ID NO: 15437 - DNA, 1463 bp, Oryza sativa
  ref <308>: DATABASE ACCESSION NUMBER: AK065959
  ref <309>: DATABASE ENTRY DATE: 2001-12-06
gccgagtcgccgctctctccctcccgatcgatccatcgcggggtgatgccctcgcgctcgcggcggtgacctcgccgccggcggccgcgccatgacatcctccccctcctggttctccggcatcgcccgcgcctcctccgccatgccccccggcggcgtcgcctccgcggccgctcccctctccgatggcgcgggtgggaggggcggtggaggtggaggtggaggtggaggtggaggagtagtcgccgccgtggttgctgcggggcctggcgctggtgctggcgttggcgcgggcgggaagaggaggcaggtgcagggggcgctgttcaagtacggccccaagtccgcccaggtcgcatttaaaactggtgattttaaccaccaggtgatcttcatcggtggtttgacggatgggtttttagcaaccgactacttggagcctttgtcacttgcactagaggtcgagaaatggtcactggtacagccgttactttcttcatcatacactgggtatggaatttccagcttagagcaggatgcattggaactagatcaactcatcagttacttgataaacaaagaaaattctgatggagtaatattgcttggtcacagtactggttgccaggatattgtgcattacatgcggacaaattttgcatgttccaaggcagtttctggggtcattttgcaggccccagtaagtgacagggagtatagagcaacacttccagaaactgcagaaatgatagatttggcagcaaaaatgttaagtgagggccgtggaatggatttgatgcccagggaagcaaatccagatgctccgattactgcctacaggtatcactccctttgtgcatatatgggtgatgatgacatgttcagctcagatcttagtgaagatcagttgaggcagagacttggtcatatgtcaacaacacagtgccaggttattttctcaatgggggatgaatatgtcccggaatacgttgataaggaggcacttgtggacagattatgtcgcgcattgggcaacgcggagaaagttgaaatagaatggggaaaccatgctctctccaatagggtgcaagaagcagttcgggccattgtagattttgttaagagagaggggcccaaaggttgggacgatccatggagctagatacaacagccatatgtaacatgtctatcccattttcctcccctagcaaaacgtcttgtttttacatgtttcttgatcatttttttatagtaataattcctatttgttttgctttgttgccttagtaagcattgtgagacacttttgtttattttgtggacatttatgtacaatacttgaatttgtaaattgtagtgaaactatctcaaatctctctttgtcaaattaacattggttaaacggtgtaatcaagactttggttatactcggctgaattgacacttatgaaagaaattcatct

SEQ ID NO: 15438 - DNA, 3042 bp, Oryza sativa
  ref <308>: DATABASE ACCESSION NUMBER: AK065960
  ref <309>: DATABASE ENTRY DATE: 2001-12-06
gataatgtgatttgtgtcctttcctgtttcacgagaagaaaaaaatcgtcgggactcgggagagccgcgagagatggcgtggcgtcgaggccgcgagagatggcgtggcgtcgagaccgcgagaggcaggagcagccagatgcgcggcgggctcgatgcgcgacggcggcgggctactggttacgcgacggcggcggcgggtgtcgttcgggcagagttagtgatctccaaggtagacgacctcatgaactgggcgcggagggggtcgatctggcctactgcgccgtcgagatgatgcacgccggcgcgtcctgctatgacttcgaccgctttcgcgtcatcttccgcccatccccgcgacagtccgactgcatgatcatcgtcgggacgctcaccaacaagatggggcccgcgctcggcaagacaaatgggatagtgcggtgaatcgtcggcggcggcggcctcgacgctcgacgacggcggtggcctcgacgctcgacggcggcggctggatacgcaacagcagcggtgggctcgatgcgtggcggcggcggcaggctcgatgggagacgacggcggcggcctcgacgcgcgacggcggcaacctcgatgcgcgacggcggcagcgatttctggcctggaagagaggatgcggcgatttctgacctagaagagagatcttatttttgttagccccatcatgccccaactaaatcaacggttagattagattggtacctcatagtacctcatcaaggatgggaaaaatgctcataatttattgttcaagaaacatagatagtcagctattgaaggacataacaaccgctgtaggggatcattttctgaatgttttttgctagttaaaagaaatagaagctaaaacttgacccttatcaaaagagacaaaagaagaaaaccattttctgaatgtttattccttttctaacctgtcgctgttgtagcattggctagcatgcgaactggtcaactaaaatgcatgtgcttttgaaacttgacgagaattccatggcgctgaaccaaacctgtagaatcgtctccgctatgtagtcaaccttgtacggttatattattggaactgcaaagaaaaaacagaaattaggatccaaacagttcacactgaaaagtatggtttgaaataaattctagatatacatgtaactttgtatatgtaaccacagggcaatacctttcgctttatggagacttggagttagtagagtacgtggctgccttaattcagatcatatcccctctttgtatatgtaaccagtgcaataccctctataaacattcagattgtgttttctcaggtaccagctcttcaccacttgagtgatttacaaaatttcagatcatatctttgctgatcatatgagaagtagacatggagacatttttgtccgtgattctgagtgatcttgccagtagatccatatctttgctgatcaacaagtgctcaaagccaacattaccatccgtggaggagagactgcaacgactgctgctccgggttcgtatcattgtggaggaggcagagggacggcttatcacaaaccaagccatgctgcggcaactgaacatgctaaggaaggagatgtacagagggtattacaccctcggcaacttcatatgccatggccatgaagaagacaatgccaaagatcatgaggtgagtaactattttaaaccatccaagttaaatcctgccaagcgcatccgatacttgtgggatggtggccagaccttgcaagatcagctgcagcaagttcttggcagactacaagtcaccctcgaagatatgcgcgagtttgtcatattcttgaacttttgtcctcgtttgtgccggcagccatatagcatgcacttgcttatagacaagtgtttgttcggtcgccaaatggagatggagcacatcatgaacttcctgctcaaagaggatactcccggtgctggaaatccagtgaggatgatcttgaagatgcaagcatggagactcttagagattctggtgtaatcaagcatcaaaacaatgccactggtggcaaaatgatattaatcatcatcgaactaaccagagacatcgatgagggtgtgtggagaaggttgtactcagtttgcaaatgttgtgttgcaaatggcagtaaaattatagtctcaagccgatctaataagattgcgtgctttggaacgacacaagctcttcgagtaaagttctttactcaagaagcttactggtacttcttcaaactgcgcgcgtttggaagcatggatgcagaggagcacccaaagctggaatcaatagcgatggagatagcaagggaatggaatgggtgcttcatgtcttcaggcatctacaatgaacttctaaaagcaaatttcaacactcggttttggagcacggttctaacaagaatcagagaattcaggaagttgaatatctcactctatgcaaattttgatggtccttgggaggtggttgaatcggcatatgttaggagggtaaacggaatttcctctgaatatattctgattcttcatgattatcagacatgttctgttccaaacatgctccatcgttgtacaaactctgctcagagtgaagttgaagttccccagttgagtttcgaagattttcaatttggaaatgttaggcctcaaggaaaattcaaggttctcggctggagatctcaccttccaccttaccacgactacatgttcagctgtgaggtactgaagtcgcagcatatagttgcaagaaataagcgacctcgggaactttgcggacgcgacttcggattgggtgcctgattttttagctaaaaatcgggcacccgcctcatcctccgtcactctgtcagctagctgctacagaggcatggtgtagctgcagcctgtaaagcctactagaaattaaccaagtcactactagtacatgcatgcgtttagtaaaaaagaaaatatggttagttgagttggtataagtttttttttagtaatatttgaactatccttttctct

SEQ ID NO: 15439 - DNA, 2105 bp, Oryza sativa
  ref <308>: DATABASE ACCESSION NUMBER: AK065961
  ref <309>: DATABASE ENTRY DATE: 2001-12-06
gggagacagggagagaagagagagagagagagagagagagcggaggagagaggcggctcgccggctcgagctcgactgctccccactcgcggccgggagggagggagggggagagaaaggagagaggtgattcgatggaggcgaagggggagaatgacgcgcgggcgccgctcctggcggagcggcggcgcaactcggtcgggtcgatgcgcggggagttcgtgtcgcggctgcccaagaaggtgctcgacgccgtcgaccccgagaggccgtcccacgtcgacttctcccgctccaagggcctccgcgaaggagagaaagaatactatgagaaacaatttgccaccttgagatcctttgaggaagttgattcaatagaagaatccaatgtaatgagtgaagaagatgatattgcggagcaaaagcagagtgagtttgccatgaagatatcaaactatgcaaacatgattcttttggcgttgaagatatatgctacaattaaaagtggatcaattgctatagctgcctcgacattggactcgctgcttgatctcatggctggtggtatcctttggttcacacatctctcgatgaagagcatcaacgtctacaagtatcctattggtaaactgagggtgcagcctgttggaatcatcatctttgctgctgtaatggctacattaggattccaagtatttgttcaagctgtggaaaagctgatagtgaacgagactccagataaattgactccagtgcagctcacatggctatattctatcatgatttttgcaacagtagttaagctagccctctggctctactgcagaacatctggtaacaagatagtccgtgcctatgctaaggatcattattttgacgtcgtcacgaatgttgtgggtttggctgctgctgtccttggtgatatgttctactggtggattgacccagttggtgcaattgcccttgcagtgtacacaattacaaactggtctggaacggtgtgggaaaatgcagtgtcactagtgggtgaatcagctccgccagaaatgctgcagaagttgacatatttggccatcagacatcatcctcaaatcaagcgtgtcgatacagttcgagcatacacctttggggttctttactttgttgaggttgacattgagctgccagaggaattgccccttaaggaggcacatgctattggagaatcacttcaaataaagatcgaggagctcccagaagtcgagcgggcatttgttcaccttgatttcgagtgtgaccacaagccagagcacaacattctcagcaagttgcctagcagccaaccatgaccaccaacttgaattccaccgtgaaacgaattagctggcttgttcgcttgccatgcaggatgtgctacagtacgtgccgcattatgctatatgaaacggctgaagacaaatgagattgtctggccatcatttctgaaagtaggcctaagagaatactgtattagttaagtacctatattagagattatgtggactgaacttgtgcatccctctgtttaagagttttgttgtgaggaaagttcagcacaaaggggaaatcacgttctggatgatctcaagcaatttttttgttctgaaattcaggtcagttgtaaatattgtctggtttgcttaacaatggtgtgtaagtgccctacattgctgggaaggtcaaggtgtatgtgctaaaagaaactcattttaacaaatgtggttttgcctttttcagcccaacatcaggcccagcactccttccaaattgagaaaggaaaacagaactggcccagtaggtgtaaactggatgcaaagcaatgcacccggcaaacatccagcaaacaacaagcagtaaaaatttacaacgtaaagcctcttcgatagaccggatattttcatttattgaatttgaaattcttttgaaatttcttcacagtgcaagtacttctattaggattgtaggatgattcttctgcagttgtaccctttgtcactagtggttgtaccattgcagtccgtagtacggccgtgggactgtctgtaagccacgcattattggctgaaatgctgaattttagtagatgg

SEQ ID NO: 15440 - DNA, 575 bp, Oryza sativa
  ref <308>: DATABASE ACCESSION NUMBER: AK065962
  ref <309>: DATABASE ENTRY DATE: 2001-12-06
gtggaatcgcctcctcctcctcctcgaccccggaatccaggaagatggcgctcgccaaggccaaggagaccgtcgcctccgctcccgtcgtcgtctacagcaagtcttactgtcctttttgcgtccgtgtgaagaagttgttcgagcagcttggagcaactttcaaggccattgagttggatggggagagtgatggatctgagctgcagtcggcacttgctgaatggactggacaaaggactgttccaaatgtcttcatcaatgggaagcatattggtggctgtgatgatactttggcattgaacaatgaagggaagctggtgcctctgctgaccgaggctggagcaattgccagttctgcaaagacgacaatcaccgcatagttcttcgtgggacactgggactagccttcgttgacctctttatactgcatccattctattagataataaaggtggatgtttgtttggcaagaccattacttgttgccgtctagtatcgtgtgatagctatcctgtgcccgtgtgaaactccttggacatcaataatatcgtctttgtgatagcagttcgctg

SEQ ID NO: 15441 - DNA, 1533 bp, Oryza sativa
  ref <308>: DATABASE ACCESSION NUMBER: AK065963
  ref <309>: DATABASE ENTRY DATE: 2001-12-06
ctcctcccctcgctttgtgccatcgtcgcctcaccctcctcctattgtcgttgcgccggcgccgccctccttgccagtggatccagccatccggaggaaggaagggtcacgaggccatcaagccatcgctgccctcttctcacctctcatctccagaccactaccgccttcctcttcctctccctatcctcggtgagctacagatccggtttggggtcattggaatcgatggtctcggcctccccactggtggatccgatcactggaatcatcggtgagctacaggtccggtttgggggtcagcggaattgatggtctcggcatccccactggttgatccgatcactggagtcacttgcggccattggtttcctttctggtgaatccttttgataccctttcagccacaatcgttttgtgcatacatttagcacaaaatccacaaggtaaggcaatggttttgactcgccattgagcatttgcattgcgtttgctggtgtttttacataatcccccatcttgccttaggttctgtggagaaactgatgggctaggatgaggtgtaggtcacagattacagagaagacgacttccatgctgcgcatctaccgtcatgctgagcaagctatcttgctttctcctctcttaagcagggctgcgagatttagattatgttgagtttttcttgagttcagattatttcatatgaatttagctatcagaagttccatggttattggttttgttgctgcattgtatgacaccccttgatagaatgacatcaggaagaaaaaagaaaaccatgctaggtattactacaaggctataagtataaagattatatgttatatgagagcattctacaaacaggatatgcaatggaaggatattctttttattagcagtgcttaggtaccagccaatagcccagtactgacatcaaaagccctagctctgatactgggagcataacacttcggtagacggtgtgcaaatcctttattgatgtctaatttgttgcaacaaaattattactacttcaccggatttatgtggtttgttgtgttggtccagttcaacaaagaaagttggtaattaagatcatggacgaaatgaagcttatggttgttttttcattgcttggtggtgtttcagacaactcaacctgctgccacatatccataaacaaaacattccgacagatacaaccaaaagagattatggaggataagatatctttatttgtttttggcaaaagatgcagttgagctcaactacattatctcctctgcaataattgtttttagtaccatcctgtattccaagcatccgtccaatgtcatagatgttagtattgtactattggtaagtgagaattacccaagccttattttgttggcctacgaattacttatatatatgacattgttgaagctgcaaatttgattagagctctactaggtttcaagttagtccataggtgtaatgaaataaggttttgccatcctatacaacatgctttaagatattctg

SEQ ID NO: 15442 - DNA, 1323 bp, Oryza sativa
  ref <308>: DATABASE ACCESSION NUMBER: AK065964
  ref <309>: DATABASE ENTRY DATE: 2001-12-06
caccgatcgcaccacgtctccgtctgtttgcggctcaaggtttcagcgatgggcgcctccacctcgcctcgtctcgccttgctagtagtggtcgcggcggcggcgttcgtcttcgtctcgccggcgatggctttcccgatgggattgccggcgacggcgaacccgttcccgaacccgtggtccgctttccagaacctctctgggtgccacgccggcgaggagagggaggggctagggaggctcaaggattacctcagccacttcggctacctcccgccgccgccgtcgtcgtcgccgtacagcgacgcgttcgacgactccctggaggccgccatcgccgcgtaccagcgcaacttcggcctcaacgcgacgggggagctggacacggacaccgtggaccagatggtcgccccgcgctgcggcgtcgccgacgtcatcaacgggacatccaccatggacaggaactcgtcggcggccgccctccgcggccgccacctgtacagctacttccccggcgggccgatgtggccgccgttccgccgcaacctcaggtacgcgatcaccgcgacgtccgcgacgtccatcgacagggcgacgctgagcgccgtgttcgcgcgggccttctcccggtgggccgccgccacgaggctgcagttcacggaggtgtcctcggcgtcgaacgccgacatcacgatcgggttctactccggcgaccacggggacggcgaggcgttcgacgggccactgggcacgctggcgcacgcgttctcgccgacggacgggcggttccacctggacgccgcggaggcgtgggtggccagcggcgacgtgtccacctcgtcgtcgttcggcacggtggtggacctggagtccgtggcggtgcacgagatcgggcacctgctggggctcggccactcgtcggtgccggactccatcatgtacccgacgatccgcacggggacgaggaaggtggacctggagtccgacgacgtcctggggatacagagcctgtacgggaccaacccaaacttcaagggcgtcacgccgacgtcgccgtcgacgagcagccgggagatggacggcagcgcggccgccgccggcatccggccgtggagtgggttcgttggattagttgtgccggcagttgtcctgctcttagctccgtagactttctagtccatttttcgtgcctcggtgttgccacgtccatctctggttctatttcttgtacgatagattattgttgacttttggacagattcttgtgtacataacattactgaagaattatagatatcaatatcatacatatttttttgatag

SEQ ID NO: 15443 - DNA, 3040 bp, Oryza sativa
  ref <308>: DATABASE ACCESSION NUMBER: AK065965
  ref <309>: DATABASE ENTRY DATE: 2001-12-06
gacgcccacgacctcagttggcgcgtgaggcgcggcaggccaggcgacgtcaagtagaccgatcgacgcgcaggccgcgcgcgaagatcgtatataccttcgttcgcccccgtactggaattctacagctatctggacatgctttctcgacttaaaaaacagtacaatcccccgaactctctaattttcatgtccaagccctacccagagaaagtatgcaattgcatcacctatcttgtagcattatgttttccgggaatctatagcaaatcgatgtgaaggaaagctcaaaacttttaattttcacaaccatcattaccaatgatgcacccaagcctactagctactacccaatgggtcacactgtcaaccctcttatcaatcgccgtagcggctgataactacttctcatcctctagtccaatatttctaaattgtggagcctctgccatgcaacttgatagcaataatcggagttgggatggggacactagctccacgtttgcaccatcagtgaaagggcttgcagctagagcttcatatcaagacccttccctcccatctcttgtcccttacatgacatcccgcatcttcatttcaaattacacatattccttcccagttatcccaggccgcatgtttgtgcgacttcacttctatccagtggcatatggcaactatgcttctagagatgcctactttggtgtcacaaccaacaatttgacccttttagacaacttcaatgcttcgcaaacagctctagctgcaaagtatgcctacatccttcgagaattctcgctgaatgtcacttcaggtagcctggacctcacctttttcccatccacgcagaatggctcttacgcatttgtgaatgggattgagattgtccccacgcccgacatctttacaacactatcacctataccacctaccaatggcaaccccgatccatctgatatagattctatgatcagtttccaaacgatgtaccgcctcaatgttgggggcatgacaatcagtccacaaggtgattctatgttctatcgttcatgggagaatgattccccatatatatatggttctgcctttggggtcaccttcagcaaagatagtaatgtcaccatcacatatccaagtactatgccaaactatatcgcacctgctgatgtatatggaacagctaggtcaatggggccaattgcacagatcaaccttcactacagtcttacatggatcttaccagttgatgcagggttctattacctcctaaggttccatttttgtgagatcgagtatcctataaccaaggtgaaccagaggtcgttcttcatttacatcaacaaccagacggtacaggaacaaatggatgtaattgtttggagtggaggaattggcataacaacatataccgactatgttatcgtcacagttggttctggtcagatggacttgtgggttgcacttcaccctgatctttcaagtggaccagagtattacgatgcaatactaaatggtcttgaggtcttcaagctacaggacattggaaaaaaaagtcttgctggccttaaccctccacttccaccacaaccaaagtctgatgtgaaccctaaaggggtatctggtggagggaaatcaaagggtgctgtcccagcatccatacgtggagccatgggtagcactgccactatgcttatcgcttgtttttctgtgtgcatcatctgcagactaaagaaggtagcgaagcattctttcatgactgataaaaagtgcatgacttatcgaactgaattctaccattcaccatcaaatctttgtcggaatttcacctttgacgaaatacaagttgcaacgagaaactttgatgaaagccttcttcttggtagaggtggatttggggatgtataccgtggagaaatagacaataatggcgaaaatgtagcgatcaagcggagcaacccattatctgtgcagggtgttcatgagttccagaccgagattgagttgttgtccaagcttagatattgtcatctcgtgtctctaatcggatactgcaaggaaaagaatgagatgatattggtgtatgaatacatggcccaggggacacttcgggagcacctctacaacagtaataagccatctttaccatggaagcaacgcctcaagatctgcattggtgcagcccgagggctgcattacctgcatatgggtgcaaatcaaaccattatccatcgtgacgtgaagactgccaatattctattggatgacaagtgggtggcaaaggtttcagactttgggttgtccaaggccaacccagacattgacagcacccatgtcagcacagttgtgaagggaactttcggatatcttgatcctgagtattatcggaggaagcaacttacccaaaaatcagatgtctactcttttggggttgtgttgtttgagatcctatgcgcgcgccctgcagtgaacatagagcttcctgaagagcaagcaagcttgcgtgactgggcgctatcttgccagaagaaaggcatgcttggcaaaattattgatccacatctccatggagaaatcagtcctccctgccttaggatgtttgctgattgtgcaaaacaatgtgttgctgatcgcagcatcgacaggccgctgatgagtgatgttctttggagtctggaagctgcactgaagctgcaagagaatgcagagaataacaaaaaattcagtgaagcaacaacatcgtcaaagagaacaccagacttgataactatcatgggtactgacaaaccatcgacctactcaacaatgagcatcaccggacaaaagatcatcttctctgatatgatgcacccacagggccgatgaaggacaacagttgaggatttcaattaatttctgatccagagttcatgtattgatgatcttttgatcgcaattactagaatattgcattattgatcaattgtgtcagtttctgtctaactagaaccaaatgttagtgattctaaattccgaataaaaacccaatgctacaggtttgact

SEQ ID NO: 15444 - DNA, 2797 bp, Oryza sativa
  ref <308>: DATABASE ACCESSION NUMBER: AK065966
  ref <309>: DATABASE ENTRY DATE: 2001-12-06
gacctttcccacgccgctgatactgatagcctcccaccgatccaattccaaccctaaccctccgcctccgcctcgcctcgccggcgccgaagccctcgcccgctcgtcggcgacccctcggcacctcatcctccccgacgcgcgcgcctccgctcgccggggcgagagggattcgtcggccacggtccgcagccgcaatggagcaagatcagggcgttgctgccgcggcggcgtcggagaatccaagcgccggccagggcgctcacgattccggtagcgcgggggctggcgccgcagcctcttccattgcgtctttcgattcggccactgcaaaccctgacgcaaacgtttacagtcagaatccgagctccgtcccgcaagccgatggcgctcagggagcggatgcctccgtgtaccccgccgaccacgcgccgctaaacgggacatcgggccaggtggtagattaccagtctgcgggggctgcagagaacggcgccgccacaaacgagatgggtgagccggctcccgagcagtcctatgcggatgctgtgctttcagcagaagaagcaaggttgtggaatgccgttacagcgaattgcttagacttcaatgcttggactgcgcttattgatgagacagagaaaactgctgagagcaatatcttgaaactaagaaaagtgtatgatgcattccttgcggagttccctctctgctttggatactggaagaaatatgcagatcatgaagcacgtcttgatggtgtcacaaaagttatagaggtttatgaacgtgcagttcttgctgttacttattccgtggacatttggtataactattgtcagtttgcaatttctacatatgaagacccagatatcatcagaagactgttcgaacggggtttggcatatgttggaacagactatcgttccaatattttgtgggatgagtacattaagtacgaagaatcactgcaggcatggagtcatctagccatcatatatacgagaatattggagcatcctataacacagcttgatcggtatttccattgcctaaaggagttggccgcaacacgaagtttatcagaaatacttacctcagaggaagctgccatgtattctgttactgccgagaacactgctcagacgcttgatggagagacacaacctggtgatgtagatatgtctgctcaacccgaaatttcaggttcaacagaggcagataacctggcaaaatacgtttctgttagagaagaaatgtataacaaggctaaagagtatgagtctaagattattggttttgagctagcaattagaagaccatattttcatgtcaagccccttgacaatccagagcttgaaaattggcacaactatcttgatcttattgagaaagaagaagacataaataaggttatcaagctgtatgaaagatgtgttattgcatgtgctagttattcagagttttggatccgttatgtgctatgcatggaagctagaggaagcatagaactagcaaacaatgctctggctcgtgccactcatgtttttgtcaagaagcaggcagagatccatctgttcagtgcaagattcaaggagcttagtggagatgtctctggagcacgtgtagaataccagcatctttattctgatctgtaccctggccttttagaagccattgttaagcattctaatatggagcaccgattgggagataaagaatctgcttgctcaatttatgagaaggccattgccgctgaaaaggaaaaggatcggagccagattttgcctactttgctgattcagtactcacgattcttatctttggccatcggtgacatcgagaaggcaaaggagacgctaactggttttctcgaacaatgcgatttgacaaaatcaattattgaggctatcatgcaactagagtcgatccttccatctgaaaagcgtattgaatttttagattcactggtcgagaagtttcttacagctgaaccaaccgaaggggaagtcacaagtctagctgacaaggaagacatatcttccatatttttagagtttttggatctatttggggatgcacaagcgatcaagaaggctaccaatcggcatcttactcatttttcgcggaagagaagcatgctgtcatcaaagaagcgaagagctgatgatgttatcatgtcagacagagataaattggctaggattggggatggtactcagccagttgtgggaactgatccaaatgctcataatcctccagtttggccagcgacatctgaagcatcggggcaacaatggggagctgcttatgcaccacaggccacttatcctgcgtatggaacttacgactacagccatcaaatgcctcaatctgctcctcaagcagctgcttacggcgcctatcctccaacataccccgctcaggcctacacacaacaaacctatgcacaaccttcagcaatggcggtggcggcaccagcacccgcagtggcaccggcggcagcttaccctcagcaacctgttgcagctcagcaaccatattatggaacaggaacatactactgatctgtagactgattcaagagggtgctacgaaagtctgtttatttgttctcgcgcttgtatcgctgcagcctaaattagcatattttactgatgatactgtaggtcgaagccatggcaggaccctttgtattagtactactagcgttaccagaagactagttaagcacatgatttgtatagcacctcgtgacattttcctgctagcataatggtccattgttttcatctct

SEQ ID NO: 15445 - DNA, 2541 bp, Oryza sativa
  ref <308>: DATABASE ACCESSION NUMBER: AK065967
  ref <309>: DATABASE ENTRY DATE: 2001-12-06
tctttgaaggtattaggatagtcacaaaatttatctacatatatatgaagcaagtaaagaaatattattcaaatgctagtttctctatttcttagcaactgaagtactcaatctatcccagaatagttttttacatggtctctaacatagaactttttccttttaatttattttccataagatattatgaatgctcttttaaatacgaatctaataatatcacatgcatggcacaaaacattgttagttattttacttattagtcaagggaaaatgttgattttcctaaattatattctgaaaaaatgtctcaattgttggtgatatagtacatgcagatacaacaaaatttcataaggacgttagattgttcgcatttcctgggacataaaaaaatcgtatggatcttatttcaaaaaaaattgtatggagaggctatacgctataatattgtgcacatttaacaaaaagattgttggtagataaaaaatctattttccctagaagtgtaagagaatgtctaggtttaccattagggcagtattgttagttaaattaaaatcattctttttgtatcaactcaaaattataacattggataatactatcaactcagagaataatctgttaattgttgatgattttctccaaatctggactgctaaagaaattataaaaccagttaccattgttttatttttgtctggtaactgttttacttttcagattaacactacaacaaggcaatgtggacatatgtttaatatattcagtctcctaaactcaggaagaaattaatatttttttatattgtctgttattagaaatgagcatcattttggaacgttcaggtaaaatgttatccaggattgttttacaaattgtcctcaaggaaaagtttggactattttggtttgaagccctacaaaaaattttgtaatgccaaaatttaggcatgttttggcactaccaatttttttagttaaaattgtctagttaatgttccatttgctaccaatatgatgagaataaatttctagaatgtgaccgaatagagcatggccaacaacaattatttcacttcattccaagctatccctattactattcaagttgccaaaagattggtagagcatatattggcatcaatccaaaacggtcctttgtaaacattattatgtgtatcgtcaatgcaaatgagcaaatctgcagaaattcttagaacatcaggtgttcatactttgtaatattaaatgatagttgtgaactaaggctgtgtttagttcacatcaaaattagaagtttggttgaaattgaaacgatgtgacggaaaagttggaagtttgtgtgtgtaggaaagttttgatgtgatggaaaagttggaagtttgaagaattattttgaaactaaacatgacgcaaataaattgtagcaaaatccttaatcatccaggatattctttggattctatttaatgtaagttggcataatagttcaacaaatcgattctatcaccatggaaaaaaatgtgtgtttggttcacagggcattcttgcattttatggctttccaattcctacaatctccaaagaggcatcagaaaatcatccatcatcaataccaaagggtgtgctgttcgtgctaaaaacattgccggtcagatttcacatgatatatcaccagtattgagtaaaataatgattctcacaaatctaaacatttatatcaggttaatgcaaagtgcatagtagatggtgatggctttactgcttatgtcgacacactggatcctatagaactgcgtcaggattgcaatgcaagctgtcaatcccgtaactctgagaagcaaaaattgtgggacaaaacagcagctgatctacaaataagtctcgaaaatactggacaaaagaaaatgttctttgggggccgtgagatcctcgcaagaaaatacgaaataagactgaggggcattgatgcaccggagataggcatgcagtatggaaaggagtcgcaggatgcactggtgaaactgatcgctaggaagtgtgtcacgcttcatgtttatgggcaggaccaatttaagcgcttcgtctgtgatatccattgtggtggtgtgttcatccaggagcaaatgctggtgaatggtcatgcctggcacttcaagaactatgacaaacggccacaatttgcaaagtgggaaaaaatggcacgggatgcacgtcaagggctttgggcatatgataaccttgagaagccatgggaatggagaaagaacaagaggaaggcatcgcgacatcacaattcagatgtacgttgatggactctggtcacttggatgatgatcttatctgaaatgacataatttggaattggatctatggttactagacagttagccccagttgagtatgtataaaagtatgatgtactttgtatatagtaagattattaatctcgatctgtattatttataaactaatatttgagtgaagaatgtgtagatgaattatgatatgataccgcttttcaattaaagcggtg

SEQ ID NO: 15446 - DNA, 694 bp, Oryza sativa
  ref <308>: DATABASE ACCESSION NUMBER: AK065968
  ref <309>: DATABASE ENTRY DATE: 2001-12-06
ggtgttggtagcagaggcagagtatcagttcagtttacactactactacatcattagctctgctcattgcagccatggagagtgcaaagagatcttgccttgctatctccctcatcctactcctactccttgttccaagtatccatggagcaaggcatgttgctgcagctatcaagggtacaggcgccgacagcgagatggtggtgacggagaggacggccggcggcggcggcggacatggacgcggttacacaagccaccggtcgcacaaccccaacaatcccaacgacggtggctccggcacgccggtggtggacccgcacaatgtcgccaccaggggccaccaccaccgcggcgcggcgacgaggacggccgccggcggcgacccccgcctggcagcctgcatgcttcgtctgggagcgaccttcttcctgctggttcttggctgaattatttattggaggatggatatgtggttatttttcttaagtttttttactgctttttaaatttaatttttctgcgtttttgatatagtgtggtcatagttttgtgacatgttaaataccaagagatgatacaaggtgtatatataccatgtgcatgtgaagttgggatgtgtgtgtgttttgctttgcgtgtatgaagacatatgtatggagtttgtttggcagaatgtgtggtttatatgtcc

SEQ ID NO: 15447 - DNA, 924 bp, Oryza sativa
  ref <308>: DATABASE ACCESSION NUMBER: AK065969
  ref <309>: DATABASE ENTRY DATE: 2001-12-06
ggaagagaatatctgcagcttgatcagttccaaaactgagatatatctgcagcttgatcagttccaaaactttagctgggcacgcactaccggcagcagttcaaggacaaaccaatttgaaggcggctagcgccagcacaggcatgccgatctcgcatgagctgggcgagcctgacgaaagcttctacaatctatggaaggaagagtgtgaagaactgtgggaggaagaggacgaactgtggggggacgaagatgttgaggaggagctgtcgctgcgtcaccctgggttcaacaagtggaccgtccagcagggtgctgcaggcggggaccatattcgcgccaaggacaagaacttttactgctttgaggtccaagttcacttcactggagaactagttgacggtacgcagttcgtgtcaagccgagaaaatgacattccagagaggtttatactggggcaagaggatgtgatgcatggtttcaacttagctgtcagttcgatgcaaccaggggagaaagctatattcactatcccttcagcgttaaccatgacaaaagctggctcccctgctagcatcccgtcaaacatacctcccaaccaaacactacggtttgagattgagctcatcgccatgtttactataattgacattttcaaagatgaaggcatattgaaaaagattgtcaagaacgcagaacccgacagaaaacaatctcactcaagtgattttgtatttggtacattccttatctaccaattccagttgtacatggaaattgatttcttcattagctcaatatttcttttgctatttacttttctttgacttttgatctagtttagtttctgttccttaattctaaaaccatgtaaacctcgtttgttaaccctaataaaagataaaacccaacttgatgtccagt

SEQ ID NO: 15448 - DNA, 1676 bp, Oryza sativa
  ref <308>: DATABASE ACCESSION NUMBER: AK065970
  ref <309>: DATABASE ENTRY DATE: 2001-12-06
ggtgtgacaatcgtcagactttgaatccggagacagtgtcagacaaaaaaatcgtgttcactggccagcctcttctacccttcttctgatcctctcccgtatagccatttcgtcgaacaccttcccgagccgactgccgccgccgccgccatgctcctcgcgaagccccacctctcctcctcctctttcctcccatccacgcgggtgtctagccccgctccgggtccgaaccacgcaaagcccatcgccgcctctcccgcccctcgacgctgcctccgtctcgccgtcacatccgccgcggcgccggctgcttcgtcggcggaggcggcggcggcgctgagccgcgtggatgtgctctcagaggcgctccccttcatccagcgcttcaaggggaagaccgtggtggtgaagtacggcggcgcggcgatgaagtcgccggagctccaggcttcagtgatccgcgacctggtcctcctctcgtgcgtcggcctccaccccgtgctcgtccacggcggcggccccgagatcaactcctggctgctccgcgtcggcgtcgagccgcagttccggaacggcctccgcgtcactgacgcgctcaccatggaggtcgtcgagatggtgctcgtcggcaaggtcaacaagcacctcgtctccctcatcaacctcgcgggcggaaccgccgtaggtctctgtggcaaggacgctcgcctcctcaccgcgcgcccctccccgaacgcagcggccctcggcttcgtcggcgaggtctcgcgcgtggacgccaccgtcctccacccaatcatcgcctccggtcacatcccggtcatcgccactgtggccgccgacgagaccgggcaggcctacaacatcaacgctgacacggcggccggcgagatcgccgccgcggtcggcgcggagaagctgttgctgctcacagatgtgtctggaattctggccgaccgtaatgaccccgggagtctggtgaaagagatcgacattgctggggtgcggcagatggtggccgacgggcaggtagctggtgggatgataccgaaggtggaatgctgcgtgcgtgccctcgcacagggcgtgcacactgcaagcatcatcgatgggcgtgtcccgcactcgttgctgctcgagattctcacagatgagggcactggcactatgatcactggctgaggtgattcatcccgtcgtggtttttgtcattctttttggagttggcctggtgtgatatgatagattgaactgtgaaccacaagtgaatggagaaaatgacttgatttggcaccactataccaaggttctagctgtgactcatgaggtttggagaaactgatggcatggagggctggactggtagagctctgggtccttgcagacatcattcctctgttctttccaccaccatggcatggtcagagcaaattccacttgcatctaatggaacggtgccttcttttccgtatttaagtactgtattagtggaaactttcagtctttcattgtgccattcgtcatttctgatctgttgtgtgagagaaattttgagaaaagggaggaaaagctctaccccttcacttggcgttacagaatctattcctcattatgttgtctatttactttttgtgcgatactgatacggtaagcatatcgtagtgctgtttagtgtc

SEQ ID NO: 15449 - DNA, 1812 bp, Oryza sativa
  ref <308>: DATABASE ACCESSION NUMBER: AK065971
  ref <309>: DATABASE ENTRY DATE: 2001-12-06
gacatcgatcctacgggcatggaggacaaggtgttgctcgctgtgggcgcatcccttgtgttggtcttcctgtccaagctgatatcatcatatgccaagaagccgagactgaacctgccgccggggccatggacgctgccgctgatcggcagcgcccaccacctcgtgtcctggagcgagagcgtgcacagcgtcatcgggaagctggcccgggagcacggccccgtcatgcagctctggttaggcgaggtgcccacggtggtcgcgtcgtcgccggaggcggcgcaggagatcctcagggaccacgacctcatcttcgccgaccgccacttgaccagcaccacggcggctatcaccttcggtggcacggacgtggtgatggcccagtacggcgagcggtggcgccacctccgcaagctgctcacgcaggagctgctgaccgtggcgcgggtgcggtcattccggcgcgtccgcgaagaggaggtggcgcggctcgtgcgcgacctgtcggccgccgcagcgtccggcgccaccgtgaaccttaccgacatggtgaacaggttggtcaacgacaccgtgctccggtgctccgtcgggagccggtgcaagtaccgtgaagagttcctggccgcgctgcacgccatactacaccagacgtcggcgctcagcgtcgccgacctcttcccgtcctccaagctcgcgtcgatggtcgcgacagggccacggaacgttctcgcgaaccgcaacaaagtggagcgcatcatagaggagatcatccaagaacggaagaaccaaatcgaaacggacatgatgagcggcaacgacgacgttggcgataaggcggcggtggagagcaagtcatgctctctcgacgtgttgctcaggctccagaaggaaggcggcacgccaattccaattacaaaccaagttatcaccgttcttttatgggacatgtttggggctggcacggatacgtcgtctacaacactgatttggaccatggcagagctcatgcgctccccaagagtaatggcaaaggtgcaggctgagatgcggcaagccttccaagggaaaaacaccataactgaagatgatcttgcccaactaagctatctaaagatggtattaaaggaatcgtttcgattacattgcccagtgccgctattgtcccctcgcaagtgccgtgagacatgtaagatcatgggctatgatgtacccaaaggtacatctgtatttgtgaatgtgtgggcaatatgcagggatagtatgtattggaagaatgccgaggagttcaagccagagagatttgaagataatgatatagaacttaaagggagtaattttaagtttcttccatttggctctggtcgtagaatatgtcctgggataaatcttgggtgggccaacatggaatttgccttggctaatcttctctaccattttgattggaatctgcccgatggaatgttgcacaaagatcttgatatgcaggagtcgcccggtcttgttgctgctaaatgctctgacctaaatgtgtgtccagttactcacatttcttcgagctgtgcgtaaatgccagtgtaacacaatgcatcttcaaaaagatcagaacagcgcccatagtatatgtatgtactgccagatatatatatggggttggtatatatgtgtgctgttagatatggggtcttcgcgatttcaagataacttatgtacctgagcagaaaaaacatattgagcctacttatgtacgtacttatgctcttaataattgtactgccaatgaaataattaagtgtgtatcttgtacat

SEQ ID NO: 15450 - DNA, 3003 bp, Oryza sativa
  ref <308>: DATABASE ACCESSION NUMBER: AK065972
  ref <309>: DATABASE ENTRY DATE: 2001-12-06
ttgacccacgaaccgctgtgtcctcccctctcgcactctcgctcccagggcggcgccgccactctctccgagccgccgccaccccctccccacctcccaacctcatcccccgtgtctcctcgagttctcgatgaaactgacctgcctggacaccggagtcgatggaggctactacacgccggcgagtcatctcctggaggtggaggggctccgtattctccttgactgccccatcgacctctccgctctcacggcgttctccgcggtgcccctcggcgcatcgtcctcctccggtgatgcggaggacctaatccgcggtgtgccctactaccggtcgcctaccgcggttgcggccgccaaagcaggccacatagacgccgtgcttgtgtcatccgctacggggctgcttggcctcccgttcctcacgcgattccccggatttgcgaacaccaaggtctatgtgacagaggtagctgctaggatgggaagtctaatgatgagagagttggtagagatgcaccgtgagtttgtaaggtgttatggaccagatagggatcagtcaccagtgtggatggaaggggagaagctcaagaaactcatgtcagtgttgcagaagatcacgactgaagacgaggaaaataataatttagctgctttggtgtcactttacaggtccactaaagagtttatattagaagatagtgcttaatttcacctagcttatattggctattggtccagaacgttgaacttacattcttactagagacaaacttaaaaacttttatgaatatttaatacacaaaaaaaatgtacttgaataattgaattttgtcaagatttgactttcaaatgctaataagaatctgataagataattactgtttacaccctagttagtttcagtatcagtccagtgcgttatatcaatgatggttttattacttgagcaaagaaagattcagatactgccacatgtctgcggcctatcatcttattgtgttacttgtgtaactggttaagagttatttgcttcctgcaaacaaatttctgcacttgggacatatggtggtcattaaattttatgactggaagatttgtaagcagttcatggaagtgagttaccattttttttctcaactaatgggatttatatctatctggtgcagtctggataatatagaagaatgcatgcaaaaaacccagtatgtaaaatatggagaggaggtttgcttcaatggcatgttgatgctgaaagcctctagttctggtctcgaacttggcaattgtgtttggacaataaaaggtccaagagcaagtatgacctacttgccgagctccatatttgtgtcagctcatgcattagactttgattatagctctctgaagggaaatgatgtgatattgttttcggatttttcttccttaaatggcatgtatgatgataacaagaagatgggtgagcatatagtggatgaaactgacattctccttgctagtaattcagtgttcagggatgatggcatggatgaagatgaaaccatcaaattcctgtgcagcaatgatgatattgcagaggagatagagagaatcagcttcatatgctcatgcatcattgatgcaataaattctggtggttctgtattaataccaataggacgaattggtattattcttttgcttttggaacatatgtcagaaacactacattcttccaacatgaaggatatgccatttggatttgcttatgtggatgtgtcaagttgagagtgcctgatttactgctaactacgtgtaagatggttagcttctaggagggtttaaatatgcatgtgatacgaagtgtcctatacctgtagtaacaagttatttttcatatcggtagttctatgccccttcttttaattctactatgaaatttgaagtttatgccacatcgctattcacatctgtttttggatgacaatttttttcagagtcaggttcccatatttatgatttctgagacagcagaagaaataattacttttaccaatgccttgcctgaatggctatgcaagtcacgccaagagaagcttttctcttgtgagccgttattcggccatgtagagcttttgaaggaaggcaaactatcactgttctctcatttatactcaaagggcctgctcttggaaggaaccttgcattgtattttgtccacattggagtcttaggcatggcccagctgtccatttgcttcatcgatggcgtgcagacaaacgatgtcttcttgttttggagcaaggagttgatgctgagttgactctaaaacctttcatgcctctggcgatccaggtccttgggtgttctttcctttctggaataaaggtggggaaaattgatccattactgggattgctgaaaccaaagctcatactgtttcctgaaggtcagaagtcgttgtgtccagccacagataagcaaccatggtcattcctgtattactcaaaggggaaaacaatcgaggtcccaaatatgcgggaagaattcgaggtgcgcatgacaactgaggttgcctttgggttgcaacctaggcagctggacaagaccacagctgttgcgaggttgaaagcaaagctccttctaagcaatggacaatatgtgctagctgctgcaaagagtgaattagatcgatcagagcggcacttgctacactggggaactgtggacgcgagctgtataccgtcagccttgcaggaaaagggaattgtatgctcgttttctgcagacgctgattactctgcaccttcagatcgtgaacgtgtaatttcgatcactagtccaggagaagccctggtgaaggtgacatctgaaaggactactatttactgtgatgatgaagaaacagcagagcgtgtttatgatgctcttcgtagtatttgtaatgggatatgatgtatatatacgatttcactcaagaaaatgacgtgccttcgtttttgctgtcgaaggtttgaaaccacc

SEQ ID NO: 15451 - DNA, 2129 bp, Oryza sativa
  ref <308>: DATABASE ACCESSION NUMBER: AK065973
  ref <309>: DATABASE ENTRY DATE: 2001-12-06
tctgttcgtaaccatcaatgattggcctgcacttagcaacctatccggacagtccaacaaggggtacaaggcttgcactcactgtatggatgaaacagaaagtacgtatcttaagcactgtaggaaggttgtatacatgggtcatcgtcgattccttgcagcaaaccacccggtacggaagaaaggcaagcactttgaacataaggctgaccaccgtacgaagcctaaacatcgcagcgggaaaacagtgtttgctatggttaaagatcttaaagtagtgttcggaaaggggcctggaagccagcctatagagagcgaagatggtcacgcggtgatgtggaaaaagaactctatattttgggagttaccctattggaaattcttggacgtacaccacgcaatcgacgtgatgcacctcactaagaacctttgcgtaaaccttcttggcttcctaggtgtatacggaaagtctaaagatacactggaagcacgtaatgatctgaagcatatggaacaacgcggcgacctttacccggaaccaaaggagaaaggaagccattacttgagtccagccagctacactcttagcaaggcagagaaggaaagtatgtttgaatgcttggagagcataaaggtaccgtctggatactccacgaatatcaagcgaataataagcacgaaggagaagaagttcacaaacctaaagtctcatgactgtcatgtgttgatgacacaactgctaccagttgtaataagtggtatccttccagacaatgtccgggcaacaataacaaagctatgtgcattcatgaacgcaatttcgcagaaggtcatcaatccagatagattagaagcccttcagaatgatgtggtgcaatgtcttgtcagttttgagttgatatttccaccttcatttttcaatataatgacgcatctactttgtcaccttatgaaagagattagtattctcgggcctgtgtacctacacaacatgtttcctttcgagaggtacatgggcgttctgaagaagtatgttcgtaaccgtgctcgtccagagacaagcatcgccaagggttatggaacagaggaggtcatcgaattttgcgtagaatttatcgaagatcttcgcccaatcggggtacccgaatcacgccatgaagggagactacggggaaagggaactctcggaaggaaagcaataatgacggtaaacaacaatttattccgtaaagaccatttcacggttctgcaacaatcttcattggtagctccttacatcgaggagcacatggctctagttcgcgccaggaacatcggtaagtccgatgcatggattacacggcatcacattgatactttccccgcgtggatacgacaacatctcatgggtaacgagtcgatcaaccaacaacttgccttcctggcgaggggaccgtctgggtcgatcgcgacattctagggatatgagatcaatgggtacacattctacacgagagctcaagacatgaagagcatgaaccaaaacagcgttgttcgtgacgatgccatgggacacgatggaacaactagcacgtattacggtgccatcgaggacatatgggaacttgactatggtcctctcaaggtccctctgttccggtgccaatgggttaggttgactggtggaggcgtaatgattgatgacagtgggatgacaacggttgaccttaacaaggttggatactcggatgaaccttttgtccttgccaatgatgtaacgaaagtctttttcgtgaaggatatgtctagcaaaggaaagaagagcagagggcctgacgagcctaagcgtcacgtggttctcccaggcaaaagaaaaatcgtcggagttgaggacaagactgacgagggttacgatcagttggatgggcaaccccctttcacggtgacgattgaccctagcatcctcctatcaaatgaagacaccccttactcatgtagcgatcacaaggagggaacaatagtgaggagaaagtacgtgcggtcaaccgtcaccgccgatgtattgccgtaattattgtgtacacgatgtaaactattttggatgtattgattatccatataaatcaattgatgtatggcatatgttaatt

SEQ ID NO: 15452 - DNA, 2056 bp, Oryza sativa
  ref <308>: DATABASE ACCESSION NUMBER: AK065974
  ref <309>: DATABASE ENTRY DATE: 2001-12-06
gattgcttcgtctcgcgccggatcgatccagctgccgccgcgttccgatcccctctgctctggcttgctgatagatcgatcgatcgatgaagcccgccggtgggaggagcaaggacggcggcggcggcggggcggcattgctcggcggcggcggcgtcacctgcttcgacgtcaagtccttcgtcgcctccctcgcgctcctcaccctcatcatggcgctctggcagctccacccctaccagcccctcgtcctcctccccgccgccctctcctcctccccatgccccctcctcccccgctcacccacctctggtattgccgtttccttcctctccaccgccgctgccaccaactcgactgacaccgccacggtcccaaccaccaccgccgccgcgagggtggcggcgacgacgaggccgaccctgcccgcgcggcagcgggagcgggacccaaacaagcgggagctccgtccgtacggcacggcggcggcgctgttcgtccagatgggcgcgtaccggggcggcccgcgcacgttcgccgtcgtcgggctggcatccaagccagcgcacgtcttcagcaacccttacttcaagtgcgagtggctgcccaacgctcccgccggcgcgccgccggtccggaccaaggcctacaagatgctcccggactggggctacggccgcgtctacaccgtcgtcgtcgtcaactgcaccttcccctccaaccccaacgccgacaacctcggcggtaagctcctcgtccacgcctactactccaccgcctcccgccgctacgagcgcttcgtcgccctcgaggaggcaccgggctcctacgacgacgcccgattccggccacccttcgcttacgactacctctactgcggctcatccctctacggcaacctaagctccgcccgcatgcgggagtggctcgcctaccacgcccgcttcttcgggccgaggtcccacttcgtcctccacgacgccggcggcgtgacaccggaggtgagggcggtgctggatccgtgggtcagcgccggccgcgtcaccgtccaggacatcagggcgcaggaggattacgatggctactactacaaccagttcctcgtcgtcaacgactgcctccaccgctaccggcacgccgcgaactggaccttcttcttcgacgtcgacgagtacatctacctccccgacggccgcgcgctggaggacgtgctcgcccagctccagccctacacgcagttcaccatcgagcagaaccccatgtccagcaagctctgcatcgatgatccgaccgaggactactcgagggaatggggctttgagaaacttgtcttccgcaattcaattaccggagtgaggcgtgatcggaaatatgcaatccaagcacggaatgcatactccactggtgtgcacatgtcgcaaaatgtgtatgggaggacaactcacaagacagaaagcttgataagatactaccactatcataattctatcaatgtcatgggggagccctgccggaaattcgtgccgaaacccgccaatggcagtaaggtaatgttcgaggggataccctacgtctacgatgataacatgaagcgcttggcaggggagatcagacgctttgagaagcagacgattggggatgtccatacatagcatctggatgcaaaactttgctggtacatatatgattttattctttcggacgccgtcggcggtgtccacctgttgccgtctgttctgtgcttcaagccgcaactctgagaatcagagggagaggatctaactccagtgtccaagcagcgctgtaaagttatggttcttttcagcattctcctcttcgtgcagggggcaacacgcctttgtggctcaatatcctttctttcctttgttcctttcccttcttctccctagtgttgtgctccaatctctttatagatttgtgcttattagactgacagtgtgccttcatcagattcttctcatctcttattgggggcattgtaaagtttgtctcattgtctgctaacttaatggaaggttggatcttatatagtacc

SEQ ID NO: 15453 - DNA, 1546 bp, Oryza sativa
  ref <308>: DATABASE ACCESSION NUMBER: AK065975
  ref <309>: DATABASE ENTRY DATE: 2001-12-06
gtacgctccttgcgcctccccaagacgagtcgcggctgaacagaagagggggagtaggcggcgatctccatctggcgactcgcgagcagagcaggggaggggatcctgatctggaagaagctctcctcttaatttcagcgccttaaccttaatacaagtaccagtttgagtttgtttgttcccaagttggatccggccctgggtaatttctttcttgctgaaggtggagagactgagctgagctatggacaacttgtggcatctcggggatgagttccgtgggcagtcgaaggtagtggaggaccgtcagtggtctctcatgacatcgaagttggctgagatcaacaagtccaaggcggagaggacgaatgagcttgactatgcgcggatgaacaccatccctgatgtcaagcaatgggataaggtatcctaccaccaagatgagagcaagatggaccacctcaatcttggccttatgaatctagatcttaagatgaacgacatcaggatgaatgacgcagctatgaagaatcctttccgcggcatggcctacaacatgaatcagctgtaccccaagggaggcaatggcaatgttaactcgttcaagatgaatgttggggtcaacaaatatttgcatagtccaaatggcaaagatgtcaatggcaaaaacagtggtgccaacagcaatggaagtaacagcagcgggaacaacagcagcaactctgctgttgacaaacgattcaaaacattgccaacaagtgagatgctaccaaggaatgaagtgctcggtggatatatctttgtttgcaacaatgacaccatgcaggaggatctcaagaggcagctttttgggttgccagcaagatatcgtgattcagtccgagcaattattcctggtctacctcttttcctctataactacacgacccatcagcttcatggggtatttgaggcttctagttttggaggatctaatattgatcccactgcatgggaagataaggagtgtaaaggtgaatctagattcccagcgcaggtgaggatccgcattagaaagctctgcaagcctttggaagaggatgctttcagaccagtgctgcaccattacgatggtccaaagtttcgtcttgagctctccatagctgaggccttatcactgctagacctttgtgagaaagaaggcgtctgaactgttgaagaggtggttgctttgaggctttagtacatatcgctcttgtatgttgtggaaggtggttcactatgttctcatgttcgttaagcgcaagctgttggttgccccctgcaaggacctggtacttgaaggcctctaatacgtgtgcctgtctgtattgtgccgtccgtaatcttgaaaatgtgtatgttttgctatttatgtattttggtagagtacacccagaagggaaccccaaaatggggggatactgtaatgcatcataatgccctaaataagggcagttgatgttcagagtgtattcgtgttgtatcttaaaaaccttgcatttgccttaatgctgctttgcacttc

SEQ ID NO: 15454 - DNA, 1717 bp, Oryza sativa
  ref <308>: DATABASE ACCESSION NUMBER: AK065976
  ref <309>: DATABASE ENTRY DATE: 2001-12-06
gtcccaaagctagagtctttcttgcttctcctgagtcctgacttcttgatccaccgattgttcttcgatttcttgcttcttgattcgtcgccgctgctgctgctggaggcagaaagggagcacaagatcgagcaatccaagctgcaattagaggaggaggaagaggaagaggaggaggatgctgagaagggcggggaaaggggaggttgcagatgggttctaccagattcgctcggattgcacccacaaggtccccgagaccaagttcaagatcaaggttgggaaaacgttgagcgttcggaaatggcatgctgcgtttacgcgtgaaggccgtttggatattgcttcggttctgaaccggatacagaaagggggtgtccatcctacaatcaggggagaggtctgggagttttttacttggctgttttgatcctgggagcacttttgatgagcgcgagcagattagggagaaaagaagaatacaatatgccatatggaagcaagaatgcaaagatatggactcccatgttggtagcggtgaaattatcacagccccaattataactgaggatggaaaacctattaaggatcctttggttttgctcgaagctacttcagaccagcacacaatgcaaggtagttcatccagcagcaggaacgaaaatgaggtggacaagtccgaaaattgtgtggtggataaacaaattatcgaatggaagcttttgctacatcaaattggccttgatgtgctgcgcactgatcgatccatggtgttttatgagaacaaagaaaatctttcgaagttatgggatattcttgctgtatatgcttggatcgacaaagaaattggctattgtcaaggaatgagtgatttatgctcaccgatgatagtgctgctcaacgacgaagcagatgcattttggtgctttgagagattaatgcgtagactgatgcacacagcaatctgttggggtggagaaccagcttcagcaccttgcgtctatcattcaagtgcttgacccaaaattacatgaccacctagaaacacttggtgggggtgattatctctttgcattccgcatgttcatggtattgtttcggcgtgaattatcatttggggactcactatacctttgggagatgatgtgggctctagaatatgatcctgacatcttctccacatatgaacatattgatgctgcaactggtgtaactccaggacataggcaaaaagtaaaatcaattcgccaatttggcaagtacgagagagacaatatgaagaatggggctactagtgacaacgatggtcctgttccgatttctgttttcctggttgctagtgttctgaaggagaacagtgcgaagctcctgcaggaagctcgagggattgatgatgttattaggattttgaatgatgttaatgggaatttggatgcgaaaaaggcttgcgctgttgcattgaaacttcacaggaaataccttaaaaagatccagggaaagaagccataacaacgagctccgggttactcctggttttgatcgtggctctgttttactcctgcttttctcctaatttgtgagaaaaatgtacaaagttcgttaatttgtggctggtaagaattctaccactaaactatagccaccatataacacacggagaatattacatgtaacattatttattgatgaatcaatggaggccaaagggaaacaaccc

SEQ ID NO: 15455 - DNA, 3035 bp, Oryza sativa
  ref <308>: DATABASE ACCESSION NUMBER: AK065977
  ref <309>: DATABASE ENTRY DATE: 2001-12-06
gtaatccatccccaaactcaactctctgctgcggcacgacggtggggttgggggaggggtggtgcggcggcggcacggcggtggggtggggtggggcaccggcggtggtcggcagcagcgccacctttccacgtgattcacggcaacacgaatcaacccccatgctgctccggtgacgtcgaggcatctgcgaacggcggcctcgattcgccgattgctcctccagcatccactgaattaaggtcattctctcttcttgatccctgctatagttcgtgtatgttcttccgtggaatgtgcttggtttgaacaatttgggggctgagatgaactagggttttgatgccaccaacactgacaactgcagatgaactagagttagtattccgtcggtgttcttgtagagacagctacagcttcctcttcttgttgttcttcttgtccttccctccacttgggcctggcccctcatcgattggccaacaaaaggtagtaatggtgtccctccattactgctgttctgtaaggttatgatgagctacccactgatgtggagcaaccggcggcgtctgcagctgttactgttgtgttattcatcgatgggaggatcgtgcgtagaattgatgttgctgctgccggcctgccgtcgtgctttatgttctccattatcttgcatattgcattagaatgatggtgagatgtgggtctggggtctggggttcagtacaaagttcgatcaacggcgttcatgggtgccagcttattttagtgacatacctttgtcaggattgttaaggaccacctcaaggtcagagagtgccaattcattcttttctcgtctaattgggcggaagcttgctttggtggagttttggctcaggtttgatgctgcactagaagaacaaagacataaggaactagaagaagataacattacgctccacacaatccgcaatttgaagacagaatgggtgatagagaagcatgcaagtgagttcttcacacatgaggtatttagcataattcagaaagaggtgctagctgccagggaccgttgccttattgacaatgtgcaacaagagggctaggtcaaaatcattgatatcattgaagaatccaggaagccaagagttgtgcgttatgatagacagacaatggttgcaacgtgcacatgtatgctatttgaaactcatggtataccatgtcgtcatctaattccagtcctaagaagtgcccagctaagtgaactgccgagatactatttattagaaaggtttaggaaggactgcaagaagacacatgtgttcgatgcagatggtatcttgttggaagaaaacacaagcaacagtaatgatcctgtgatgcaaaaaatgctttcagaagcatgcaacaaaatggagaagcttatcctacaagctaagcaatcagcagcagctatgcaacttttgagggatgaactagttgtgcttggtgataaattaaatgagatggttcctgaaaaagagcttagccaaattgaggaatttgaatcatatcttggatgtagcattccaagtcaaattgaaatccacccgccaaatgacactcgttccaggggtcggataaagagaattaaagggcacaatgacaaggagaaaaagcaaaacaagaagataaagaaaaaagagagagtaccacaaaggtgcaagaagtgcaaacaagtcgtgctgcacgattcgcgcaactgtcctaacaaagaaccacaacagtgatgcaaggttctatacatcatgcttccttaactatcagtcatcttataatagttgtcatacaatttcctggaagaagttagcgtttctctgtaaaagattgtgtgttgtcatccaaaattcaactaacggtgtatcgtaaagtctatagtgtgccaagaacattctggttctaatggacatactgtagatttccttggaacaaagtagcaattcatgtaaaagataataggtggccatataatatttaactaacagtaggtagtgaacacatgttgaaatataattagttgggaccattgtgaggtaataacatttttagtattgtcgtcgtgagtctaattaataatataaatcgcaaatgtacaattgtcctgttagctgatgtggtcccttgcatttttgcatgggttcttatttatagctctttaagtttttgactgtatgatttgggacctagtgttatcaacttggaacaaagtataaaaaaatatgggaaggattcgaggtgggcaagtgggcatgtaatatacagcgggatgtgtaggaagcacaatcattttggattgcattttcagtttggaatggttaagaattacatatggaaaatatttaaatatattgcgacaagttcggctcatatacaaatgtatattgcgacaaggacattttggacagctaatattcagcttgaaatggttaagagtacatatgggaagacaggaaaaaaatattagaacaaccattgtgttccaggaacattttgttatcttagtttggtccgtagtgtgaataaaactttgtatgtatctatgctcaccagtatatatgtccttaacaattttttatctatgctcacaagtatatatgtccttcttaacaatttttttcactatgcagtttgctgggtgcaggtttttttttgctgagagcagctggcgagaattcttttgctgagagtagttttttgttcaaagtagagccactgccatcatccagtgcacacgtgtgtgatctattaatagattttagccatttaatagcaaggttgcattttgattagacaacaccttgaaggggataactaatatttgtgcacaagtgttgtaacttatgaatgttattacctgccaaaactctgtgggatctaaattgtgtcagcagaagacatctgaatatcagaccatgtcggtatacattgatggactaggttgactctgccaattgtttgtggccacaatctggacctatgattttctaggaaaatcctaaatatacttgaactgg

SEQ ID NO: 15456 - DNA, 1725 bp, Oryza sativa
  ref <308>: DATABASE ACCESSION NUMBER: AK065978
  ref <309>: DATABASE ENTRY DATE: 2001-12-06
gtctctcacttttccaaaccatcaacgtgcccttctatttccttcttcccttcctccgagggcttctgatccggagagacagagatgattgggagcagaggcggcggcggtggcgcggcgccgaggccgaggcggcggagcgacccgggcgacagccgcgacctctccgtggccaccaccacggagtcgtacaactccgagaggtccgtggggagcggcggcggccgcgggaccgccttcctcgacgccttccggtcatgcttcgtctccggggaggcgcaggcgcgctccccggagacctcgtcgttgtccgacgacttccatccctcacaacagctatcacagtcgataagctcacaaggttctagcagtggaagcaattttgagatgcggagatcaatgaaaggactgtataatccaatgcatagaaattcttcaggaaaggagatccctggaagcacacagttctccttaccacagatccagaaagcaaccaaaaatttctcgccaaacctgaagattgggcagggcggttccgggacagtatacaaaggtcagcttaatgacggcactcttatcgccgtcaaacgggccaagaagaatgtgtacgacaagcatatgggtcgtgagttccggaacgagattgagacgttgcaatgtatcgagcaccttaatttggtaaggtttcatgggtacctggagtttggtggtgagcagttaatcattgttgagtatgttcccaatggaaatcttcgtgaacaccttgattgtgtcaatggaaaaattcttgaattttctctaagattggatatttcaatcgatgtggctcacgctgttacatatcttcacacctactcagatcacccagtcatccacagggacatcaaatcgtcaaacattcttctcacaaacaactgtagggcaaaggttgctgactttggatttgccaaactagctccaactgatgctagccatgtctcaacccaagtaaaaggaacagcaggctatcttgatcctgaatatctcagaacataccagctcaatgagaagagtgatgtctactcctttggagttcttctggtggagttgataacagggaggcgcccgatagaaccaaggagagctatcgtcgagcgtgttactgcaaaatgggcaatggaaaaatttgttgagggaaatgcaatacaaacgctggatccaaatctagaagcaactgatgcgatcaacctggccgtcgagaaaacgtacgagctggctctgcagtgcttagctacaactaagaggaacagaccaagcatgaggcgatgcgctgagatcctatggagcatacgcaaagatttcagggagttggatataccaaccgcatccctgaactgaactgagacagttcacttggagcaatcaagaaaagctgcactccagtttgcctctcttcaaagcgtggtggtatgaatcacccgattgctggatgatgaatttattccttcaggatgtggtctaagtagttgtgattgtgaacgggactggtgatcttcctaggaattgtgtgttcaccagctagcaactaggaacaattgcatagcatattctgtacatgataaattgttgctgtgagcaagacagacacagatactatataatggtatattggttgaggatgcaattttgttgtgattatttaaaacttccaaaagaacacacaaagttatatacaaaatcgtaacg

SEQ ID NO: 15457 - DNA, 3156 bp, Oryza sativa
  ref <308>: DATABASE ACCESSION NUMBER: AK065979
  ref <309>: DATABASE ENTRY DATE: 2001-12-06
gtgggaagagaagcgaatcttttccacctccactgggcaaaaaaaattaaaaaaataaataaaattccccattcccccgaacagattgattcgcttcgattcgagggaggaggggagcacagcgatttcttctctctctttcgccgtcgcattcgcctcgcgccgcgccgcgcacaatcccatccgctgctgcccaaggcttgtttcgcggattcggattggtgctgactcgctcccgattggcaccgggaggtatgaattctcgctaggatttcggtgggcggattgctgacgaggagagggttgggggggagtggagttggatgtgatcgggttgtgggaaatccctagtttgtggtgtagtgatggatcatctggctatcattgcgacggagttgggggattcgtcggacttcgaggtggagggcatccagaatctgacggagaatgatgtcagcgacgaggagattgaggccgaggatctggcccggcggatgtggaaagacaggatcaagctgaggaggatcaaggagaggcaggacaggctcgcccttgcgctgcagcaggctgagctggacaagtccaaggggaagccgatatccgatcaggccatgcgcaagaagatgtcgagggcgcaggacgggatcctcaagtacatgctcaagctgatggaggtgtgcaacgcgcgcgggttcgtttacgggatcatccctgataaagggaagcccgtgagcggcgcttccgacaatattagagcttggtggaaggagaaggtgaagtttgataagaacgggccggcggcaatcgcaaagtatgagtcggagaacttggcgtcggctgatgctccgagcagcgggatcaagagccagcacagcttgatggatctccaagacgccactctcggttcactgctttcgtcattgatgcagcactgtgatccaccgcagcgcaagtacccattggagaggggcactccacccccgtggtggccttcagggaacgaggattggtggattgcgttgggccttccgagggggcaaattcctccgtataaaaagccacatgatcttaagaaggtctggaaggttggggtgcttacaggtgtgatcaagcacatgtccccaaacttcgataagatcagaaaccatgttaggaaatcaaaatgcttgcaggataagatgactgcaaaagagagcctgatttggttgggtgttctacagagagaggaaaggcttgttctcagcattgacaatggcatgtcagaggttactcaccacggtgctctggagtacagaaatggggacacacacagcagcagtaatgagtatgatgttgatggttttgaggaggctcccctttcaacatcatctggagatgatgaacaagatctttctccggctgcacagttgagcgaggagcatgccccaacaaggagagaaagagctaaagtcaaacgccctaatcaggttgttcctaagaaggcaggaacaaaagaaccaccaaagagaaaaagaccacgccacagtgtcaccgtaattgagcaggaggtacaaagagctgatgacgcatcagaacattcaaggaatatgattccagatatgaaccgactggaccaggtagaaatccaaggcatggctaaccagattacaagcttcaatgaggaagctaatacgagtgaagctttgcaacacagaggaaatactcaagaactggcccatcttcctgccgattttaatcactatggcaatgcgcaggcaacaattgctactcctgtaagcatatgcatgagaggccaggctgtaccttatgaaagcagtgacaattccaggccaaaaactggaaatatcttcccacaggattctgattcaggctttaacaatatgcctagtagttaccagaccatacctcctaagcaaccacttccactatctatcatggagcatcatgtggttcccttgggtatcagaacaccagctgacaacagtccttatagtgatcaaataattggtagtgggaattctacttctgttcctggagatatgcagctcattgattaccctttctatggcgaacaagataagtttgctggcagttcctttgcgggattacctttagactatatcagtatcagtagcccaatcccagatattgatgatttgctgctgcatgatgatgatctaatggaatacttgggaacataacataggttaggctccaatgcctccttgcatttgtttctgtcgcccattttgtcagtaggattaccatcgtaacttgagtatggaaggctatacttcttattttgccatcaaatatcaatcttgttagttgataccgtttctagcatggcaaattatacctgacttgcattctttggaaatgatatatcaaatgatgaccgaattgtaaatgggaaaggtgtatatgatttaagtttgaaatatggccttttctgaagaaagatatctagtgaagaatgaacatagtttttgtaatttttttagcctgcgagaaatgaaagttttggtctcctgctttctctcactctctccccttatgcattctacagaaacattgagaattcacctcaacattttatatgcgactaataaatgaaaaatcatcagttgataggaacctcctgtatccgatctgtccatatgttcaattacaatgaagtagagaactgttgtagcagatcaaaagctctttgccagtgccattttctaatagttacaaaagtgaagcaattctataagtgcatataaaattttaggatactctaatgtaatggcactatctaccaggtggcaatgggggctgctactaaatcacaccaacactatcctcctctgtccccttgtgctacttggcaattggcatagttatttttggagatagctgagagaaaagaacccttgatgcaacgatacatcatacatggcaatatggcatagttacttttggtggtctcatgcagctgtgaagttagatcgatgtaattgaacatcagtacccaggcttgatgtgatgatagacaagtctttgtgcattccctaaaagaaaataacccttaaatctgtatgatactatgatagcttgtcctgctggacattttgtatgactggtacattttccaatttgtagaatctgttt

SEQ ID NO: 15458 - DNA, 2148 bp, Oryza sativa
  ref <308>: DATABASE ACCESSION NUMBER: AK065980
  ref <309>: DATABASE ENTRY DATE: 2001-12-06
gttactccacccacgcgtacaaacagcgagctcctccaccccgcgacgccgcgcgcctccgcccaaaaccctagccaccccgcgtcgcccgcctcggcgcgcccaaaaccctagggcatcccggatccgaagctcccggccccaatggcgtcgccggacctgttcccgaacgtctccttctcccatgtctccgtccccgccgccgcgggcgcgtcgacggaggtcaccggcggcgccacggccgtgttcggcggggacgcgtccaccggggccccgcgcctcagcctcgtctggtccggggagacccaggcgaagcacacgctcgagatcgatctctctgacgcgcagatatttaagctggggccgacggagtggctgtgcgtgagcggcgagtcggaggctaaggacggtgtggaggagaagtcatattcaagagcaattaaggttgttcttaggacagaagctgagagcaaagccttctatttagcttttcaacaatggaaacaccgagtgattagtggaaaagctggtgaacctttggaaaatggattaataattggttctaaaagcaaatttgatacaaaaattgaggcctcatcagcaaagatgtatttccactactatggccagttattacatcagcaaaatatgttgcaagactttgtcaggacaggaacatactatgctgctgtaatggaaaatcgatccgattttgagggtcgagttgtggttgatgttggagctggtagtggcattctttcattatttgctgcacaggctggtgccagacatgtatatgcagttgaggcatctgaaatggctgaacatgctcagcgtcttatttctggaaacccatctcttggacaaagaataacggtcatcaaaggcaaagttgaggaagttgaacttccagagaaagctgacatacttatttcggagcctatgggaaccctcttggtgaatgaaaggatgctggagtcctatgttatagctagagacagattccttgtgccaggtggtaaaatgtttccaacaactggaaggattcatatggctccattttccgatgaatacctctatgttgaaatggcaaacaaggctctcttctggcagcagcataacttttttggtgttgatcttacacctttgcatggttcagcattccaggggtatttttcacagcctgtggtggatgcattcgatccaagattattggtttctccgcctacgtttcatacgcttgatttcactaccatgaaggaagaggagctttacgagattgacattcccctaaattttgtggcctctgttggcactagggtgcatgggctagcttgttggtttgatgtattgttcaatgggagcactgtccagaggtggcttaccactgctccaggctcccctacgactcactggtatcaactacgatgcatactttcacagccattatatgtcatggcaggacaagaaataacaggacgacttcatctggtagcccacagtgcacaaagctacacgatatacttgacgatgtcagctaaaatgtggggtgagggggcagaacaaggtggcatcctgcagacatccacagccaaacttgaactcaaggagccatactacaggctgtctcaaccacaaccatatgtgatgcaacaagaccagcagcagcagcagttaccatctttgcagccacagagtcctctctgggactatcactacggacaagattagttgtctggcctcagctattgaacattggcaagaatagcagggatctgagcagcagatgcaagatggtcttagccctagtataacgattgaaccagaccaagactcggcggccttcactagatagctcgtaagccggagttgcttcaggcaaacaactccaggcctgtacaacagtatgctcctacctgatgttgctaggcgttagctgtcagtggctaacattgcattcgttgtgtacgagaggttgtgcagctgtagctaattgtgctcgtgtctgcaccgttatttaaagggggtcaaatacaataagtgtatctgtttgcaggaaaagctcaacgacaaaggcgtctaactagaacgattgttgtgtatgttcttatgtattattgttttatttaatttaaaaatggttggtcg

SEQ ID NO: 15459 - DNA, 1256 bp, Oryza sativa
  ref <308>: DATABASE ACCESSION NUMBER: AK098946
  ref <309>: DATABASE ENTRY DATE: 2002-08-28
gaatggtctctcacacacgctcgattgcatatttgcattagctctagttgtcttgctaccgatcgatcgaattcatcaatggcatccggtggcgaccagacgacgacgaagagcaggatcctggtggtcggcggcacggggtacatcggccggcatgtcgttgccgcgagcgcgcggctgggtcatcccaccaccgccctcgtcagggacctcgccccctccgaccccgccaaggcgcagctgctccacaccttccgcgacgccggcgtcaccctcctccacggcgacctccacgaccacgccagcctgctgcgcgccgtccgcgacgccgacgtcgtcatctccgcggtgcgcgcgacccaggtccccgaccagaccaggctcatcgacgccatcaaggaggccggcggcggccgcgtccggaggttcatcccctccgagttcggcatggacccggggcgcggcgccagcgcggcggtggagccggtcaggtccatgtacggcagcaaggtgggcatccggcgcgccgtggaggcggcgggcatcccgcacacgtacgtggcgtgcaactacttcgccggattcgcgctgccgtcgatcgggcagttcatgccaaaggcggcacccgtggatagcgtggtgatcctcggggaggggcacaccaaggtggtgttcgtggaggagggggacatcggcacgtacacggtgctggcggcggtggatccccgggcggagaacaagacgctgcacatacggccgccggcgaacaccatgtcgcacgacgagctggtgagcatgtgggagaagaagacggggaagaagctggagagagtgtacgtgcccgaggacgccgtgctcaccaaaatcaaagagttagagtacccgaagaacgttttggtgtcgatcgcgcacgcggcctactgtagaggggagatgagctcgccgctggatgatccgcaggacgtggaggccactcagctctacccggaaatccaatatacaaccgttgacgaatatctcaacaccctcctctaattcatttcgtcatgcatcatatcaccctaaatatgcatgcgccaataaaaacaagtcttgattttattttgttcattgctccatcttcagtcagtgtccactggtttgtctgtcatgcatggatcatttttactcttcaattcagttctgcatttcagttgagctgttcagctgagtgccttgatttgtaccacctatctgccttgttacaaatttatgcc

SEQ ID NO: 15460 - DNA, 2707 bp, Oryza sativa
  ref <308>: DATABASE ACCESSION NUMBER: AK065981
  ref <309>: DATABASE ENTRY DATE: 2001-12-06
ggttcttgcgccatctcgcggctggacaggggaggggcgccgatctccatctggcgagcagagcagggcaggggaaggggatcctggttctcagcgtgtgtgatgtgatccagcttgggggaggaagagcttgttggcctcttggcattgcggtctcctggacccagatcttgatgcaactgccgactactttttttttttttactgatagaggtggtctggttgggttcttgacctgattttgtgggggctttgccaccacgcaagggaggcagtttggcctggatctttatcactagctgttggtcatgtcctttgagctagcaagcattcacatggcagtggccgccggtttggtacattcttgatgggttaagtgctgtgggtttgttgtggagttctcttcctggttcccatttggggtggacggtatgtgttgaagggaaaggggcagagatagaaagagcaaaaagaagataggagttcttcggttaattgtttttttcagtacggcgcaatgaagcatatgaaacttggatcaaagccagacctcttccagacagaaggcggcaatatcaggtttgttgcaacggaactggcaacagacattgttatttccataggagatgtcaagttttgtcttcacaagtttcctcttttgtcaaagagttcctgcctgcaaagattagctgcttcaagcaatgtggaaggcaatgaagagttggatatttctgacatccctggtggaccttcagcatttgaaatctgtgctaagttctgctatggaatgattgtaacactcaatgcgtataacgttcttgctgctcgctgtgcagctgagtatctagaaatgtttgaaaccattgagaaaggaaacctcatttacaaaattgatgtcttcttgacatcaagcatatttcgtgcctggaaggattcaatcatagtactgcagagcacaaagtcattgctaccttggtctgaaaatttgaaagtaatcaaccattgcattgactcaattgcatcgaaggcattaattgatccatcagaggtcgagtggtcatacacatacaacagaaagaaactgccatcagagaatggccacgattctcattggaatggtgtcaggaagcaattgatagtccctaaggactggtgggttgaggacctttgtgatctcgagatggatttgtacaagcgggtgatcatgatgataaaagcaaagggaagaacatcgcctatagtgattggtgaggcgctgagagcctatgcataccgcaggctgctgggttccctagaagacgctgtgagcaatggagttgattgcactaaacgccgtgccgtgcttgaaaccatcatatttctgcttcccactgagaaaggctccgtgtcatgtggttttcttcttaagcttctcaaagctgcatgcttgctggaggctggggagtcttgtcatgatatcttgatcaagagaataggcacacaattggatggtgcttctgtttcggacctccttataccggcaaacactagcgaaaacacgttatataatgtaaacctgatcattgcaatagtggaggagtttgtttcgcgacaaagtgatactggcaagatgaaatttcaagatgatgatgagattgtggaggttgagaaccttactcctgtttccagcacctcaaatctggctgttgcaaatcttattgatgggtatcttgctgagattgctaaagacaccaatcttcccctttcaaagttcatcgcaattgctgaaatggtgccccctgcatcccgcaaaaatcacgatggtctatatcgtgccattgacatgtatctcaaggagcaccccagcctatcaaagagcgaaaagaaagcattatgcagattgatggattgcaagaaactgtcccaggatgcgtgcctgcacgccgtgcagaacgagcgccttcctctgcgtgtggttgtgcaggttctcttctttgagcaaattcgggcatcagccgcttcggggcggaccgatgccgcagcagagctcacctctgctgtacactcactactccccagagagaatggaaactcctatggcagctccaggtcagcggccaccacgacaaccgaggaggacgggaccggggtcccgacctccagcgacatcaactcgttcagttcactgaggctggccaacaacagcgggggcagcgagaggagcagtggcagcagcgacatcaacaacaagagctgtgacgacaagagctccagcaagtccaagggatcgctcatgcccaagaagatcctgagcaagctctggtccgggaaaacaaacgccagcgagaacagtagctcggacacgtcggagagccctgggtcactcaacccggaggaggtgaagtccacaacgtccaggaatacaaggcgtttggtaacctagtgtcaacagagccagccatggtttttgtttttgtttcttttttggctttgatttgccttcagatgagataaaaaaaagtagtactagcaatctttagaatgtggaatactactgactggcagtccctccgatggcagatagtgttttttatagcattgttattatgctggcatttgctataggtttggtcatcggtaaatttgttcaggaacgtttcatgatatagtcttgtaatttttttggtggaaatataaagataaaggaaggaaagatcttttattgacc

SEQ ID NO: 15461 - DNA, 3491 bp, Oryza sativa
  ref <308>: DATABASE ACCESSION NUMBER: AK065982
  ref <309>: DATABASE ENTRY DATE: 2001-12-06
gggcctcgcctcgcctcgcatgtccactcgaagctttccccgtcccggtccctagcagagaagagcttccgctcccgcatgcggcatctgcctctgcccccagcagcagcagcagcagccgccgcgccgcgcgaagcatctcctcctcctcctcctcctcccgccgcgcgagcgctgagccctactgctgtcgcctttgcccagatcccgtcggtggccatggcggcgagggcgcaggcgcggctgttcgcggccgcgctggtcatcttccacggctccgagtacgtcctcgccgcggccttccacggccgccgcaacgtcaccgccacatgtgagtgagacgcccccccgctaaccctgttttcctcgctgctttgggttgggatcgtcagatatagagaaaagtttactgaaggatgtgtccttgtagttgtgtggattccagccgctctattcggtaattgaagcgaatgtattcgttcagactggtgaggaaatgcctcgtgggaactgattcgaataaaattgtctttggtctggtgctgcttgaacgcatgcgattgggatttgcgttgagaattatgtgaggcactgcagatgattctatagttttgacattcgctcatgggttgctggcagagtgcttgttttgacgtattgcatagttaaattcttcacttaatttacttgtcttagttatgttccactcggtgttgatctgataagtagccagagtactgtatacatttttgcactcaattgcttatgccgtccgatatgttgcagttatagtaaccctcttttacgtttaacagaaacaagcctccaaatcatgtgctatctgctaaatctagaacacacacacgcgcgcggatgacgatgggttgatttaaagtagaggtagagcacctaaatcagaagctctaaatggatgaagtaattacttccaagttgttataaatgtcaattttagagtttgaattaggtccaaaatagctatcctcgcttagctgggattacgctgttttttcccgccaaaacaaggaccaaaaattgtgttttgtgaaacaaaatataatacaccaaagatcatggaataaaaggagatgtgattggattgtcacaatgcatcacaataaaaaaaatcagaaccattgtttagaactgggtgtataagatttttttcctcttattgtttacttacttaccttttaaattggatttacgcagcctaattttactgcatgcctgtgttgtgatttaataaaagtacttctcatgcagcacttcttatcagcaagcagtatgttttggcaatgagttttgcaatgttggaacacctgacagaagctcttctcttccctgaattgaaggagtattggtttgtcagttatgttggtttagtaatggtgattattggtgaagttattcgtaaacttgctgtggtgacagctgggcgttcctttacgcatgttataagaattcactatgaagaccaacataagctgattactcatggggtgtataggtaacatcctatttatttgttttgtatgaggctgtttatagttcctgatacataatcaaaattctttccactaattttcgtgcgtattagttttttccctcttgtgcattagcatgatataattcttcagggccaatcaataatttatgttgctgatatcaatgcttaaatttacaggcttatgcgtcatcctgggtattctggctttcttatatgggcagtaggaacccaggttatgttgtgtaatccattatccacagttgcattcacattggtgctgtggcgattcttttcaaaacggataccgtatccttataaaagaacatttctttattctttgtgttgttttgggccacccattttgtagatgtacccatgataagtataccttttcttaaaaagaagagagtaagctacgaactctgacgatttagctctagaggaagatttcctacatgatagctctagctctaccaccgtgtgtagtccattaaagggaatgccagttgcatgtacaaagtctgttgatgcctatttttttcaatgtttcatcacccactaaataagaacatattcataaaagagttcgtattactaggtttcatgctttatttttcttgtgattccttcactcaagaccaggtatgaagaatttttcttaaggcagttctttggtcgtgaatacgaagaatacgcacagaaagtgcactcaggattaccttttatagaatgaaagtttcaaacttacaaagtatgttttcaggtccttgcctcctaagtttcattttgtatcgtatacttcatattatcaggttgaacagatatatttctttagttaaccaaccatgaggatttgtcacttaatattggtggataccgtctttatcattagtgtaataaaagtaaaatgtttaagcctttagtctttctttaaaggcaataatacaagtgccttttagtactttgaaggaaatcttgtgttcgtactttgtatacattaaatttacgctgctaccttttcacctgtttgaatataatgttaagtctgtcagcacatttgttgagtgacaatcagtattttaaataactagcttttggaaatggcatgattaccatttcaataaacatacattaccatttgctgttgggttcactagcaaaacaggctctttggccaaattttttttaacgtatacggacacacatttgaagtattaaacgtagactaataacaaaacaaattacggattctgcctataaactgcgagacgaatctattaagcctaattgatccgtcattagcaaatgtttactgtagtaccacattgtcaaaccatggcgtaattagactcaaaagattcgtctcacaatttacatgcaaaccatgcaattggtttttttttggtccacatttaatgctccatgcatgtgtccaaatatttgatgtgacggaatttttggaagtttgaagggaactaaacacggcctttgaactttttttcctctactaggagacattggaaactgctaatgctgttcttttttgggtacaggtgtgcttacctcccgctggcatcatcattgatgtgccagagtacaggactaaacaacatgcaatgagaagataacaaactagccatatggattgcatacaatacaagacaagtcttatttttgtaatctgggttcaaacggatgaattatttcctcagctcatcaatgtgcaaatgtgacaattgttgcgctggtcatttggtgtgaaaaaaagaaaaagttaaagcccctcgttacagataagatttgttaagccatgccattcattcgatttgaagaggaatggctcctgtgtggtgttgattgtctcctgtagttttgttgcgtcaaagtttttccatagcaaatgatgtgtaacattccaggtggaactcctttatttgttccatgaaatctgaaaagcatttgg

SEQ ID NO: 15462 - DNA, 1525 bp, Oryza sativa
  ref <308>: DATABASE ACCESSION NUMBER: AK065983
  ref <309>: DATABASE ENTRY DATE: 2001-12-06
gatcagcctctcactctttcctcctctcctctctctctcaccgacgggagctgtgcggcgtggcgggctcggcggcgacccgcatcggtgactcagcggcggcgtcgcggcgagccgctgggcaggaaggtgctcaagtggcttcccgtggagcgccgtgtcacgacccaaatccgttggcgaagctcaccggagttgagggaccgatcgattgcttggaagatgggaagaacagaagggaagcggaggaggaaggaagacaagacagagttgcttcagagtctgtcagagaggcggtcgtgacacgccgatgggtcgagcactcatccgccatcatcgagccacaacatttctgatgaaaagagaaggatgcaagcttgcagttgctctgttgcagatatgaattgcaagctacagaaggttgtgtgccactgcgttcaaagatcccatagactagaaagataagtgtcattttcccaccttcttactaccttttcctattcttgaacacaaacatttgctacctcaaaatgatttttattcatgtgatccctaagaatattggcatgcagtctgcatacattagatgcttacaccaatactttaattagtagttattaagaaccacctgtaaacaaattacattcatgtaggtgatgactgatgaatgagagtgagtgcatcatgcactgtgcatgttcatgctcaatttctgggcaaagagatcaacttgcatctggcaatcaaactagatatctattccattatctaaacatcttgccatgagctaatctgctaaaacagagaagtaatctgctacttctactgtatcttctttcacactgtaattcatttagttcagttcagtgcgctttacagaagcaagcaatttagcattcagcatttctgcttcaattagctggtgaagaatctgatcctgatcagaggctaccctttagactttagcttgctggtttgattccaatccttggttggatgagtggtccaaatttacccagttccaccagtagttttaacttagcctgaaattaattaacttaagagtttctttcctgtagtgataaagctgcatccagtactgcatttctctgtacttctctctctactgtatactatgtcagcttgttgagaactagattagatttctctcctctgtatactgcatttcagtactgcatttctctgtacttacaatgatgtctgttgggtaggatcttgtaaagggtaaagatacattgatgccattggttgattttcaagagaagaaatgtacaggatggaggcagctgaagattttgccatctggagtggtgaaatatctcagaaatacatgctatgaacatttggcaaccttagaatcagatatctttgctagtttgatacaacatatccttgtaggtgattgttgatggtgcatgcagtttgttgaaacctttgtttttttcggtttgtaagacttctgtaatggtgcattatcagaagaaccagttgctatatgggttgc

SEQ ID NO: 15463 - DNA, 1962 bp, Oryza sativa
  ref <308>: DATABASE ACCESSION NUMBER: AK065984
  ref <309>: DATABASE ENTRY DATE: 2001-12-06
gatgattctacagacgacgacgacgacactgacagctgctcgactcctctaccacctcccccgccaccaggggttgagtgggagtacttggaaccttttgcaatgcgtcccttaaattttccatcttcattggctgataggattgataaagaagcggcctcacaggtgaccatggatgatgataactgggtggagactaacacagaatttgatggatatgacgatgaaagtgtgtctggtaatgttgaaggcattgtgagcagtgtccagttgaatcaagccaagagtagggctctaggtgatgacaattcatcaatggttagctgggtgacaaaggactcagacacttcagcgatggcctggaggagtaagaagtcgctggcaggaattgccaaggagattgatgaatacttcttgaaagcagcggcgagtgggagtgacatcgtcatacttttggactcttctggtgggcagccagatccctcagagttagaggcaaacagaggaaaaaattccaaatccgccaaggttttttccacaatttcttggagctggtcattcaaatctgcgcaagctaatagacaatcctcaatgcattcaagtgatgcctctggatatggttaccatggcaaaacactagagaaactttatgaagaggagcaaaaactctacaagttagtcaaggatgaagaatttgcaaggctccagtacagaaagaacacctcgttgctacaaagactagaatcaggtgaccatgataaattgcatgcagagaaagtgcgagataatatagaggaattgcaagctcggataatctctttggaggaagctgttggtttgacatgtttgtccatatcaaagctcagagatgaggagttatatcctcagattattgaattatctgcagggcttgtgcatatgtggagaaacatgtatgagtgccatcaggttcagaaccacattgcccagcaagccaatcttctaggcaatttaccagggaatgaaccaacaactgacactcattgtcaggcaacatctcagctggaagttgaagtttctgcatggcatagttcattctgcaatctcatcaccttacagcgtgactacgtaaccatccttaaccagtggattaaactcactgattgcctgcctgataacgatggctttatgaaaagttcgtcaggaattcgtagtctctgtgcagaactccagcgagctcttacaggattacctgagaaggtagctgcagaagcaataaagacttttctgtcagttatacacactatagttgtacagcagactgaggagcgtcaactgaagaaaaagtccgaccaaatcgagagcaagttccatacccagttagagaaacacagcaacaatgcaacccaaaattcgggccagcctacacttgcaaagctggacacgttcaaaaagcaggttgaagagagaaggctaggtatctgaactccgtgaggactagtcgagccatgacactgaacaatcttcagacgagccttccaaatgtgttccatgctctgatggggttttccggagtatgcgtgcaggcgttcgaaggtatcagtagatgcagtgagattgtcgccagccactcgggagcagtttcacctgccatttcttcgtgactgcatccggcatggttcgttgtgattgttcattgtaagtaggcaaagaaactggttctacgtgaatacacttctcttccaaaacttaaaaagggaaagaatttagcgacgattttaagtcagtacaggcatagtagtcttttgaatagatcaacatagtctcgatttgggaagaggtggatgtctatgaggttactgggaaatgattcatgtgtaactagatacttgaacagttgaacagtagtctgttgctgcatgttctcaacttctcaattctcattatatgatgctattttctatttctcaacaatacagttcc

SEQ ID NO: 15464 - DNA, 2737 bp, Oryza sativa
  ref <308>: DATABASE ACCESSION NUMBER: AK065985
  ref <309>: DATABASE ENTRY DATE: 2001-12-06
gggctccttctcgcgctacccagcgaacagccgccgcttccagtcatcctctttgtgtgagcggccaccatcggcgcatcgtcttcccgccgtcgccgcaccatcatttcgccgtcgatttgctgtcaccatacccatgtagctgccatcgctgcatccatcaatagggaggtcccggcctcctcgccggcaggtcgtgctgagcggaggcgaggggaaaccggcggccgcccctcctcctgcacccggcaccgtgacggcgatggtggcgcagatcgactcaagaaactggcaggggccgtatgagcgcgggaggctgttgaggagggcagcgacccgatttggagagggagcagcccggtcggtgccattggcgtcgtcggatttggtgctgtcgtgccccttgcggcgtgccggcgcgtcatccgtctctggaaatcggggagaagatttgcatgggttagatcgcagtttcaaaggttcttgattgtttttcgtaataagtgcaagagctgctgatgtgatttggcagctctgatcggttctgtgggtagttgttcgttgttattattgctgctttaggagatttcggatttcagttagtgttcttggtggtagccagtgtgatctctcttattgctgatcgtctgtcgttccagtccccgtcgttctttcgtcgaagactcgaagattccaaatggcgcacatactcatctcacagctgtcatgtggtgattcaaacatacgaattaaggcaagagtttctaggctatgggactttcatgatctcaatgatgatagaaaaattgtgcacactgatcttgtcttactggatgaaacggggaacagcatacatgctcaaatgtatcagcatgtaatagtgaacttgaaacctcttctccaagaaggaaaagtttactacattgattcattcactgtcagatatgcaaataggacatataggccagttgcacatagcctaatgatcctattcactaaatggacaactttagaagaatgtgtcgatgtgcctgctgatttccctgctataacattttcattgacaccttttggagatgttccctctcttgtggacaaaaacatcttttatgttgatattatgggtgttatcgctgaaattggcacaacgtctactgtacgtcctcagtcaaggaacactgacagtttaaaaagaacactataaatatgtgatgcaagcaattccacactacctctcacactttgtggagagcgagcaactgctttcgatgctgagaatatctacaatgctggccaaagacaacctcaggtggttgtgtttgttggcacgcttgtcaagaactacaaaggcttagggcttacactgactggaagctccccatgcaaatggtacattaactttgaaatacctgaagtagtggaactgaaagaaagctttagcaccaactttcagccaatcaggtggaacgacgctcctcctgcaggattcaaccaaagcaacccacaagaaaagacacttaaagacattcttgaccttaatcctcataaacataaggaagcacgcttcatagtaaatgtggttgttaaaagaatatgcaacgaaaactcctagtggtacaattcatgtcacctatgctacaaaacctcaaaaccatatggctcagcctacaagtgcaccagttgttcctatataggaataccagatcaaagatgcaacatttattctttttggaaaaactgcgcaacgcatcatacgaaggccagtggaatctctgatcgaagaaaatccaccggacagtgaattcattccaagggaaatcttagcacttgttgacaatggttttctatggaatgtcagcttcacaaaggatattaacagaagcgaagaaactctccaggttaatagtgttatatcctctggtccagcaaatcaaccaccgctgcttatgtcgccaagtacttcacagccagcatcagcaattgtatcggcaagctcaagcagttctctccagacagcaccaacaccaagtgaaacaagcaccgaatcgcaattagccatcataccagcacagggcacttcaacaccaacaaaatacactcctgctgctgcaacagatgagacaccaactagcaaatcaagctccttagtatttaccaaaaaaagcattattgtctcaggctactctatgccatctcacactgcaaagacctctactgatactaaggcaaaaattggcactcatcatgaagagaagatctcacaaagtgcatctttaactacaattgttccccgtgatacttcggataaggcaaaggtcaccgctgaatctccagatgagtctccacaggcagatccttcactggcgccaaagagcacacccaaaaaaagaggtagacctacagaaaccaccacaattgccaaaaaattgttcaaggatagtacccagaagaaacccactgacagtgaatgagacggatatatgtagtccatcagcaagtcttttgtgtatatgtacagaacgaaccacccaagctagaagtgtagaagcaacaagttagctgcaagcctagaggaggctaagaagcaagcccttttgttcatgacccctaggtcatgattatcattgtaaataagtaatgttatgtttaccttccttgccaccttctgtgctatgaaatgttgttcgaacaactactacttatatggaaccaatatagttatggctgcgtactacct

SEQ ID NO: 15465 - DNA, 1178 bp, Oryza sativa
  ref <308>: DATABASE ACCESSION NUMBER: AK065986
  ref <309>: DATABASE ENTRY DATE: 2001-12-06
gtttagtttgctccaagcgcaagcgcaagcggcggagaggaagccatagccacctcccaccacgccttggcctttccattacctacgccttcccttcccttcccttcccttcgcgcgctacttggaattggattagccatagccatggacgccacgctgctccgctccgccgatgccgccgtcgccgtccgctccaccaccactgcgcctccgcctcgccctcgcctccaccgccccagtaccctccccctcccgtcctcctgcgcctgcgggcccctccgcgcctacgccgctcccgctgcccccgcgcccgccgcgcacaacaacggagtctacacagttggtgacttcatgaccaaaaggcctaatctccatgtcgttacacctgcaacctcggttgatgaagctctcgagacgctggtgcaacacaagatctctggtttccctgttgttgatgacaccggaaagttggtgggtgttgtctcagattatgatctgttagcacttgactcaatatcaggaagtggactgactggcacaaacacaagcatgtttcctgaggtggatagtacttggaagacatttcgcgagatacagagactcttgagcaaaaccaatggcaaagtcatcgctgatgtgatgacttattcgcctcttgcggttcgtgaaagtaccaaccttgatgctgctacaaggttgctacttgaaaccaaatatcgcagattgcctgttgttgatagcactggtaaattggttgggatgatcacaagggggactgttgtcagagctgccctcaaaataaagaagacagctgaagaaactgcttaaattagacagtgtagatgattctttataagtcatttctgggactgcagtcacttggaaatttagtccactgaaacattatttggtgaaatgaactacatcagccttacagatactgcgaattcgacagtcaattcttcttggaacatagatggatataggtattgtattgttgcagatatttggaatatagccgcaatctgtttggggccaccagatttggtcgcctctccttattaggtagcataacatggagaatgttattatttttatttttacttttatcattgacttgtattcaagaacatcagtgtattgaaatgtaacacttctgatatgatgataccttccgc

SEQ ID NO: 15466 - DNA, 1599 bp, Oryza sativa
  ref <308>: DATABASE ACCESSION NUMBER: AK065987
  ref <309>: DATABASE ENTRY DATE: 2001-12-06
gatcaatggcgaaaccgacggtggtggtgctgcccgtgtggggcgccggccacttcatgcccatgatcgaggccggcaagcggctgctccgcggcagcggcggcgcgctgtcggtcaccgtgctcctcatgccagcgccgacgccggatgcggcggtcgacatcgcggcccaggtgaagcgcgaggaggcctccggcgccgacgacatcagcttccggcacctccccgccgtcgacatgccgaccggccacaccggcgtcgaggagtggatctcccgcatactgcggagccacgcgcccaacgtgtgggccgccatcgccgggctcgactgccccgtggccgcgctcgtcaccgacatcttctgcacgccggcgctcgaggtgtcccgggagctcggcgtgccgggctacgtgtacttcccctgcagcgcgtcgatgctggcgctgctgctgcgctcgccggggctcgacgaggaggtggccgtcgagttcgaggagatggacggcgcgatccgcatccccgggctgccgccggtgccgccgtccgcgctcccgtcgacgatgctggacaggaagaagtcgacgtacgactggttcgtcgccaccggcaggggctacatgaacgccaccggcgtcatcgtcaacacggcggccgagctcgagcagagcgtcctcgccgccatcgccgacggccggtgcacgcgcggggtccccgcgccgacggtgtacacgatcggcccggtgctctccttccccccgccgccggaggagcagccgcacgagtgcgtgcggtggctcgacgcgcagcccccggcgtccgtgctcttcctctgcttcggcagcaaggggctcctgccgccgcccaaggtgcgggagatagccgccgcgctggaacgcagcggcggccaccgcttcctgtgggtgctgcgcggcccgcccaaggacagccggcaggggcagcgggtgcccacggacgccatgctcgacgagctcctccccgaggggttcttggagaggaccaaggggagggggctcgtgtggccgacgcgggcgccgcagaaggagatcctcgcgcacgccgccgtgggcgggttcgtgacccactgcgggtggaactccatcctggagagcctctggttcggcgtgccggtgctgccatggccgctcgacgccgagcagcacttcaacgcgttcaccctggtcgcccacctgggcgtcgccgtgccgctcggcatggacaggaggcgggacaacttcgtggaggcggcggagctggagcgcgcggtgaggtcgctgatggacgacgcgtcggacgaggggaggaaggcgagggcgaaggcggcggagacgagggccgtttgccggaaggccgtggaggagggcgggtcgtcgtccacggcgttccagaggctcaccgacgatatcgtccgaaggggtgccgttcaaatccgttaagtttgctggtttcaccgcagattatgtgcgcgcgcaatgagtcctctttactcaatccattcgatgtctcatgttgtgaacttgtgattcctgttggttgatccgtttggtatggtgtcgaataaaataaaggggaaataattct

SEQ ID NO: 15467 - DNA, 4446 bp, Oryza sativa
  ref <308>: DATABASE ACCESSION NUMBER: AK065988
  ref <309>: DATABASE ENTRY DATE: 2001-12-06
gtgtcgtcggaggacggcggcgccggcggggagaaggtggaggtggacgtggggaggctgggggcgagggagagcagggcgctgatcgagcggctggtccgcgccgccgacgacgaccacgagcggttcctcctcaagctccgggagcggatggaccgcgtggggatcgactaccccaccatcgaggtgcggttcgagaacctcgaggtggaggccgacgtccacgtcggcaaccgcggcctccccaccctcctcaactccgtcaccaacaccgtcgaggcaatcgggaacgcgctccacatcctccccaacaagaagcagccgatgaccgtcctccatgacgtcagcgggatcatcaagccccggaggatgaccttgctgctgggacctcctggctcgggcaagaccacgttgctcctggcgttggcagggaagctcgacaaggacctcaaggtctcggggaaggtgacctacaatggacacgggatgcacgagttcgtcccggaaaggaccgcggcgtacatcagccagcatgatctccacatcggggagatgaccgtgagggagacattggccttctcggcgcggtgccaaggcgttggcactagatatgaaatgctgactgagttggcaagaagggaaaaggcagcaaacatcaagccagatcatgatattgatatctacatgaaggcctcagctatgggaggacaagaatctagtgttgttacggactacatattgaagatattaggattggatatttgtgctgatacggtagtaggaaatgagatgttaaggggtatatctggtggacaacggaagcgtgtcacaacaggtgaaatgcttgttggtccagcaagagctttgttcatggatgagatatccactggactggacagctcaaccacgtaccagatcgtgaattcccttaggcagactatccacatccttggcggaactgctgtcatctcattgctccagccagcacctgaaacatacaacttgtttgatgacattatactcctctctgacgggcaggttgtgtaccagggtccccgtgaacatgtgcttgagttctttgagttcatgggcttcagatgccctgccagaaagggtgttgctgatttcttgcaggaggtgacatcaaggaaagatcaggggcagtactggtgtaggcgtgacagaccataccgttttgtgccagtgaagcaattcgcagatgcgttccgttccttccatgtgggccgatccatacagaatgagctttctgagccatttgataggaccaggagccaccctgctgctctggctacttcaaagtatggtgtcagcaggaaggagttgctcaaagccactatcgatagagagcttcttctcatgaagaggaatgcatttatgtacatttttaaagctgttaatctaactctaatggcattgatcgtgatgaccacatttttccgtaccagcatgcgacatgatagagattatggaatgatctatctgggggcattgtactttgctcttgacacagtcatgtttaatggtttcgcagagcttgccatgactgtcatgaaactacctgttttcttcaagcaaagggatcttctcttctttcctgcatgggcctacaccataccatcatggattcttcagattcctatcacatttctcgaagttggtgtttatgttttcataacatactatgtcattggatttgatcccagtgtaagcaggttcttcaagcagtatctgctgctacttgcactcaaccagatgtcatctgcactattccgcttcattgctggaatcggaagagacatggttgtgtctcacacatttggacccttatcactgttggcttttgcagcattgggtggctttatccttgcaagacctgacgtgaagaaatggtggatttggggttactggatatccccgctatcgtatgcacaaaatgctatttcgacaaatgaatttttgggtcacagttggagccaaatacttcctggagaaaatgtgaccttgggagttagtgtactaaaatctcgtggtatctttactgaagctaagtggtactggattggacttggtgctttgcttggatacactctcctctttaacctgctctacactgtagctctttcagttttgagtccattcactgactctcatgcatcaatgtctgaggacgcattgaaagagaagcatgccaacttaaccggtgaagttgtagagggacagaaggacactaaatctaggaagcaggaattggaattgtcccatattgctgaccaaaactctggaattaacagcgctgattctagcgcaagcaggaagggaatggtgctcccatttgcaccactatctattagttttaacgacgtaagatactcagtggacatgccagaggcaatgaaagcacaaggcataacagaagaccgtttgttgcttctaaagggtgttagtggttctttcaggccaggtgtacttactgcattgatgggtgtaagtggtgccgggaagacaacactgatggatgttttagcagggagaaaaactggaggatacatagagggagatattagaatatctggctatccaaagaagcaagagacctttgcacgtatatcacgatattgtgagcaaaatgacatccattctccccatgtgacagtatatgaatcacttgtgttctctgcatggctgcggctaccctcggaggttgattcagaagcaagaaagatgtttattgaggaggtcatggatcttgtagagctcacatctctgaggggagcacttgttgggcttcctggagtgagcggcctgtcaactgagcaacgcaagagacttactattgctgtggagcttgttgcaaacccttcaattatttttatggatgagccaacatctggtcttgatgctcgggcagctgcgattgtgatgaggaccgtaaggaacaccgttaacactggcaggactgttgtttgtaccattcaccagccaagtattgacatctttgaagcatttgatgagcttttcctaatgaagagaggaggtgaagagatatatgttggtccagtgggccagaattcctcaaaactgattgagtactttgagggaattgatggcgttagtaggataaaagatggatataatccagcaacatggatgttggaagtgacctcttcagcccaggaggagatgctcggtgttgattttagtgaaatctacaggcagtcagagttatatcaaaggaacaaggaacttattgaggagctaagcacaccacctcctggctctactgatctcaacttccctacgcagtactctagatcgttcattacacagtgcctagcttgcttgtggaagcagaattggtcatattggaggaatccatcctacactgcagtgagattactcttcactatcgtcattgccctaatgtttggaacaatgttctggaaccttggaacgagaactaaaaaacaacaggatctattcaatgccatgggatcaatgtatgctgcagttctctacattggagtgcaaaactctggttctgttcaaccagtggtggtggtggagcgaacagtcttttaccgagaaagagcagctggcatgtattcagctttcccgtatgcatttggacaggttgcaattgagttaccatacatcatggttcagactctgatatatggcgtgctggtatactcaatgattggatttgagtggactgttgccaagttcttgtggtacttgttcttcatgtacttcacactgctatatttcacattttacggaatgacggcggtagggttgacaccaaatgagagcatagcagcaatcatctcgtccgctttctacaatgtgtggaacctcttctcaggatatctgatccctcgaccgaaaatccctgtttggtggaggtggtactgttggatttgcccggttgcatggactttgtatggattagttgcttcccagtttggtgatatccaacatgtgctcgaaggcgacaccagaactgttgcacagtttgtcactgattactttggcttccatcataacttcctgtgggtggtggccgtggtgcacgtcgtcttcgccgtgaccttcgccttcctcttcagttttgcgatcatgaagttcaacttccagaggagatgagaaagtgatcattcttttttgcattcgttctattgtactactgaatagctattagctatcctgtaaatggtatagagatcatcttctagtatttcattatttcaagcatgtaaaaattcggacatctagtaggattctctaggaaaaagaacccttgttgagcttcctgcctcttgaccagctctagctgataaatgtcggatgcagatgaatgtaaagtatggccttcaatgttttcatttttgtcgaattaatgaaagcagaaaatttgttgattct

SEQ ID NO: 15468 - DNA, 1796 bp, Oryza sativa
  ref <308>: DATABASE ACCESSION NUMBER: AK065989
  ref <309>: DATABASE ENTRY DATE: 2001-12-06
gaaccccaagtccattctctcgttcccaaaccctgcatccttctctttcacacaagcctctctctcgccggcttcggcgtccgtctcctcctcctcctcttcgtctagccttgtggcggcgtgcggtgcggtgcggtgaggaaaggagggagctttgaaggtcgggggagggcggaggagatgtctgaggtgtccgttatggccgaggtggaggagacggcggcggcggcgccgctggacctgccgccggggttcaggttccaccccaccgacgaggagatcgtctcgcactacctcacccccaaggccctcaaccaccgcttctcctccggcgtcatcggcgacgtcgacctcaacaagtgcgagccatggcacctcccagccatggcgaagatgggggagaaggagtggtacttcttctgccacaaggaccgcaagtacccgaccgggacgaggacgaaccgggcgacggagagcggctactggaaggccaccggcaaggacaaggagatcttccgcgggaggggcatcctcgtcggcatgaagaagacgctcgtcttctacctcggccgcgcgccccgtggcgagaagaccggctgggtgatgcacgagttccgcctcgagggcaagctccccagccagctcccgcgctccgccaaggaccagtgggcggtgtgcaaggtgttcaacaaggagttggcgctggcggcgaagaacgggccaatggcggtgaccgaagcgaccgccgacgacgcggggatcgagcgggtcggctcgttcagcttcctcagcgacttcatcgaccccgccgagctgccgccgctgatggacccttccttcgtcgccgacatcgacggggtggacgacgccaaggtgtccgcgtcgacctccgggcaggccgcgatcgccgccggcttccatgtcgcgtcgcaggtcatgagctaccagcaggtcaagatggaagagccgttgccgctgccgtacctgcaccagcagccgccgcggatgctgcactcgggtcagtacttctcgctcccggcggtgcaccccggcgacctgacgccgtcggcgatccggaggtactgcaaggcggagcaggtctcggggcagacgtcggcgctcagcgcctcgcgcgacaccgggctcagcaccgaccccaacgccgccggctgcgcggagatctcgtcggcgccgacgtcccagccgttcccggagttcgacgacgggattctgggcctcgacgacttctggaactaatccactcctgaatgatccggagctagctccctaccgaccttgcgctacaggattttgcttcaggctggttgattaattacttgatttgattaattaacttggtgtttcatgcttgggttaattagtggcagtttgttgatgcatccttctcttcctccttccgatcgaaggcttcttctcgggatgggttcggatgatcagattatttatcatccatccagacctccagggattagctaggactccttgttaattaatcctagctagctaggtttcttcatgtcttgatctgatgtaaatacaattactactactaagtacggggtatcctgattgtgtctagtagcatgatgattgattatactacaatcaatggggtgtagattaggggtggattgatcatttacgaattgattaatttggcatttgatgagccagctagctgctagctttataaagctttatactatgtacatgtaccattaattgcttgagctagacatctcatcatatgtgaattgatgcttcggtttagcctt

SEQ ID NO: 15469 - DNA, 3113 bp, Oryza sativa
  ref <308>: DATABASE ACCESSION NUMBER: AK065990
  ref <309>: DATABASE ENTRY DATE: 2001-12-06
gctgtctttcccgtcggacatcgcaacggttcttctcgctgcaggatcaactgtcaccatccaggtggccgccaagaggatgtgcatcactctggaggagttcttgaagcagcctccatgtgattccaggacgttgttggtcagcatctctatcccggattggggttcagatgatggcatcacctttgagtcgtttcgtgcggctcctcgtccacttggcaatgctgtgtcatatgttaattctgcattcttggcaagaagttcagtggatggatcatcagggagccatctcattgaggatgtttgcttggcatttggcgccttcggggccgaacacgccatcagagctagggaggttgaggagttcttgaagggaaaattggttagtgcaccagtgatacttgaagcagttcggcttcttaaaggtgttgtttcaccagctgaaggcacaacacatcctgaatacagagtcagcttggccgtcagttatctgttcagattcctgacttcccttgctaatggcttggatgagcctgaaaatgctaatgttcccaatggttcatgtactaatggaaccgcaaacggtagcgctaattcctctccggagaagcactaaaatgttgacagctctgatttgccaataaaatcaaggcaagagatggttttctctgatgaatacaaacctgttggaaagccgatcgagaaaaccggagcagagctccaagcttctggagaggcagtgtatgttgatgacatccctgctccgaaggattgcctctatggagcatttatctatagcacacaccctcacgctcacataaaagatataaacttcagatcatctttggcttcacagaaggtcatcacagttatcactgcaaaggacattcctaccggtggagaaaatattggatcatgcttcccaatgcttggagatgaagcgcttttcgttcatcctgtttctgaatttgccggccagaatattggtgttgtgattgctgaaacacaaaagtatgcctatatggcggcgaagcaagctgtgatcgaatatagtaccgaaaatcttcagccaccaattctgacaatagaagatgctgtccagcataacagctacttcccagttcccccatttttagctcctacgccaattggtgacttcaaccaagctatgtctgaagctgatcacaagatcatagatggggaggtgaaacttgaatcccagtactatttctacatggagacacagacggccttagctatccctgatgaagataactgtataaccctctatgtgtcggcgcaactacctgagattactcaaaatactgttgcgaggtgccttggcattccatatcacaatgtccgtatcatcacgagaagagttggaggaggttttggtggaaaggcaatgaaagcaatacatgttgccgctgcatgtgctgtcgccgcattcaagctgcggcgtccggttcgaatgtacctcgatcgcaagacagacatgatcatggcgggagggcggcatccgatgaaggtaaagtactccgtcggtttcaagtccgacggcaagatcacgggtctgcactttgatcttggaatgaacggcggaatatcgccggattgcagcccggtgttgccagtcgccattgtcggggctctgaagaagtacaactggggcgctctctccttcgacatcaaggtctgcaagacgaacgtctcgtcgaagtcggcgatgcgggctcccggcgacgcgcacggctcgttcatcgccgaggccatcgtcgaacacatcgcgtccactctctcagtggacacgaacgccatcaggaggaagaacctccacgacttcgagagcctcaaggtgttttatgggaatagcgccggtgatccttcgacgtacagtctcgtcaccatcttcgacaagctggcctcgtcgccggagtaccagcagagggccgccatggtcgagcacttcaacgccggcaacaggtggaagaagcggggcatttcttgcgtgccgatcacctacgacgtgaggctccggccaactccggggaaggtgtccatcatgaacgacggctccatcgccgttgaggtcggcggcgtcgagatcgggcaggggctgtggacgaaagtgaagcagatgacagcgttcgcgctgggccagctctgcgatgatggcggcgagggcctcatcgacaaggtccgtgtcatccaggccgacaccctgagcatgatccagggaggcttcaccggtgggagcacgacctccgagactagctgcgaggctgttcggaagtcgtgcgccgccctcgtggagaggttgaagcccatcaaagagaaggctggcacgccaccatggaaatcccttattgcccaggcaagcatggcgagtgtgaagctgacagagcacgcgtactggacgcctgaccccacgttcactagctacttgaactatggagctgcaattagtgaggtggaagtcgatgtgctgacgggagaaaccaccatcctgaggagcgacctcgtgtacgactgtgggcagagcctgaatcctgctgtggacttgggccaggtggaaggcgcattcgtgcaagggatcggcttcttcacgaacgaggagtacacgaccaactccgatgggctggtcatcaacgacggcacgtggacgtacaagatccccaccgtggacaccatccccaagcagttcaacgtcgagctcatcaacagcgcccgcgatcacaagcgcgtcctctcctccaaagcgtccggtgagccgccgctgctgctggcgtcgtcggtgcactgcgcgatgagggaggcgatcagggcggccaggaaggagttcgccggcgccggaggctcgccgctgacgttccagatggacgtgccggcgacgatgccgatcgtcaaggagctctgcggccttgacgtcgtggagagatatctcgagagctttgctgccaaagcctagagatagaagggttctttggcttagctttgtataaacaccaacaataatctgcgcctggatttgtgttgatgtggtatatatgtacagaacaaaaggtgtttttttgggaaaaataaaatcatatggatggtattgttctatc

SEQ ID NO: 15470 - DNA, 1948 bp, Oryza sativa
  ref <308>: DATABASE ACCESSION NUMBER: AK065991
  ref <309>: DATABASE ENTRY DATE: 2001-12-06
gcagcgccatcgcgatgccacctcccgccgtgagcacggcgccggtagctccggtcgtcgcgtcgtcgtcatcggcggcggcggcggcgccccgtagacctcgctcgctccgcctccgcgtgaccccgtacgcctccgtatcctcgtcgtcctccccttccaccttcgccgtctccatcccaccgccgcctccagcgaggcattcccgcaagcagctggtgggcagggacggcgcccccgcgaagcccgcgaaacctcgggtgttcttcctcgacgtcaaccctctctgcttccgcggatcccagcgcagcctcggcgccttcgcgcgctggctcgcgctcttcttcgcgcacgtcagcctccgcgaccccgtcgtcgccgttttggacggggagggcgggaacgagtaccggcggcggctgctaccgtcctacaaggcgcaccgacctcgtggccctggtacaggcgccgattcgcgcgttatcgatgttcttcgcgagtgcaatgttccggtcgtcagagtcgatgggtatgaggcagatgatgtagtggctaccttaacagagcaagttttacagaaaggttttagagttgtcattggctcaccagataaagacttcaagcagctgatatctgaagatgttcagttagttatgcccattcctgagattggccgttggtccttttatacgctgaggcattatgttgcacagtacaagtgtgacccaaccgcagatttgagcctcaggtgcttcataggtgatgaagcagatggtattccaggaatacagcaccttgttcctggttttggtcggaaaactgcagtgaaacttctaaagaaacatggttcattggaaaatttgcttaatacagctgcagttagaactgttggcaaggactatgcccaggatgctctagttaagcatgcagattacctgcggaaaaattatgaagttctcagcttgaagaggtatgcttttttcagtaatcatgaatattcaaatcttatgtctggttgtcctacattgttataagtacttaatgtcttcattctttgttgccatatagatggtttaatgccctactgagctgcagagcttacctacagtttcttttatcaagtctatcttgaagtgtaggtagcactcctaatagcaaatgaacttatgctttctcctagcacagggatgtaaaagttcagcttgatgacagatggttatccacaagggactcttgcaacgacagcagtgttttgtctgacttcatccttaaatttaacgaagggcagaatatcagaggaaattagtgtattcttggatccatcaaataactccttgctacgggattcctgataagttattcttcttttagcggcctattgttgtagtatcatttcagaaatgcagttcattatagatgcagagtagaaatcgcattgccagcattacagtcgttttcccccaagtcactcatgccctgggctagatatagcatacgtgagatgtactgcctcttcagtttggttaatgttgtagtctagtgctaggactgtaattttgtatcagtagccgttcaaggttctagaagagcaaggagtagtatctaaccaagtaccaacccacattttgataccaagtgcgtggttatgtgcaagctatactgagtcatcaaacagctgcctactcaattcttctcgtctgtcacactatcaacatagcttaaaccaagaagattcaagaagtagcaaagtgtgcattctgaagggcagtcgtgatgatatattgatatgaagtgtcctccgatgcttttagtgagaattggatcttcagggttttttctttctggcattctgcaatgttattaaggtgtagcggcagtttagggtactactccctccggtcacaaataaataacattttgaaatgcgtacaaccaatatgtttaaacc

SEQ ID NO: 15471 - DNA, 2145 bp, Oryza sativa
  ref <308>: DATABASE ACCESSION NUMBER: AK065992
  ref <309>: DATABASE ENTRY DATE: 2001-12-06
gattgattctccgacgattttgtccaacgctacgagaatggtcctgtacttaattcactctggacttctggagagccaggaacaccacaagtttgagataaaagcataaggcagtgcaagtcgcagccgtggcagatggacgccacgacgagcagtggagcttcctcctctctacccctccaccttatcatagatgatgctcttgcccttgtttctccgttgcagcagtcgtttcagaggtcacagcgccattgctttggtggctctgctcctggagaattccccttggctgcaaacccatcaattgtcctccatgtcctcacatcatgcaatctggaacctgatgacctcgctcacttggaggcaacatgctcgtttttccggaagcctgccaatttccctcccgattttcagttgtcaatgtcagaactcgcagcgttggatatgtgccagaaacgggcgatatttaaacctatgactcaacaagaaagagaaatgtttaagcaacgttgcggcgggagttggaagctggttcttaggtttataatggcaggtgaagcatgttgccggagggaaaaatctcaggcaatcgctggacctggtcacagcatcgctgtgacaacaagcggtgcagtgtatacttttgggtccaacagctctggtcaacttggccatggtagtttagaagaggagtggaggccacggattatcagatcattgcagggtattagaattattcaagcggcagcaggagcaggacgcacaatgcttgttagtgatgctggtagggtctatgcatttggaaaggattcatttggagaagtggaatatgcagcccaaggttctagggttgtcaccacaccacagctggtggaatcattgaaggacatatacattgtccaggcagcaatcgggaacttctttactgcagttttatctcgggaaggtcatgtgtatacattttcttgggggaatgacatgaaacttggtcatcagacagagccaaatgatgttcagcctcatcttctagcaggccctcttgagaacattccagttgtgcagattgccgcaggctactgctatctcctggctctggcatgccaaccaagtggcatgtctgtttattctgttggttgtgggttaggtgggaaacttggccatggttctcgaaccgatgagaaataccctaggttaatcgagcagttccaagctttgaatatacaaccagtagtggttgctgctggtgcttggcatgctgctgttgtaggcaaggatgggcgtgtttgcacttggggatgggggcggtatggctgcttgggtcacggtaatgaggaatgtgagtctgttcctaaggttgttgagtccttagtcaatgtgagggctgtccatgtagcaactggagattacaccacatttgttgtatctgataaaggtgatgtttactcgtttggatgtggtgaatcatcaagtcttggccacaacactataactgagggtaataataggcacactaatgtccttagcccggagttggtgacttctttgaaaagaacaaatgaaagggttgctcagatcagcctcactaactccatttactggaatgcacatacatttgcactgacagattcaggaaaactctatgcgtttggtgcaggggacaaagggcagctaggtaccgaactcgtcgcgcaggaaagcgagagggggacaccggagcgtgttgaaattgacctcagttaggtccaaattgcaacgccacttcatctccttttctctccagatgcactcttctaacgttaactttcaaattgattgcattgcgcgccctttagcttgttggctgttcatcagcctcatcctgctctgcagctaatccttgtgaaaatagttaccatcaattaaacagtctgttgttcatatgattggttcggtttagaaactttgtatatatgattatcatgtaaatataacagtcaggtctcattgccagttcctttaaaacatgagtagctggcttttaacatcctgtgaaatttaccttaactctacatctgcaccatttatatttcttctaaacaggggtgtgtgtgtgtgtgagagagagatataataatatatatttatatatttatttctagttgattg

SEQ ID NO: 15472 - DNA, 3146 bp, Oryza sativa
  ref <308>: DATABASE ACCESSION NUMBER: AK065993
  ref <309>: DATABASE ENTRY DATE: 2001-12-06
ggggggagcggccgccgcctcccgtaagactgaggcagcaagaaccactccgccgccgcgccgcgccgagccgcgccgcgcggtctctcccggaaggccacctgctcgacggaatgtcccggaggaccaccaccaccaccgcgcggtgggtgccgcgacaagggcagaagggggagcccggtggctcaggccacgccgccgcccccgtcgaccgactcagcgccctcccggacacgctcctgcaccacgtcatgtcgttcctcaaggcgtgggaggtggtgcgcacctgcgtgctctcccgccgctggcgcgacctctgggcctccgcgccgtgcgtcgacatccgcctgcggggctccggccgcgacggcgccccaccggaggacttcggcaggttcgtgtaccgcctgttgctggcgcgggaggtgtcggcccctgtggatacgctccggctacggtcgagcaacggggaagaatatgccgagacctatgacaatgatgatgtcaatatctggatatgttctgcaatcaaacgcaatgttcgagtcattcaccttaatgggcatcgcaaggatgaactggtgctggagcacactgcttttgtctctcaccacctcaagatcttgaagctgtcgcacatcaaacttgatggcaagatcctcaagcagctctcttctcagtgcacttctctggaagacctggagcttaacaactgtccagttaatggtggtgagattctgtctgtctcgctgaagaaactgacgatggtcaagtgctcgatcactatggacctctcgatctgtgctccaaaccttgagttgctatgctgcatcaccccatattatcatgttcccttgttcgaaaacctgagctcactggttgccgccactatcatgcttgatgactctttcttacgccgtgatgaattcctctatgaggttgaagaggaaaccagtgatgatgaggatgacaataagactacatcagatcattgtgatagtaaaatggatgctgatagtgatgcctatgatgatgatgacaacgatgacatcctatatgatgaatatctgaacagccgtcatggtaatttggttgatgattacaattatggctctgatattgacagcgatgacgatctacatgaatatagtcagatagcacatgaatgtagaggtggacggtatggctactgccatgacagcaaacggcgtggtagttattatgagacatgcaagcttgctgattctttcagtggcaagtatttacttcgcagcctttcgagtgctagaagcttggagttattagctcattcaggggaggtatttcagaacctttttcttctgataaatttgtatctagtccttgtcttctgtatttgcattctaatacttatgataaatagcaaacgtagaactatcttgttttttttcttagtactattcctcttatcaactcaaaaggtgacactcaaaatcacaaataattgtgtgactgccatgttgcatccctgtttgctatcttactgaacagaatggggaagattcttgctaataaaaataaaaaatggtcctgctaatggatttgatttaatattgcctttgtactgctcctgtactttgtaaatatttgtaagtaagctttcaatctcaatattgagttctgggatacctacaaaataatactcctatatgacattgaaatcaataattataatttttatttgtatggaataagctaaatttcttgacatacgatttattcctcttttccatccaggtctataattcgacactttgatactttaataatattgtagaaaccttttgaggattatggttcacttgggaaaaacaaactttttcataacaagtgaataatttcagattttcggatgtccattgctaaatgttgtaggtgaataacctgggtcctagactttgtaacttctggaatatgtactttatatattattttcaagtggatactgtatgcattagcatggagtttattctttgcatatcttaatgatactcgtaagacagttcaatgtacatatttgctactgaatggtactaattcctggcagtatatcatttggttatttgttgtttatattattccatttatttagagtattaaatattttgcttgcgtgtacactgcgaaggtggtcatggttagggaactgagaaggtgctcaacatttggcaacttgaagactttatcccttggagagtggtgtatggctgctgagtttgatggattaattttcttacttcaggagtcacctaatttggagatgctttttcttaagcttgaattgagctatagtaacaaggaggcaataaatattggtttcgaactaaaggaaagatcgtttgcctgcaaaaatcttgaagtggtgaatatcagatgctctaaagatgatgaaagagtccatatgttagcagaaatctttgttgctaatgggttacccattgagaagatttatgtccgcaggacaggcagcacctgtgagtaattttttgcctatcaatttgtactctcagttcacaacatttatgttatttgattacattcttccggatctaattgttctttactaattaaaccaaaattaccttgttattgaatactatgtttaaatggtcaaatacaagcaacaagtaatgccttatagctttcctccagtcagcatgctctgttattctacctctatatttttgttccgtgtgataatcttaaatcataagccattggctctttgatatttcttacagacctccgtagcatgaaaattataagggaaatggccagggatgagctatgagaagctggggagtacgttctgtaatgcctataaacaccatggaagcagagaatttatgcagacattcaattaattgttcaaatcaatctgatgagtgcaaaaaaaaaaattctttttatagattctaagggcctgatgcaaacaaagttcgactacaagcatactgcttactcatccaaagctgtgatcgagcttacctgagaggttgagacgaagaatttttgagtaaaggagtaactatgtaattatttaggtaaattttagtattctcctcgatctgcacattcttccacttgagcatccacttttgatgggc

SEQ ID NO: 15473 - DNA, 1081 bp, Oryza sativa
  ref <308>: DATABASE ACCESSION NUMBER: AK065994
  ref <309>: DATABASE ENTRY DATE: 2001-12-06
tctccgtctccatccaacgccgacgactcgagcctcgacggcgacgaccccacaccggcggcggagatgaacgcgttccggctagccggggacatgacccacctcctcagcgtggtggtgctcctcctgaagatccacaccatcaagtcctgcgcaggcatatctctaaagacccaggagctatatgcacttgtgtttgctgctcgttacttggacctgttcattcattttatatctctgtataacactgtcatgaagttggtctttctggcaagttctttctcaatagtttggtacatgaggcggcataagattgtccgaagaacctatgacaaggatcatgacacctttcgtcatcacttcttagtgttgccatgtttggctctggccctccttattaatgagaggtttacttttagagaggttatgtgggtattctccatatatttagaagctgtagcaattctacctcaacttgtgttgctacagcgcacgaggaatattgacaacctgactggccaatatgtcttctttctaggtgcataccgtgtgctgtatatccttaactggatctaccgatacttcactgagccccatttcgttcattggataagctgggttgcgggcatcgtgcagactctcttgtatgctgacttcttctactattacataatgagctggaagaacaatgtgaagctggagctaccagcctgagctcatttttcatccaagataggctaggtaaaacttgttaaatagatagaaaggcatgatacaccaaggccactgctcctggttatgatatatgcatcttggtttcctgctctatcctcttgtttatttcttttcctatttgtcggatgagaggaaatccaagggtcaccttgtatcttgtaagacaattaagcacagagagatgagtaccaggacgttctgagttatgataggttttgagacacaatggaaatgctatcttttagtgtacaacgtggtatgatccttcagcttggaagaataaagtattctgtgttctgtcttcattttcatagaaactggaggctatgcgcagggtgttaattgc

SEQ ID NO: 15474 - DNA, 1308 bp, Oryza sativa
  ref <308>: DATABASE ACCESSION NUMBER: AK065995
  ref <309>: DATABASE ENTRY DATE: 2001-12-06
ggtgcgctacgctcgccgcgccgccgcgggtggggagatttgaccggcgttgactccgggatggacgggcggttcccgctgccgccggcgagcggaggggggcgggggcaccaccggcgggcgcactcggagacgttcctgcggctgcccgacgcggacctcctcctcgacccggagggggacttctccttctccgacctcgacttcccctccctctccgacgactccccggccatctccgacccgaccccgccgccgccgccgccgatggctgcgacccccgcgccggcgccgcggccaccgggtggggcgcacatgaggagcctctccctcgacaccgccttcttcgagggtttctcgttgcagggtgggggaggaggaggaggaggaggagggagtgggggaagtggtgggcataagaggagcgggtcgatggatggggtcaactcgccgttcgagggtgagtcggcgctctccggtgggctaccggactacgcgaagaaggccatgcccgcggagaggatcgccgagctcgcgctcatcgaccccaagcgcgcaaagagaattctggcgaacaggcagtcggctgcaaggtccaaggaaaggaagatcaagtacactagcgagctggagaggaaggtgcagacactgcagaccgaggccaccacgctgtctgcacagctcacgcttctccagagggatacatctggtttaactgccgagaatagagagctcaagctacggttgcagtccatggaagagcaagctaaactacgtgatgctctgaatgaagctctgcgagaagaagttcagcgacttaagatagcagcagggcaagctccaaacatgaacgggtaatcccttcaatgggtggactccaacagcagattccgccctattacacgcaacagcagcagcagcagcaacagatgccttatttaggcggccaccatgctcagcaacgccatccaagccatcagcagagctcatcaaatggcggccagtcgctgagtggtcagtccctaaacgactccatggatttcatgtgaggagaagaaactcgggggcccctattaaaccatataccaactgcagctcagcattgtaaagatagctaatgtacaatgtaatgcatatgaatcattgaatagggtagctagccgttctttgtaccagtaaacagaagtaattcttgtatgacataatcctccctttccccctttgttcattcctggattaatgcctagactgagttaactatgttaaccatttaacacttgtcttgtaaagtggtcgtttgtaacagcc

SEQ ID NO: 15475 - DNA, 1754 bp, Oryza sativa
  ref <308>: DATABASE ACCESSION NUMBER: AK065996
  ref <309>: DATABASE ENTRY DATE: 2001-12-06
gactgccgcatcgcaagctggagcagcgagcaccgtagcagcagcagcagcagcctcctggtacacactgcactacacagcgcagcagctagcgatagtgtatcgcacttactggatacgcagtcgagcatctccagcagcagcagcagcggagtgatcagcgatggagagcagcttggtcgacacagccgccgccactctctgcctggcggcggccgtcggcgggcggcgccgcgccggcagcttcttgaactgctcgtgctcctccaaagagtacagggtgagcgcatcctactccattgggcggatgctgagcggggtgaggtcggcggcgcgcaagaagctgttcaggagcgagccggccgacctgctggggatcagctggtcgccggactcgccgccgtccaacggcaccgacggcggccaccaccaccattggtggacggctctcgagaacaacttcgtcctcgagtcctccgaggacgagtacggcggggtcgtcgtggacgccgacaggctgccgtccgacaaggccgccttcgcgcgctcgctcgcggcgtcactctcctactggaagtccgtgggaaagaaaggggtttggctaaagttaccagtggatcgctcagagtttgttcctatagcagtgaaggaaggtttcaagtaccaccatgccgaggaagcatatgtgatgctgacatactggattcctcatgaagagccatgtatgctccctgcaaatgcatctcaccaggttggagttggggggtttgtgatcaacgatcaaatggaggtcctagtggtgcaagaaaagtactgtggttcatctttggatggtgcttggaaactccccacagggttcattcttgcgtcggaggaaatatttacaggagctactagagaagtcaaggaagaaactggggttgacactgaatttgtggacgttgttgcttttaggcatgcacacaacgtggcatttcagaagtccgacctgttcttcatctgcatgctaaggcctacatcaaacaatatcaaaatcgacgaaacagagattcaggcagcgaagtggatgccgctggaggagttcgtcaagcagccgttcatccagggggaccacatgttccagaagatcatggacatctgcatccagaggctcaggaagtgctactgcggcctgaccgcgcacaacgtcatctccaggttcgacggcaggaggtcgacgctgtactacaacgtttctgaacctgaggatgtgaactgcaatgcttcttgacaacggatcgcccaaccttcagtcaggttcgcgttgtgatctagcattaggctctgtgcaatgcagtgcagagtctcgagtacagcgacctgggtaactgcttgtgaagcagaaatcctctgtaaatatgaaaagaagataggatttatggcaggtcgggtagctctgaccggctgttgcagtttcacgtagattgcagctgaactgaagaagatcttgaagacttttcagaaaatttcgtttctgtgtatgcgctcacgctaagcagctgcttaatgtgtatctagtgttgctatggcgaaagcaaaggacacgtacacaccaagaaccaggacactagtaggatgtgattgcgctccgagttctgcacttacgcgaacagtgtgccaaaatttaggtacttgcaacattgcaagtatcaaatgtgtatgcaaccccttctttgcgcgtgcaaagtataattgaagaacctcctgaatgtccc

SEQ ID NO: 15476 - DNA, 1445 bp, Oryza sativa
  ref <308>: DATABASE ACCESSION NUMBER: AK065997
  ref <309>: DATABASE ENTRY DATE: 2001-12-06
tgtgtgcctcgcatcctccaccaccactagtgcagccaagtgcgtgcgtgtgtgtgtgtgcggacaccgttgctgccgccgccgccgccgccgcgcgcagggtggtgacaagatgacggcagaggaggatgagcgggcggcggcgggggaggaccaagaacggcgcggcgcacttcgccgtcagccccgagctgatccagagcaggaacaggatctacctcaggggcaccgtcagcaaggagctcctcacgcacaagcaggtcgtccacctctcccacaagatcaaggatggcatctggctgcagcagcaaagatcaaagctgaaagagaagctgggaaatgagccctcatacaaacagctggcgcattcgctgaagatatcaccgcccgagctacgatcaaggatgcacgagtcgtttcttgcaagggagatgctaacaatgagcaacctccgtttggtcatttccattgcccagaagtatgataaccttggtgttgagttggctgacctcattcagggtggtctgatagggttactccgtgggatcgaaaaatttgatgcatccaggggctttagaatttccacttatgtatactggtggatacgccagggtgtttcaagagcattagctgaaaactcaaaaacattcaggcttccaacttatctgcacgagcggctgattgcgattcgtggtgcaaagtatgagttggaagatcaaggaattgctccaacaatagaaaacatagcagggtcactcaacatatcagaaaagaaagtactcaatgctacagaggctgtgaacaaggttctttcgttggatcaacaagcatttccatccttaaacggcttacctggagagacactgcacagttacatagaggatcaaaatgtcgcaaatgatccatggcatggatttgaggagtggtatctcaaggaagaagtcaacaagcttttaaactcaactctcaacgagcgtgagagggacattatccggttatatcatggcataggaaaacaatgccatacatgggaggatattagcagacaattcgggttgtcgagggagagggtgaggcaagtaggactcatcgcaatggagaagctgaagcatgctgcgaggaggaaaaatttggaggcattgcttgaggattattgagttgaggggctttttgtttgagtcagatccacaaacacagcggttgtatatactcagaaaacatagggtacatccttcaaaaggcgtactgccactcacatgaaagtaattatacgtgtacattttgtgacattagggagatgcatgatcaaaatctctatgcctgtgttatgaccaaggcaatcaggaaacagagagatgatgtttttccttcaaggtttacaattattctgtaatatatatgtaagtatgatttagcttgatcaatagagcaacacttaaaagttc

SEQ ID NO: 15477 - DNA, 3856 bp, Oryza sativa
  ref <308>: DATABASE ACCESSION NUMBER: AK065998
  ref <309>: DATABASE ENTRY DATE: 2001-12-06
gtatcccttccttccttccattttattttcttttattttcccaacaaagagaaaagagggtgaggagcctccatccgcgaaaagcaactccacccgacaacctgccccatgcactttccgttattctcatttcacccctcgcaattttacactccgccccccatgccctctcaaaactaattacaatccagtccttcaccggtcagcgatgcccactccggtggccgccgcgaggcagtgcctctcgccggccgccgtccccgccctcgacgccgccgtcgcctccgctcgccgccgcgcccacgcccagactacctccctccacctcatctcctccctcctcgccccgcccgcacctctcctcctccgcgacgccctcgcccgcgcccgcagcgccgcctactccccacgcgtccagctcaaggccctcgacctctgcttcgccgtctccctcgacaggctcccctccgtctccgcctcctcctcctctggcgccgccgacgagccccccgtctccaactccctcatggccgccatcaagcgctcccaggccaaccagcgccgcaacccggacaccttccacttctaccaccaggccgccaccgcccagacccccgccgccgtcaaggtcgagctctcccacctcgtcctcgccatcctcgatgaccccgtcgtcagccgcgtcttcgccgaggccggattccgcagcggggacatcaagctcgccatcctccgcccggctccgcccatgccgctcctcggccgcctacccacgcgcacccgcccgcctcctctcttcctctgcagcttcgccgccgcggacgacgccgacgtcccttcgcctgcggggaacctcgcgggcgcgggggaggagaactgccgccgcatcgccgagatcctctcccgcggccgcaaccccatgctcgtcggcgtcggggccgcctccgccgcggacgacttcgcggccgcctccccgtatcgtatcatccatgtcgaccccaacaccatcgaccgctcagacctcggcgtggcggcggcaatggccagcgccacctccggcctcatcataagcatcggagacctcaagcagctggtccccgatgaggacgcggaggcgcaggagaatgggcggcgggtggtggcggaggtgacgcgagtgctggaggcgcacagcaaggtcggccgcgtctgggtgatggggtggtcggcaacgtacgagacctacctcgccttcctctccaaattccccttggtcgacaaggattgggacctccagctgctgccaatcaccgcggtgcatgctgcccctgccgccgccggccctgctgctgctggtggactcatgcctccggcaaccactgttgctgccttctccaagccagctgcaagcttgatggactcctttgttccttttggaggctttctctgtgataactacgaagagaacagcctgacagcaaattcatgcccacaggccctgcggtgccagcagtgcaatgataaatatgagcaagaagttgcaactatcattagcgcaagtggcattacagctgaagaccatcaccagggaggtcttccttcactgctgcagaatggcagcatgatgggtcctaacaatggatttgatccagtcaaggttagagatgatcggatggtattgaattcaaaaatattgaatctacagaagaagtggaacgagtactgcctgcggctccaccaagactgccagaggatcaacagagatccttacaaaccatttccacgctatattggtgttcccgctgacaaagaaagatcagcaaatccaagcaaaggttctgagtcaattggggttcaaaaggatgttattaaaccttgtgcagtgtctgctgtacattccagctcaactgcaaggcctatttcatctccatctgtcaccaacaaaagaaatgaagatcttgtattgaaccttcaagccaggcattccaagagtgatgaaaaccttcaagaaaggggcatgcaatcccaacatggcaccctgtcgaatgctgacaatccggatgatcatgcctcaccatcatctgctgcacctgtggagactgacttggttttgtgcacccctcgagattgtagttcgaaaggttcaagttccacctgcagtaaacgtgtagaggattcagagaggtctgtccatctggtacccaagaaggtggatgatttaaatctgaagcatccacaactctctgttcaacctaactcttgctcctggagttccataaatgttgggaaaacatcacacagtacactacactcagtagcttcaggaggcttctctgcctttggccaatggcagaaacggtcaccccttgctgcacaaaattctgatctgagcaattacaagctacttgtcgaacgcctgttcaaggtagttggaaggcaggaggaagccgtgagtgctatttgtgaatccattgtgcggtgccggtcaacagagtcgcgccgtggtcctagcaggaatgacatctggttgtgttttcatggttctgacagcatggccaagaagagaatcgccgtggcacttgcagagctcatgcacggcagcaaagagaacttgatttatctggacctaaaccttcaggattgggatgactccagtttcagagggaagactggcatagactgcattgtggagcagttgagcaagaaacggcgatctgttctcttccttgacaacattgatagagctgactgccttgttcaggatagtctgtctgatgctattaagtctggcaggttccaggacatgcgaggcaaggtggttgacattaatgactcgattgtggttttgtcaagaagcatgatacatggcagcaaaaatgggttggaagagggcctttcattttctgaagaaaagattctggcaactcgcggacatcgactgaagatcctggttgaaccgggtagggcaatcaccagtggatgccctagtggtaaggtggtagtttccccaaggcattttctcaccaaaattcaagcatctttgtgctctggttcaatcagcaagagaaagctcagcatgtctgatgaccaggaaaagctacaagagtcgccaagcagtttgaagcgactgcatagaacatcgagtataccgttcgacctgaacctccctgttgatgaggatgaaccctttgatgctgatgacgacagtagtagccatgaaaactcatatggcaacacagaaaaatccattgatgcccttttgcattcagttgatggatcaatcaattttaagccgtttgactttgataaacttgcggatgacatgctgcaggagttcagcaacatactcaggaaaaatctgggtgctgagtgcatgttggagattgatgttggtgcaatggagcaaatacttgccgcagcatggaaatcagaggacaagggccctgtgcagacctggctggagcaggtttttgccaggagccttgacgagctgaagctcaaatataagcatgtgagtagctctacccttagactagtgccctgtgaggacacattaccaacagtgaaaggagatggtttaggagttttgctcccaccaagaataattctagattgttgatgatattatctgtatagggatcgctgtaattatctgtagtccacaatagtatagcattatttgttggctaaataagctctagtctagctgatgcattgccttgggttctctaattagctactgccagtactgtcatatcattttctacctcagggccttttccagatatatgggcatccgaatgtatattggttgtaactactatggattgtcaatatttgattgttctatatatacatggacacatggtgctcggtc

SEQ ID NO: 15478 - DNA, 2547 bp, Oryza sativa
  ref <308>: DATABASE ACCESSION NUMBER: AK065999
  ref <309>: DATABASE ENTRY DATE: 2001-12-06
ggctcgccctcgtctccccccctctttctacagccatccgcgccccgcccccccgcgtcaaccaaaccctaactcgcccaaatccgcctctcgatctcgcctccgccgtccgccgccgccgccgccgccgccggccgccaaaaccctaccgcctctcgtcgcctccgtccgccgcagacgcgcccggtatacaacagggtgatcgtcggttgaaaatgccatctgcatccaaatccaagtccaaagacaggtcagctgccaaggcaccaaaagagcaacctaaggttgcagcaaagcctatggggaatggcacagttgcaagtgcctataacaacttctctggaaaattccatctgttggagccatcatcttctttgctggttagccagggcaatgacaaattaaggaatacagacgagatagatgaacattctcgtagctcccatggtacaggagactttgattgtgcctctaacaatggtagctgttctggtgagtcagaagatccaaaggaaaaatcaacgagtactgcacctcgagtggactctgttccaggatgtgatgtcgataaacgtgagaagatcagacagaagaatgagaagaagcatcaaaggcagaaggagaggcgtgcccaggagttacatgagcgctgcaagggatacctaatgtcgagaaagctagaggcacttgcgcagaagcttgttgctatgggtttctcatcagatcaagcaacaatggcccttatacagaatgagggctgccttgaagagtctgttgcctggctatgcagctttgatggaagtgaggaagccaaacagcaaacagcagcagatcaacaacctggggttaatttgaagattgatataactgatgaacttgcaaagattgcgaccctggaggttaaattcaagtgtacaaagcaagagattgaaagggctgttgtttcttccgagggtgatctagaaaaggctgaagaggttttgaagacacagaagcaagaatcaacagcaactgcatctaagcctgaaggatctggcgattcaagtggcttggctaacaaagcgcagctaatgcttgcacagaacccaactaggcctcaaacaaatggattttcttcagttggggctcagcaaatgaggagagatgagaaggacttaaactacaagcttttgttaaatggtagtggtccaaaggaacatgcagttaaagggtttcaaccattggcaccatctgttaagccagagatgggccgaccacaatttgttcaacctgagaaaaggcggcttaatgctaattcggttccatcggtttcttacatcacatcatcccctttacctgttgcagcacctcaaataaagtctgaaacgcgacatgtggcagggggcaatgaggtgaaaaatgcaatgcataatggaaacttgagagagtcggtagttgtaatgcagcgtccccaatctgcagctgccaaacaaagcctgccatctacaagccatagtatgtttgcgtcagaacctccaagggaatggtacttaaatggtgcatcaggtgtggatatgatgttgaatggtggtttaggtcatggcctaagaaatatgagcttggatggtgttaattcttccaagcagtttgtgcatgcaaaccatcaacaaagttttgtttccaatcctatagatctggctgctaatggttggggtggtacctggggctctggaggtacatcatcttcccttggtgcggcttcatcacttgggttgtttcgaggatggagctcgtccgagtcgtcttcatctctatctcgtcctgattggagaactaatgggccttcaccatgtgactacacctcaatagactggagccttgacacaacgttgttaaaccctgcagcgaagagtgaatggctgtccgacacatggtcaaccatgttcatgggtggcagatccacaagaccatctgggaaccttggtggtccaggcattgctgggttacatgaaagcaattttccaatggatccttctccatcaccccgaccctatgattggccttctttctgcaggggaggatcttcctagtttcccctaccctgtaggtaagaagccatcgaataaaacaaagtaaaagatgttatttgtttctgttcttgttttggtctcagatccagttggttgacaagttttacatgtgtattgaaccgtgtttgtgtatcctcgactgttggccgagattagtcatctttctgtgtatgctgtgcatgaaaaatgaaggaagaaattgaagatatcttggcttaaaaacggacgcccctatctctctgaacaaatagctcaccaattgttctttggtgatctgttgctttacttgttctgtcttgcgaatgctgtttttttttgggggggtggggctgagggagggggttcattccaatgaagtactcctatgtgtttgtttttggggctaacggatcttttgcttctaccactaggtaattcaaatattgtttagatggcttcatgactctctctttgttttacatcatttgttattttaccc

SEQ ID NO: 15479 - DNA, 2167 bp, Oryza sativa
  ref <308>: DATABASE ACCESSION NUMBER: AK066000
  ref <309>: DATABASE ENTRY DATE: 2001-12-06
ggcctagctattagctaagctgctctgctccaccactcgtcttccgcgcgcagcaactgttcgcggaaatgccgagcctggcgctgctcagggcggtcgccatggcgctgctgctgctgctcgcccgctcgatggagggggtggatggggcgggcgggggtgggaacgcgacgtgcccgctcgatctgagctacgtgacgacgttcccgtgggacgccgacctgtgcgccggcggggcggggaacatgacgaggtgctgcaatacgctgctgtccgtgctcgccatcggcctcgcggagcaggtccgcgccacgggccacttccgcatcccgtcggtgggggagtccgcggcctgcctcaaggactacggggcgaagctgtcggcggcgccgctctccctcccgggagcgtccctcgtgcagacctgcttcccttcgccggagcagttcgtctcctcgccgtccttctgcgccggcgtcaccaccgccgcggagtacagggcggtcgtcgggaacgactccgtggccgcgctggactccgcgtgcggcgacctctcctcgacgccgcactgcctccgctgcctcgacgcgggcatcgccgccacctcccgcctcaaagccgccgccaacatctccgccaacgccaccaccgacggcgccgcgacgacgcgcaactgcttctacctcaccgtcacgtacgccgccggcatctccaacgtcgccggccccaccaacccacctaccgccgcctgcaccctcggcctcgccctctccaaccctcccgccgcgccgcccaaatcccacgacacggtcatctacgccaccgccatccccgtcgcattcctcctgctcgcctcgctcctcgcgttcttggtctggaggaggcatgacaagaagaagaagaagaagaagatccacgagatctccaaggagggatcggcgaagcggcggtcgcatccgcggccgaacacgggctccatcctgtacgacattgccgagctctccaaggcgacggacgccttcgccgaccgcaacctcgtcggccgcggcgggttcggcgccgtctactgcggcgtgctcgcggacgggtccgtggtcgcggtgaagaagatgctcgacccggacgtggagggcggcgacgaggagttcaccaacgaggtggagatcatcagccacctccgccaccgcaacctggtgccgctccgcggctgctgcatcgtcgacgacgacgccgaggaagggaagcagaagttcctcgtctacgacttcatgcccaacggcgcgctcgaggacttcatcttccgggacggcaagcggccggcgctgacatgggcgcagcggcggagcataatcatggacgtggcgaaggggctggagtacctgcactacggcgtgaagccggcgatctaccacagggacatcaaggcgaccaacatcctgctcgacggcgacatgcgcgcgcgggtggcggacttcgggctggcgaggcggagccgggaggggcagtcccacctcacgacgcgcgtcgccggcacgcacggctacctggcgccggagtacgcgctgtacgggcagctgacggagaagagcgacgtgtacagcttcggcgtgctggtgctcgaggtgctgagcgcgcggcgcgtcctggacatgtcggcgccgtcgggccccgtgctgatcaccgactgggcgtgggcgcacgtcaaggccgggcaggcgagggaggtgctcgacggcgcgctgtcgactgcggacagcccccggggcggcgccatggagaggttcgtgctcgtcgggatcctgtgcgcgcacgtcatggtggcgctccggccgaccatcaccgaggcggtgaagatgctggagggggacatggacatcccggagctgccggaccggccgctgccgtacgggcacagcgccatgttcagcgaggccgggagcaacttcagcgcctcgccggcgttcagtggcccgttcattgacaatggcgacatgctcaggtgatgtaggaggaggtgatctttttcttggcgaattcaagaatcatacagcctactagataagaacaatagccgatatggatgtagtgctcttgcaaattctggtcaattgaactccagaatcatatgtttcgttatctcttgatttgcattgattttttttttccc

SEQ ID NO: 15480 - DNA, 2205 bp, Oryza sativa
  ref <308>: DATABASE ACCESSION NUMBER: AK066001
  ref <309>: DATABASE ENTRY DATE: 2001-12-06
gatatgcaattttctccctcgcctggtatcgctgctgctctggttgtctctcgtcctgagtctccgactgagcgcctccaatctcaacagccacctcccacctgttccggctccggctagacctcgccgccggcgatccccagcctcagcgcatccaaccgacggaagaacacaaggcgccgcaccgcaccgcagcgatgacgctgatcaccctcatccgcgactacatcgatcgcatgctccacgacatccccgggatgaaggtcctcgtcctcgaccccgataccgtggggatggtaagcgtggtgtacagccagtcagatctcctccggaaggaggtgttcctcgtggagacggtcgacaacgcctccagctccagggagtccatggcgcacctcaaggccgtctacttcctccgcccctcctccgataacgtccagaagctccgccggcatctcgccgccccgcgtttcgccgagtaccacctcttcttctccaatgtattgaagattccacagattcaggtgctcgcagattccgatgagcaggaggttgtgcagcaagttcaggagttctatgctgatttttgtgccatcgacccttaccatttcacgctgaacatacgcaataaccacgtctacatgcttccaatggtggtggatcctcctggtatgcagagtttctgtgatcgggctgttgatggcattgcttctgtcttcctggctctcaagcgccgtcctgttattagataccaaaggacatctgatgttgcaaaaaggattgcacaagaaactgcgagattgatgtatgagcaggaaagtggcttgtttgattttagacgaactgagaactcttccttgttgctggtgattgacagaagggatgatcctgttaccccgttacttaaccaatggacatatcaggcaatggttcatgaacttattggaattgagaacaataaagttgatctaagggaatatcctaatgtccctaaagaccagaaggaggtggttctatcatcagttcaggatgaattttttagggctaacatgttcgagaattttggtgatcttggtatgaatatcaaaagaatggtagatgactttcaacatctttcgaagaccagccagaatattcagagcataagtgatatgtcaaaatttctgagcaactaccctgaatatcggaagactcatggaaatgtaacgaagcatgttgctttggtcagtgagatgagcagaattgtggaggaaaggaagattatgctaatttcccagacggagcaagagttagcatgtacaagtggacaagcagctgctttcgaggctgtcacttccttgctaaacaatgaaagtgtgtctgatattgatcgtttacggttagtattgctctatgctttgaggtatgaaagggagagtccggttcagttgatgcagcttttcaataaattggcttctcgttctgctaaatacaagtcagggctggttcaattcctcctcaaacaggctggtgttgataagagaacaggtgacttatatgggaaccgtgatctattaaatattgctcgcaacatggctcgtggactcaagggcgttgagaatgtatacacccaacatcagcctcttctctttcagaccatggaaggaattgtaaaggcacgattacgagatgctgattatccgcttgttggcaatcatttccagcagaacaggcctcaagatgttgtgctgttcattgttggagggacgacttacgaggaagcaagatcagtagccctttacaatgcagcaaatcctggagttcggttctttcttggtggttcagtggttctaaattcaaagagatttcttgatgacttaggagaggcacagagaatatcgaaatcgagcagtctagtatgagcaggctcttagcttctacagcttgaaacttggcagtctgacaattgaaacttgtggtgtttttgcgtagagaatcaacttcgtggtaaattttgtaatgcacagctttagattcatagtgcaacacaccatacggaataaaattgttcacagttcacctaaaaacacattttttgtggtttgcaattattgctgcatatagggcgctccgggtgaaattaatatttaacgcagtttagttcaacgtcctgggagaatcaacattcaagtcgcgcattttgttgatattttgtcaaattttagc

SEQ ID NO: 15481 - DNA, 1507 bp, Oryza sativa
  ref <308>: DATABASE ACCESSION NUMBER: AK066002
  ref <309>: DATABASE ENTRY DATE: 2001-12-06
ggttccgatttggggaaaaaaaaaaataaaaaattcgaaccaaacctatccaaaatccccatctcgccaccatctgcaaactcgccgccggccaccccgccgtcgacgaaccccacccaaacctcgccggggaaccagtccaagctccgtccaaccatgcggaagaacttccgcaagcggaacctcgaggcggacgccgccgccgaccactccgacgacgacgacgcccgccgcgtcgccctggaggagatcaagtacatgcagaagctccgggagaggaagctgggcatccccgccgccgtcgccgcagcgggcgcgtcgtcagcggcttctgccgacggggcctccccccgcggaagaggcggcggcggaggtgggttagcggccggaggggatgccgagaaggaggacctcgtcctccaggacaccttcgcgcaggagaccgccgtcaccatcgaggatcccaacatgctgaggtatgtggagaacgagctgttgaagaagaggggcaagaaggttgatgtgaaggacaaggaggagaaagaccaggtcgatgagctctacactgtgccagaccacctcaaggttaggaagaagaactcgggagagagctcaacgcagtggaccactggcattgctgaagttcagctgcctattgagtacaaattaagaaacattgaagagaccgaggcagctaaaaagatgctacaagagaaaaggcttgccggtaaaacaaaatcagatgctaacattccgtcgagctataatgctgactttttccatcgcggaaaagattacaccgaaaagttgagaagagagcatcctgaactgtacaaagatcaaggttcacaggctaatggaactggaggtaaatcaatgggtggtaaccatccagatggtgctggtgcagggcggagagaagctgctactgatgagttgttgcttgagcgtttccgcaagcgtgaaaaattccgtgtcatgcgcagataacatgaaatggaataggatgctaacttatgctatttcctttaaagggcaagcgtgtcagtgtgaccacatgatggccctctatacatcggttgattttggcttttgcttctaaagccagtgtccatggctcatcatgttataggcgtatcttcgaagcatttgggaaaattggacaggtcttcatgaaactgatcaatattgttctgtactgagcagcaatccaggatctcgtttctctcttttctttaaaactgctggttcaaccatggataaattgccaatgatctcagatatgcctttccatcccgatcctgaggcttaccttccatgcttatcatttctgctgcttacacaaccaccttgcggcttgcaccttattactgaaaatttcctggatataagcaagcactggcaatgtaccttatgttatattttcatcagaaacactcagctttgttgatgttgcccttctgaaacaaggaaaagctgtcagtaaagaagttgttaatttctgctc

SEQ ID NO: 15482 - DNA, 2279 bp, Oryza sativa
  ref <308>: DATABASE ACCESSION NUMBER: AK066003
  ref <309>: DATABASE ENTRY DATE: 2001-12-06
gataggcaaaggccaaggcaaacgcaacgcctcctcctctgcttcttcctctgctgctactgctagtgctaatcccttcctagttcctgctgctcgtgctcaagctcaagctccggtctccaacctcgaggtcaatcgcagcaggagaggagaaaaggatggaggtggagatgatggaggacgacgtgttcttcgccgagctcagcaagcggatatcgctcctcatcacggacgacgacgaggcggccgacttcggcgccgcacgcttccccgcctccgccgccgcgcccatcccggtgagcctccgttgttttttcttgtattcctcttctgccgcgtcgtcatcatatcatatcattcatcaagcatgcgtgtgcacgcgtgcatgtgagctagctagtagcgttagctcgtttcggttgggggcgttgggttcttcttgcggcttctctcgccttctcgcggctgttggtttggtagttgcagcgcctccacgcacgtggttgcccttgcacacaaccaaaccgaaccaaattgcataaccaatctttaattattctttttttttccttcgaaacaccgatcaagcctttgttcttcgccccccaatagattgacgaaatttcaaaaatatgtatatatatattcaagaacaggagtggccaacttatgaacaggtgcttttgctcttcgcgtagctggctaagcgtcagctggtttcattaaactcggcttcctaccgcgccatgtgcgcaggtgctacgtgctgtctgctgttgccgtgctgtgttgttggttaggacttagctgcacggcacactttcgctggctgctaattatgatcgacggtatagctagctactccgtagctactatacatgacaccgttgcacggttgcatgtgcatatgcgtgtgctttgagctaccactactgctcatgagtcataagtgtgcatatgtgcacttatgagctatatactacgatattcgttcgttcacttgtgtatgtacgtcagtgtgagcctgtagtgtaagtaagaggagtaacaaacacctttcgtaggaaattgaccatttacatattgtgttgctgttgccaaattctccttgggccccacagacgcaagcaaagaatcatcatcagtcgataagccttgaatctaaagtgccttttagcatttcgttttggaggaatcgtacgatattatgttttgtgaaattcatgttaagttgtcagcaaaccctgagtactaggacagatagatagcacggaaatggttgtttttttagtggttattgtttttatattaagtgccatttcccagcgagatagagcacaatgggccaactaaaatctgctctaatccaaatcgttagccgctggaagggccccatgatgtgcacgggtgttatgcagagccacagccatgtctctttcactggccattcttgaactagaaacttgcaagaaacgtcttcccattgcccgtggctgcagacgatccgcgtcgctacatgtcacattagttaggtgtttaattaactagtatagcgagtaatagctaacttaacagcttattaattagctccaaacctccagttaagcccccactaatcgctgcttaactaattgttatcttgtcatatcctctgctgcacggtgcgtaattggtagctccaaaaaatccagttaagcaatgcatacggagatggtcggtcggcactctcctcgcacgcattgatagccaaaagaattttagttgtttttaggcctgcacgcgatgcgacaagcgctcgatcgatcgatgttgcttggtgctccaagcttctaagagcacccgcaatggtaaattaaggtgttctctataaatcatgtacatatcaggaatagactagattaatagtaaaccacctcaatagtatgtctacatgggtatttatagctctctcatgcattgcctcgtttttctctatagactatctctaaaagctagtagatagctttgctctctctcttcatttaatatcttccaagtaggaaaatatgctgatatagatctcttatagataaccattgtgggtgccctaagagcaaggataatagtatagctcatttattactattagctcatcttaaagccaacatatataatagattagctataaggttggctatattgttcttctcttctctctatctctcacttatgcatttaatgtatttgtcttagagcttgtaataagctagctcctgtatgagagcccacacctttgattt

SEQ ID NO: 15483 - DNA, 2506 bp, Oryza sativa
  ref <308>: DATABASE ACCESSION NUMBER: AK066004
  ref <309>: DATABASE ENTRY DATE: 2001-12-06
gtcttcgttatccaaatcgaacgaacaacgaacccctccttcctcgccttcctcgagttgagctctcgctccgccgccggccgccgcctcgagctgggaggcggccatgggcgccgccggcctcccggcaccgggatgcctgcagaaatttggacatatcgttgatgccgaaagatttgtattaaacatgtccaaccgtggaatccataaggcactcagttttcagtgctttgcttctgatgggcgtggctttggagctggttctactaatagacggaaaattaaaagcaagaagaggcaaaaggatgttgcacaggaaccaagcaaggtaatatctggaggttccaagagcagggaccaatgggcactggacttagggactcgaagggaaagtaaatatgctaaaactgtcatggataagcaatttctagaaaaagtggaagctgttcgaagatctgcacttgagaaaaagaaagctgatgagaacaaaaattatcaagctattgattatgatgccccaattgaatcagataagagtacaattggttttggtacgagggttggaattggcatagctgtcatggtctttggattagtcttcgcttttggggatttccttccatatggaagtgttagccccagcaaagaaagcactgtggttagcaaacaactttctgaggaggaaatacaaaatttcaaggtaaatgtgtttttgccacaaaaattttgttggttttgaccactaagtactgtgaaatatgctgcacatatgtggctttggccgcaagtaatttattaaaatgtgcagtactgaaattagggcatataagtacatctattggcaagcttgtctagtatatctgtgggagattagtttcatatgtttgacatataattttttattcttgtttgacagtttgttgttatattaagagattgccaattcttttgattagacagcactagaaggttttgaagcaacactgcggacatcacctaatgatcctactgctcttgagggtgcggcagtatcattggttgaacttggtgaatatcagaaggcttcagaattcctagagaagcttgttaaggtgatccctgacaaagttgaagcataccgtttgttgggtgaagtaaagtttgaactcaaggattatgatgggagttcttcatcatacagaaaatctttatctgcgtcagagaatatcgattttgaagttttacgtggtctgaccaatgcactacttgctgctaagaagccagatcaggtcagttgataaattattattgagagggtatcgtgaacttgtgtagttcacattctttcattctatctatccattataacaagagttatccatacagcgtggtgtttaattatgaagttgtctaggttaagatttggacttgcactaaggaaacaagaaattccttatagcgtagaaattttggatagagaagctctgtgcaattcattggtactgttcatggatacatgatctgaagctctagcacatgttcctcaaagctgaggatatcctgtaagtgtggtcgattttctagcattttaaacacattgtcaggctggagataagcagacttgagccacttacatctgctactgggtaagagatattttggaaaagatataaatacatacatgttctgtggcttttctaccttaaatacatgcattctgtgatgtaggtatgaatgtgttttcaaatctgacatttcttactagcttttgggactgtagagatcactgagagttttcccttggctggttacttcatactcaaaatagcatatgccatactttatacatttacacctttttttattttcaataggcagttgatgtaattctctcttgccgtcaaaagttgaatgagaaaagtcaaactcaagttgcgaatttggcggctgcaaatgatgatggtgctccaaaatctcaatatattgatcttatccaagttgatctgcttttaggaaaggcttattctgattggggccatatcagtgatgctgttgctgtttatgaaaatctaatcactgaacatcctggagacttccgtggttatttggctaagggaatcatattaaaggaaaatggtaaatcaggtgaagcagagagaatgtttattcaggccaaatttttcgcacctgatgcagcgaaggcactagttgatcgatatgcacaaaggtagcgtgagacacaacagggaaattccaattcctctaatttttgtcccattattttttgtttagatagcatcgatctaagttcgtcaggaattttatcgcctgtcaattcctagattcagcacgacagaagggacacggggataatttgcttgtcaaacaatatttagatcaaggcagttatagtgtatagaaaaccttcttgtcgataatagcaaatttataggattttgagattgtgtattcttttattaatgaattgatttgaaataaaaaaaaattacgaatttccgtagaaccc

SEQ ID NO: 15484 - DNA, 1653 bp, Oryza sativa
  ref <308>: DATABASE ACCESSION NUMBER: AK066005
  ref <309>: DATABASE ENTRY DATE: 2001-12-06
gaggggggtgaggggatcacacctttctctcgctttctctctcgtttgcgagcggcggcgcgggcgctcgagctgacggtcggtagagacggcgccgggcatctggagggtgttacaccgggagggggggaggtggccgccggcatggggagtggccgccggcgtgctgtagagtttcaattaacaattattggctgtttgggatcctgtttgctcactgtttgggatttttttttgttgtttgtttgcaggtttggaggctgatctagtgagattgtttttcaacggaccgcttcctgtgttgtcaagatggatcaaaggagcaggcttttaatttttgctgctgctgcaaacatgttagtgtcgatgatggcccttattattgagtctagaaataggagagtgccaaggagagtaggaataacatatggcccattagttgaaagggatagaaagataagtgaacacctcgatgacctcatttggagaaatgatataacttgtatcaacatgcttagacttagaaaatcatctttctttcgattttgtaaactttttagagatcgtggcttgcttgaagataccatcaacgtgtgtgttgaggaacaagttgctatgtttttacatacaattggacacaatcttagaaatagggtagttggtgctactttccgtaggtcaggagaaatagttagtcgatattttaatttggtacttcatgcggttggagagttatgaaatgatcttatcaagcccccatctttggacatcgcacctaaaatagcaggcaaccacagatgggatccatacattaaggattgtattggagctattgatggcacacatgttagagcatctgtcccaaagaacatggagtcgtcttttcgtggtaggaagaatcatgctacacaaaatgtaatggcagcagtagattttgatcttcggttcacatatgtgttggctggttgggagggggctgcacatgatgttgtagttttaagagatgctttggaacgtgaaaatggtcttcatgtcccccaaggaaaattctacctagttgatgttggatacggagccaaaccgggatttttgccaccctttagaagcacccggtatcatctaaatgagtggggaaacaatccggtccaaaatgagaaggagttgttcaaccttagacactcatcccttcgtatcactgttgaacgtgcatttgggtcactgaagaggaggttcaaaattcttgatgatgccacaccatttttcccctttcagactcaagtaaacattgttgtagcttgttgtattattcataattgggtgataaatgatgatattgatgagcttgtgatgggcccaaatgagtccataattcaagacaacgatacttctacggttggccaaccaaacgaccacgcatggatggttcaatttaggcaaggacttgcagatcagatgtgggccgatcgtcaaaatcaccatggaaactaaattgtgcttgtactatttagcatttcaaaaacatgtttgcattcctttgtgtggatgtattgtcaagactaaatttatttgtagttgtactatttgtatggactacttgtatgatgaatttaaattgtacgaacatatgtattgatgtattactcttgaatgacc

SEQ ID NO: 15485 - DNA, 1648 bp, Oryza sativa
  ref <308>: DATABASE ACCESSION NUMBER: AK066006
  ref <309>: DATABASE ENTRY DATE: 2001-12-06
gtgttgagaagaacatccttgtctttgaccttggtggtgggacattcgatgtcagtatcttgaccattgacaacggtgtgtttgaggtgttggccaccaatggtgacactcatcttggaggtgaggactttgaccagagaatcatggagtacttcatcaagttgatcaagaagaagtacagcaaggacatcagcaaggacaaccgtgctcttggaaagctgaggagggaagctgagcgtgccaagagggccctcagcaaccagcaccaggtccgtgttgagattgagtccctctttgacgggaccgatttctcggagccgctgacccgtgccagatttgaggagttgaacaatgatctgttccgcaagaccatgggacctgtcaagaaggctatggacgatgctggccttgagaagagccagattcatgagattgttcttgtcggtggtagcaccaggattcccaaggttcagcagctcctcagagactacttcgagggcaaggagcccaacaagggtgtcaaccctgatgaggctgttgcctatggtgctgcggttcagggaagcattctcagcggcgagggcggtgacgaaaccaaagatatccttctcctggatgtggcaccccttaccctcggtatcgagactgtcggtggagtcatgaccaagttgatccccaggaacaccgtcatccccaccaagaagtcccaggtgttcaccacctaccaggatcagcagacaaccgtctccatccaggtctttgagggtgagcgcagcatgaccaaggactgccgtcttctcggcaagttcgacctatctggcattccagcagcaccaaggggcaccccccagattgaggtgaccttcgaggtggacgccaacggcatcctgaacgtgaaggctgaggacaagggcaccggcaagtcggagaagatcacgatcacgaacgagaaggggcgcctgagccaggaggagatcgaccggatggtgcgcgaggcggaggagtttgcggagaaggacaagaaggtgaaggagcggatcgacgcccgcaaccagctcgagacctacgtgtacaacatgaagaacaccgtcggcgacaaggacaagctggcggacaagctggagagcgaggagaaggagaaggtggaggaggccctcaaggaggccctcgagtggctggacgagaaccagaccgccgagaaggaggagtacgaggagaagctcaaggaggtcgaggccgtctgcaaccccatcatctccgccgtctaccagaggaccggtggcgccccgggtggcggcgccgacggcgagggcggcgtcgacgacgagcatgacgagctgtagatgatgatgatgatgatctgattcgattgattcaaaggagacagccaatttttgtaagagatggccggttacttttagtggggtgacttactactaccttgggttggggtttaggggtagcaagaggggagagttttatttgcagaacaccagaaaagagactaaatctctcctcttgttacttgtgttgctctcttagtttgttactctgtcgagtgtagaacagctcttccttttgctacttccttctgatttccatgtgaactgtgaagaagaagaagaaacataagtaaattttaattact

SEQ ID NO: 15486 - DNA, 3677 bp, Oryza sativa
  ref <308>: DATABASE ACCESSION NUMBER: AK066007
  ref <309>: DATABASE ENTRY DATE: 2001-12-06
gggtggtcccactcccaccacggcgtggcgcgtgggacggtaggcggccccgttaccgacaagcgaagcaaagagaggcgaggcgaccagcttgacggaacacgagccgagcggccgaattccggtggcttcgacttcgatcgggagcgggagggcggcgcgacgcggcggcgagaggccgaatgggctcgtcggctactccgtcgacggcggcgagcgcgccgggccggcgcaaggtggcgctctacctcgcgctccttaccctgcagtacggcgcccagcccctcatctccaagcgcttcgtcaggcaagaagttatagtgactacattggttctttcaatcgaagtagcaaaggttatatgtgcagtcattttattggtggcagaaggtagtctgaagaagcaattcaataattggagtatcaccagatcacttactgcatcaggacttcccgctgctatatatgcattgcagaatagcttactgcagatatcatacaagaatttggattcattgaccttctcaatccttaaccagaccaagctattattcacagcattcttcacttatcttattttggggtatgtcctggtgatacctcctatttacatattacaatgtattgatgatgcacatgatcttatgaagttataaccatgaagtgtttgtgtcactaatatttgaacttcccttaatgaatgccactgtttggcctggcatgatcttaacatttgaatttttactgtaaatttattattttacaatatatcattgacactttttactgttaatttattttacaatatattatttacaatcacagaattattaccatatggatgtgtttttgtttaagtacaaatataatggtactgtttgtgtgccactaaatctttgttttgctagatttacaatgtttgaatcaaatacatgggaatcttgcaaaagtcaatgtaaggagtaatgttgtattcaagccactgctaaaacaataggttcgctttgtttatatgcatagttttatggttcaatcctttaaatggtcctagatctccacccaagggaaaactagttgtcctgatttttgcatattatataactaggctttaactgaaatccttatttaccatccatggtcactgttttagggattgcaatttaagttcatgatatttaagactttttccttaacaaatcaagttaaaactctattggccttgctggtcgcatcattatcgggtttattttctgtaccatttccctttttaattcattgacatatggtgagttggtgacaagccagaaagaaacaaagttaaggactggaacattttgttccgcgtcaccaaaagatgcacaatttagctatttatgactgcgtgtaatttaataccacagaatgccgcacatgaaatcctaaattgccctttgttccaccatacagccaatttgtcccttgcgtttcctctattgccagcatctttaccattcttttcgtaaatgcaccaagcagaggttgctgacaggttaggaatgtggtggggttgtggcttgattgggcagtggcaacaattaaacacaagggtgatgatggtgtggtgcttttgagaatccggaaaacggcagaagaaaggaagatgattgtggatctgagcagtagctcaagaattgcagccatgccttatccatgtgttgaccagcaggacgtccatattgaccatgtgtggttagtgtggggatggaagcctgttaccagcatccttgctggccactggctaccacccaccaccacctttgcttcaagtccgaccacatcatctatgagcctgctttgaaaaagagaggtgagagggatgatgtgtgccatttttcgttgttggttcctgttgtcactcgtacttcctgcccaccattgaggatggtgtccacacgctaaaggaggtaaggactgagtaggaaaaagaggacaagacaagcaaaatagaaaatgactggatcccttaattgccgggaattgtattttttaaaagattggaggaaaccagtattggagtgcgttagaaaagttcagttctatatagctaactagatgatgcgccgtgctttgttgtggaatatatgctagatattgtagaaatgatttggattgaaatattgtagaaatgatttgaaaatgatgatttagcatatgtatgtttagttttagaatgaaataaattatagatataattactatatgcttgcatgttgagctttgtgtgcttagtaggttgatgtggcatgcttgcatgttaggttttaggagtgctaataaatactatgcttgcatgttgagctttaggtgtttagtgggcattagctttatagaaagaagggattagatttattactacaaaaccttcaccacctactttttcctggtatttggtagaagttaaaccaaaacaagggtatttggtaaaagttaaccaaaacaagcccattacatattattcttcactacatgtcatgcaggattagagctagggttacacacctgttactagttactacacggaacatgaatcgtttggttgtgttctaacaactgccctttatattgtttccttttttcttatgctccacatgtcacatgctggtctattctgtcactaaacatctgaattaagggcctatccattaattttatctctttatggattatatcatgcaggcaaaagcaatcacccaagcaaatttttgcattaaccctcttaatcgctgctgcggtccttttgagcattggggagagcagcagcaaaggttctggtggtggcaattcagactatatcttgctctatggaatcattcctgttacagttgcatctgtattgtctggtttggcctcgtctttgtgccagtgggcatctcaggttaaaaagcatacctcctacatgatgactatagagatgtcgtttattgggagcatgtgcttgctagcaagtacttctcaatcaccagatggggaagccatcagaaagcatggttttttccatgaatggactttgttgacagtggtgccagtattaatgaatgctgttggtggaattcttgttggtctggtcacaacatatgcaggaggtgttagaaagggttttgtgatagtgtcagctctccttgtaactgcactactacaatttatatttgacggaaagcctccatcactctattgcctgatagcattaccacttgtcatgacaagcatatttatttaccagaagtatccatatgttgatagaaagaagaaagactgataagcttgctcagaagagaagggaattatttagcatcagcacaacataaatacattatgctaacctcattttgatcccacgaaagttggatgcgccttgaatgggccatatatgaccttgaagagtgtctcttcatgaagctatgtatcattcatctaatgatctctatattaaatggatcacatgttcacaaaacatatggctggagtttattccggcagtcagtttgatattagttgtattttccattgacttgattttcttcttttacattagcaagtggtttgcgtatagctatatatgttatatatctgaacaacttgggaactgaatgtatctttcagatggtattctgtacctttatatcaagattaaatctgtc

SEQ ID NO: 15487 - DNA, 2239 bp, Oryza sativa
  ref <308>: DATABASE ACCESSION NUMBER: AK066008
  ref <309>: DATABASE ENTRY DATE: 2001-12-06
gcgggtgaaatcaatccccatgtccccaccctctgtgtagcggtgaaatcaccgattcctcatcccaccgggcgagcgcgagaacccctttcgcagtaacaccgcctcgagcgctatccccgccaccgcttgccgcgttattcccgcgcacagagcaatgacaccggatgatgcgcctcctcgcgcattgaataccagtgcgcacatcctcccctaataagtagtggccgcaggccgccggtcatctcttccgccgtcgcgtgaaggctcggtgtcggggaaggccacacctgcgggagaggggcctagggtttcacgagagcgtgtgctggtgtggcgtcgtggcagtggccagatcagaagctagccggccgtggtggagttcgtagtgtatcttggccgctccgtttcgttgcatgtcggccgtcgtttcactcctcaatggctcaattggaaggttgggggggctgttgttgatttggatcttgacaatggaagaagcctcaagggagctagcgagcctccatctccgccatgctgcttcttgtcgccgccggcttctggcatgtaacttcctctgtgccgccccagatctgagggttgaggccgctgctgccaccggaggctgggacacatgcaccaaccacccgttgcctcggcgcccccgtcggaagtgcaccacggcttaaccacccactccctccgtcctcgctgacttctgctccacctcgctgtcggttcctctgtagtcgccgatgccgacggctccacccccggttcttctccaccttccatggcagcgccacccgaatctgcggtcgtggttcagaacggcgacggcttgggcgtggagagtcgcagtcgcgtcatcgttgaggttcggcaggaggaaagccggtgaagccgcggcaggagcggcgcggagcgcgccgttgatggcgacgtcgaaagtgtcgaggaagccggcaggggcaccgtgggcgcctggggcgtcggcgcggttgaagaacgagctgtgggagacgtcgatgccgggagccagaagcagctcactgttgttgcaggcaccaggtctgacgaagagggtggtaagctccggcgggatggcatcggcctcagaccctcaccatctgctgctccagccatatgaaagcagggatgttcctcttcctttatcatggctttgcctcctctccatccgccatgccatctcaggagattgatgcttctaattaaggtctaacactacctttttcctcagccgacaacttcattcatattcgttcattcattcctgtacatggtgctcgatgaaactctgttgtgattaagtttttcgttctgcgtgggacgataaaataaactcaattcttttggtttttgtagtcttttggatataatacatggtagagcttcctccgggtggttggtagcagaacaagatagtataagttttcaagtggataaagctaaagcaaggttaagaattaaacatgtgtaatagaagtatcaggaattcagaatggtagttggcgcatatggaatggatttgatggccgaaaattgtgtaccctgtgaagaattaattactggttttaagttttaactgcatactgtaatcatttcagggaaaggtgatcttcagaagagctgagtaaggtacagcctaaaaccattatttattctatagtgatcttcagcacactgccactgcactttcttgctagattaataactctgaatatctgatattttcctcctatggtctgaatattgggttagttccaactgattattcacttaactctggcagcatttcaattccagaatccatttgattacagtcttttcttctctgtgctaaattctggaagttgctagcttctattcatcaagttatacatacaagtttgtagtctgaaattcattcagaacaccaggtttagtcaattatttctttttccatctatgtatgcataaagatcaaattctctctaggtggagtgagcagctctttgaatcttgcagtgcttcattttacttcaattgtaaaaggatatgtgcccataagtatgtcctttgcttcagaggtcattagcattaactgatatgcttacatgtttgccacttaaatgtgttatgtaggctgcagcagaaggttcattttcccttttgtgaggtgccataactttctggtgtctgttgaaggacaaagattataaatgacatatattgcagg

SEQ ID NO: 15488 - DNA, 1481 bp, Oryza sativa
  ref <308>: DATABASE ACCESSION NUMBER: AK066009
  ref <309>: DATABASE ENTRY DATE: 2001-12-06
gctagccctcgcagcgagcaaaccctaggttcccccccccccccccttctctctctctctgcgggcggcggcggcgacatctccctgcgcgccgcatcgtcttcttcccagatggcggacggggccaacgaagacggtgggggttcggctgcgggggagcggcccatggttgcaatcaagcgcaagcgggagaaggtgcctgggcttgccgaagatggagattcttccccttctagcgctaatcgatccgtcgacatggaggtggaggagaaattagattactcttgtgctggtgccgaagaagatgttagtagtggatgcagcattgagatggaggatgtgggtgagcagcggcaagtggagcccacatgggaggataaggtgctgagggttcttcacattgttcgtcgcaatcagtttgctgaatatgaccccaaggaaggtgggatcgtatacacccgcttctgcatccacaacatagccttattcgatcttgacaaagagtcaacgattgggcctgggccaccaattaactcgctcgatccctctgaatattggtggctggatgactcactgaatatcatagcgatcaaggttgccgagtccgacgtgggttaccctgtcagaatatatggcaccgttcttgcgagggatcagcaagactacagatgcgtctatttgttcaggcgaagcagggacaatccccaactcatcacctcaccggaggatagtctaaccttgacaggcccatatcgagcacttgcttcaaaagatattataattttcgagttcaatttgaagattttgggcgatggggatgttgacagagatttcggcaaaggtgtgatagaacacagttgtatccgtcacacaaagaaactcatgactttagatctaacaagttggttgagcaaaatagatttggtttatacgcctgttgattatgctgtagaagcttcacttgcagtcaatattttggatgggccatctgatttcaccggtaaagtgattgcttggactagtggaaataaggacaatgagatcgttctacatgatacccaagtgacaggctctccaacaaaacttggagatgatggatctattgagttatctcgtcatatagtagtagtcccattggatgaagagctagtgctcaatgttattttgtttcatggtgatgaccatgaagacgaatgctttgaatttgttcttaccaactatgatgaagaatctagtttcaaagaaggccgttttgagctgcaggtgaaggtcatctggacaggcgtagtgagaacgggagaacacaagatgtgggagagcacagggagaaatagaatgttagtgtgattaagtttaaaatcattggaaagatgttaatagtaacctctctggaggaggaaatgtcttttgttatcagcattgtaattaagattctgttttatgtgtactatctatctaatatgaatttggatcttggtcgc

SEQ ID NO: 15489 - DNA, 1779 bp, Oryza sativa
  ref <308>: DATABASE ACCESSION NUMBER: AK066010
  ref <309>: DATABASE ENTRY DATE: 2001-12-06
ggcctagaacttgcatccctgaactgttctacaatatagatctcatggatgagatggctgcacgaacatggttgtggttgctactgtcccctctcatcctcctactgctgcactatgctctggccctgctaactgcacgccgagcgaggaagaaccccttgccaccttcacctccagccttgccattcatcgggcacctccacctcatcggcgccctccctcacgtctccctctgctgcctcgccacgaagcatgcgcccgacctcatgttcctccgacttggcacgtcgttgccggtgctcgtcgcttcctcgccctgtgccgccgaggccatcctgcgcacgcatgacgacgtgttcgcgtcgcggccacgcaccgttctagcggatatcatcttctacggctcgcgcgacattggcttcgcaccgtatggcgaggattggcggcaggcaaggaagcttgtgaacacgcacctgctgagtgtcaacaaggtgcagtcgctatggcttgcccgtgaggaggaggtgaaaattgtgatggagaagataagcaaagcggcattcgcacgtgaagcagtggatataggccagattctttgctcattcacaaacgatctcgcatgccgtgttgtgtcaaggaagttagtcggggatgacaggcagaaaaagctcctccaagagttggttaataagacaataaagctgctttctatcttcaacgtggaggagtacttttcaattttagctcggattggcgtgattgggaaggtgatgtgcgcaagagctgagaggttgaaaaagaagtgggacatgctgctgaaaaagctgatcgccgaccatgagagcaagtgcgattcatacttagtatgtggccgtaacaaagatgactttgtggacattttactgtctgttaggaaggagtatggtctcaccgaagaacatgtcaaagctattcttgaggacgtctttattgcgggaacacagtcgtctgctcgggtgatcgaattcacctttgctgagctcatgcggaagccacacatgctcaagaaggtgcaggatgaggtgagggcttgcattcccaatggacaagcaattgttagtgaagttcaagttaacaacatgacttacctgagagcagttgtgaaggaggtactaaggctgcaccctgtggcaccactccttgcgacacacgtctccatggctgactgcaacatcaatgggtatatgatcccttcagggatgcgtgtcttggtcaacgcctgggccattggtagggacgaacgcttctggtatgatccagagaagttcatgccagaaaggtttgttgaaagtgtgaatggttctgccactgcgtcagtcaacttttgggtgaataactatcaatacttgccatttggttctggaaggagaatgtgcctcgggatgaactttgccatggcagttatcgagatcacactagcgaaccttctctggaaatttgattgggcgctgcctgcacatgcaatggaggttgatatgtcagaagagtttgggttgtcggtgcgtctgaaagaaaagctattgttggttccaaagcaacatgtgtagctgctagcaagtactcgaaggaattgaattgtccaactttaatgtgagaaagtctaccatgacctatgggggtctacactaatgttaacctctggacaaagtcattatacaccgtttctctatgcttcaacccttggaggatccaattcttatcacaaaatatgtgtgtaacaagtaataatttttgcatggt

SEQ ID NO: 15490 - DNA, 2309 bp, Oryza sativa
  ref <308>: DATABASE ACCESSION NUMBER: AK066011
  ref <309>: DATABASE ENTRY DATE: 2001-12-06
gtgagatgatttttcccgttgtgtatttgtcttcttcgtcttcttgttcctttttttagtgtttgctgttaggttgccaatggtgccattaaggaagaagtagtccgcaaagggaatgaagctgtactcaggttatgaatgttttagcaatgctactgtgtaaaatttatagctggagctttgactggaagacataattctagataatggatagaagtagccatagtttgattaccagcattatgtttgcatcgtcttttcttccctctgccttttttttattccgcaagagagctgtagtcaactgtagattttttttttgcgaggaaccgtagattctgaattggtatataaatacagggcacggtatgaggatgctaaattcttttataagatggatacgcagaagaaactttctgaattccgagatcagctcagcagcattctctttcatgaaagacttggtaccatgcttgacaaaatgaaacgtgttgagaacactgttgcagaagtggccctccttctcggaattaatgagaaaatgatcccagcaatcaaagatgcagctgcattggctatgtcagatcttgccactaatattgttactgaatttacttcacttgctggaattatggcacggcattatgctttgagagatggcctttcagaacagattgcagaagccctatttgagataacacttccaaggttctctggtgatgtgttcccaaaaacagatcctggcatagtccttgcagtcactgacagattggatagtctagtgggtctgtttggagctggatgccaaccaagttctacaaatgatccatttgggctaaggagaatttcctatggattggttcaaatattggttgagaacaagaagaactttgacctcacgaaggccttgaccttagtggcagaggagcagccaataacaatagatagtggtgttatagatgaggtagtacaatttgtcacgcggagattggagcaacttttggtacgtatttccttgaacagtaataatagtctgagttacatataatgcttttattccccaagactccatccttttggaatctaccaaggattagagtagaagcttacctacactggaagagcaagtatcttttcccgtacagactggttttagtgacgttttctccctcgtacacaagaaattccgaagataaatatgcatactatcattgcttcatgtttatccatgtagcttattcagcatagtaccgagcatggattttgttgccatctctgcttctgttttcacttctgatcctttttttttatcaaatacaagtcaacaattgtcagtgaaatccatttcctgtaactgatggtttttcgtcaatttatcaggtggatgaaggaattaattgcgagatagtccgttcagtgcttatagagcgtgcaaactgcccttatctagcatcacaaacagcaattgaaatggaagcattttcaagaactgaagatttcccaaaaattgtcgaagcgtactcaaggcccgcgagaataatacgtggaaaagaaattgggtctgctttagaggttgatgcaagtgtatttgagaaagacgaagaaagagctttgtggagtgcctacttggaggttgcggataagattcatcctggtacacaatcttatccaaagtgaaaaataatccgagatccactgtttcttctgttgatccttttttctctcgtgtgaaatatatgtgctttgcatcgtctattctttcgggcgtgctgtatattctgtttacttgtatccacattccaccctgtaggtgttgacataaaagcctttgcggacgcttctctggaactgctgcaacccctagaagatttctttacaaatgtttttgtcatggcggtgagcttaattttcgagtactaagcatctacttagccatttattactaaatgatttagactttggtaatggtgtatgctttgctatgtggttggtgatacaggaagacgagagagttcgtaacaatcggcttgcactgctaacgaaggttgcgagtctgccaaagggaattgccgacctgtcagttttaccagggttttagccattttttgttgctcttctagttttatctgtaccatgcttgtacattcataccgactacagttttgcagccaagaaaagagcgtgatccctatatatataatgtataggtagctagcataaattgtcctcaactttgttgtccattgctatgttaaacatatgtttttgttttcaaaccattttggaaatcaaatgccataacttgtatc

SEQ ID NO: 15491 - DNA, 878 bp, Oryza sativa
  ref <308>: DATABASE ACCESSION NUMBER: AK066012
  ref <309>: DATABASE ENTRY DATE: 2001-12-06
gaatgccggtccttgccttccccaatcccacctatggtgacgagcagaaggccgcgcgtgtcgaggcaggccaggcgactgcggctcgacaaggggacgagaggacgatgggctcttgtccaggcggtggcggcttatcgtgaggagcttgcggcggcggcgtctcagctaggcatcggcggcttcatgcgggaaggcgacgacggcagtggcccggccaagcggtggcggctagcacgccaagcaacaggccgcgcgcagcgagcaggtctcaggggcgctgcaagctgatggcgagcaggccgggcgcggcggacggccggaggtgcacgctgcggcaagcagcaccaacctggcaataggaagaagcaacatgctactagattggatttttttgacctcatgatttggatttgcttgattttgtgatgattgctattacatgtcttttgttagctgtgtaaaaaccatgcccaaattctgtctttttttttcttttgcaaaatatacaaattttatcaaatttgtcgcaaaattatattatgtcaaaaattttaatcttctataaaaaattgtcatatttgcaaaagtttgtgaaaaatgcaatgtaaaaatgggggcaaatacacaattattgaataaacattcagacaaatattcaatatcaaataggggtatgattatcttttcgccagagatgtaacaccgtcaatatgtccatccaaagtaggggtaaaatttgctttaatttcaaaaaagtaggggtaaaaacgaaaaccctaaaaaaacaggggtaaaatcaatattgaagatgaaagtaggggcaagaacgaaattgccccttaaccagatcactaccatgaacaggatcttgtccc

SEQ ID NO: 15492 - DNA, 2195 bp, Oryza sativa
  ref <308>: DATABASE ACCESSION NUMBER: AK066013
  ref <309>: DATABASE ENTRY DATE: 2001-12-06
gggatttgcaggttattatactgagtgcgtcggcgaacaagctggcgaagctgaagggacacgcggcgacgtacgcgtcgctgatcatggaggagctggacccggacgaccgcgggtacatcgagatctggcagctggagacgctgctgcgcggcatggtgagcgcgcaggcggcgccggagaagatgaagcggacgacgtcgagcctcgcgaggacgatgatcccgtcgcggtaccggagcccgctgaagcggcacgtgtccaggacggtggacttcgtgcacgagaactggaagcggatctggctcgtcgcgctgtggctcgccgtcaacgtcggcctcttcgcctacaagttcgagcagtacgagcggcgcgccgcgttccaggtgatgggccactgcgtgtgcgtggccaagggcgccgccgaggtgctcaagctcaacatggcgctcatcctcctccccgtgtgccggaacacgctcaccacgctcaggtccacggcgctcagccacgtcatccccttcgacgacaacatcaacttccacaaggtgatcgcggcgaccatcgccgccgccaccgccgtccacacgctggcgcacgtcacctgcgacttcccgaggctgatcaactgccccagcgacaagttcatggcgacgctggggccgaacttcgggtacaggcagccgacgtacgccgacctgctggagagcgcccccggcgtcaccggcatcctcatgatcatcatcatgtccttctccttcacgctggccacgcactccttccgccggagcgtcgtcaagctgccgtcgccgctgcaccacctcgccggcttcaacgccttctggtacgcgcaccacctcctggtgctcgcctacgtcctcctcgtcgtgcactcctacttcatattcctcaccagggagtggtacaagaaaacgacatggatgtacctgatagtcccagtgctcttctatgcatgcgagagaacgatcagaaaagttcgagagaacaactaccgcgtgagcatcgtcaaggcagcgatttacccaggaaatgtgctctctcttcacatgaagaagccgccgggtttcaagtacaagagcgggatgtacctgtttgtgaagtgccctgatgtctctcctttcgaatggcatcccttctccatcacttctgcacctggagatgactacctgagtgtgcatatccgtacactaggtgactggacgactgaactcagaaacctgtttgggaaggcttgcgaggcacaggttacttctaagaaggctaccctttcaagacttgaaactacagttgtggcggacgctcagacagaggatactaggtttcctaaggtccttattgatgggccctatggtgcaccggcgcaaaactacaagaagtatgacattcttttgcttattggtcttggaattggtgctactcctttcatcagcattctgaaggatctgttgaacaacattaaatccaacgaagaggtggaaagcatacatggttctgagataggcagcttcaagaacaatgggccaggaagagcttacttctactgggtgaccagagagcaagggtccttcgagtggtttaaaggagtcatgaacgatgtcgctgaaagtgatcacaataatattatagagatgcgcaattacctgaccagcgtgtatgaagaaggcgacgcaaggtcagctttgattgccatggttcagtcacttcaacatgccaaaaatggtgtggatatcgtctccggcagcaggattcgcacacattttgcgaggcctaactggagaaaggtgttctctgacttggcgaatgcccacaaaaactcacgcataggtgttttctattgtggatcccctacactcacgaaacaactcaaggatctttcaaaagaattcagccagacaaccacaactagattccacttccacaaggaaaacttttaagaccgtaccaaaggacgtctaaacagactgcatatacttgtataggaaagaaatacgatagcattgggatagcaaatatagtcttacaagttttgctctacgatggattgtacaaaatatatgttgaaagctagtgtcaccatcgtgcatagattctggaatgtttacagatatatgtattggaacagtgggaatgcatgttagaaaaattgagttccaggtggtgcgccttgagcatgc

SEQ ID NO: 15493 - DNA, 3416 bp, Oryza sativa
  ref <308>: DATABASE ACCESSION NUMBER: AK066014
  ref <309>: DATABASE ENTRY DATE: 2001-12-06
ggtccgcatccaattcccgggccattcgaaatccccaacaccagtagccggccgcggcatgcagttcctctcgctctccgccgccgccgcctcctcgccggcggccgccgtcctcccaccgaagccattcaaacccctctcctccgcggcccccttccgtcgcccctccccgcctccgccgcctccgtccccggtgccctcacccgcgccaccgccaccgccgcatcgcccttctccttctcctcccccgaaccccctctcctccaagctatggctgtccagcaagctctccccgccgccccccgagacactagagcagccagagccttctactactactactactactaccccgccgccgccggaaccggaggcggaggcggaggcgcggcggcaggaggaattccggcacaaggggaaggtcttcgtcgggaaccttccactgtgggccaggaaggcggagatcgccgagttcttccgccagtttgggcccctggagaaggtcgagctcgtgcgcggccacgacgatcccgagcgcaacgtgggcttctgcttcctatactacggaggacgacgcggacgccgcggcggagcgtgcggtggaggttgacggggttgacttccgtgggaggtcgctcaccgtgaggcttgacgacggcaggaaagggagggccagggctgagcagcgggcgcgctgggtgaacgacggccggaggcgcgagccacggtcgccgtggcacgagggcagggacgaggcgtgccgtgagttccgcagggtggtggaatcacggcccgacaactggcaggccgtcgtctctgcattcgagaggatacccaagccatcaaggagagaattcggtctgatgattgtttattatgccaagcgaggtgataagcatcatgctcgtgcaacatttgagaacatgagagcaagaggaatagagcccaatgcatttgtttttacaagccttgttcacgcttatgcagttgctagagatatgcgtggagctctgtcttgcgttgaggaaatgaaatctgagggtcttgagctgacaattgttacctacagtatccttatttcaggattcgccaaaattaatgattcccaatctgcagataacttgttcaaagaggctaagaccaagcttagcagtctcaatggaatcatatatagtaacatcatacatgctcactgtcaatctggcaatatggaacgggctgaagaactggtgcgtgaaatggaagaggatgggatagatgctcctatagatgtatatcacagtatgatgcatggatataccatcattcagaacgaaaataaatgtctagttgtctttgaacggcttaaggagtgtggctttaaaccatcaataatctcttatgggtgccttcttaatttgtatgtcaagataggtaaggttgccaaagcattatctattagcaaagaaatggagtcttgtggcatcaaacataataataaaacatactctatgcttatcaatggatttatccatttgcacgactttgcaaatgctttcgccatatttgaggaaatgctaagatcaggtctacaacctgatcgtgccatatacaatttgcttatagaggcattttgtaagatgggaaacatagatcgtgctatttgcattttggaaaaaatgcagaaggaacgaatgcaaccatcaaatagagcattcaggcctatcatagagggatatgcagttgctggtgatatgaaaagtgctttggatactcttgatctgatgcggcgaagtggttgtgttcccactgtaatgacttacaatgctctcattcacgggctagttagaaagcacaaggttcaaagagctgtctctgtgcttgataagatgtccatcgctggcattacaccaaatgagcatacatacacaatcattatgagaggttatgctgccagtggagatattgggaaggcttttgaatacttcaccaaaataaaagagagtggtctaaaactcgatgtgtacatttatgaaacattgctcagagcctgttgcaaatcagggaggatgcagagtgccttagcagtcactcgtgagatgagcttccaaaagataccaaggaatacatttatatataatattttgattgatggatgggctcggagaggtgatgtttgggaagcagaggacttgatgaagcagatgaaagaagatggtgtccctcctaacatccatacttatacctcctatataaatgcatgctgcaaggcaggagacatgcagagagcagaaaaggtgattgaagaaatggtagatgttggactaaaacctaatgtcaagacatatactaccttgattaaaggttgggcaagagtgtcacttccagacagggcattgaaatgctttgaggagatgaaacttgctgggttgaaacctgatgaggcttcttatcattgcttggtgacttcacttctgtcaagggcaactgtaatggagggaagtacctacacaggaatcattagtgtctgtagagaaatgtctgagaatgatttgactgttgatcttcgcactgctgttcactggtctagatggcttcacaagattgagaggactggaggggcactaacagaagcgcttcagagaatatttcctcctgattggaattcattagaatttttaggagagccatccagttctataagcatgggggagtctgatgattacagtgattcagattttagcggtgatgaagatgaggatcataatattgatgatagctgaaaaactctagattccagagcctgtttttcttgttctgtgccctcactttttgtcctttggttctgccagagtggatgaccgaacaagcaatgtctttgatcaaactgtgccctcacattcagacaccagtggcttgtggactatccaagagcgtttggaatcttatagtgcaataagcgtgagctggctggcctctgctgcgtttcttcaagagcaacagtcagtaacagttctactgggactgaagacacaggctgtcaatgcaacagacgaagcttactcagttatgcgtgtagctgtacatatcaatggctggcacagagaggccaacaggagctataaaatgatgttccgattgctgttaattacctggaaactgtactgtactgggcgagtgatgaaggtaggatggaagcgccaagctgctgtgaacaactgagggaaaattcaggtgtaatttcctctctagtctctagaattacaaggcaaggtatatatttttaacgtttttgtttatgaatagaagatgagctatgcttagattatggattgtatagtacccgcccattgaggctgggctgggtcctccagaatatatacccctgcatgtgtcactgacatcatttggtcgacatgatagaaatatttgggagc

SEQ ID NO: 15494 - DNA, 1474 bp, Oryza sativa
  ref <308>: DATABASE ACCESSION NUMBER: AK066015
  ref <309>: DATABASE ENTRY DATE: 2001-12-06
gattctctcccaaccacactctcccgcaacggccaaatcgacgctagctatgctaaccagctcctcctccaactccaattcgctcaccctctcctattctctctcttcgccacgctctcatcccaggaaggaactcgacggggaggattcaggccaggtacctttgctgcttctttctcaattatttctcctgttcctcttctgcattcgtctcttgagagttcacaactgcaccgaatttcccccctcctttgttttttttctaatcatgcggttttgcggtcataagcatgacgaaatcttgaacaataggatcggttcttgcgctctttgtcactacaactgcaagccatgaggtttgtgcaggttccaattaatcgtgctactgcaacattgcaacctgttccatcttttggtttattattatatatgttccgtaattagagcatggatttacaagtttcaatatgtatgtccatctgtccattcagctttggtgcagctaagctagcaattaacaaacagttggaccatatctgcaagcacgaacaacttaatttgcttaataatttgtgtgtaacaatatgttgccgtcagatatatcttcagttttgtgttacacctatgctgtgggatggacgaagctccggcacctctcggttcatccgcctctcaccaagaatcagagggagatcaatgccaactgcaagctgatcggagccatgcatcagcctccaatgacagcagcagcaaagcgtcggatcagatggccaaccgctccgttcagacgcgcatcgacaccacggcgcccatcgattccgtcaagggcgccgccaacaagtttggaggaagtcttgatttgagagaagtaacttaattacatcgatctccattgctattgatcttgtggttaagcttaagccagtgattagcattttgattttttttgtgtgatttgttgtgtctcagaggcgcaagcaagcgcaggatgagcttgacaaggtgcaggaaaaggtgagcgagtgcctgaagggatcacaagaagcggaagccgggagggcacaggcggtgaaggagctaggcggcgccaatggcgtgatcgatgagctgacgctaggcttggagatggcgtcgccgcgcacggggctcgcggagatctccgtgttcgacggcggcgaggggcgcgggaacccgcacatactgagcccgagaggagggtatatgccgaggactgagatggcggcggcggaggtggaggcgggcgcgaagcagaggcctaccttcttcccgcgcatggtgatgtttctggcgcgcaagagagctcagaactggaagtgagatcttcctctcttccgcattttgaatttgtgtttgtacaactacatggtatatacgtgcccagatcagatgatgaaacttaacttgtgtaacatctatcgatcaaagagatatagctcatgaaattttttgctcg

SEQ ID NO: 15495 - DNA, 1549 bp, Oryza sativa
  ref <308>: DATABASE ACCESSION NUMBER: AK066016
  ref <309>: DATABASE ENTRY DATE: 2001-12-06
tacctcgccatcgctctcctcctcctcctccatccattcccctcctcctcctcctcctcccatgcatgggaggccgtcgaggccattagcttcctcctcgtcgtcgtcgtcgtcccgcgtcttctccttcttcttggcgccgcgggttttcttgttcttggtggtggtggtggtcgtcgtcttcttgccgggtcggtcgtcttgctggtggctggagggcacggaggagttggaggaggagatggggtttgccggggactgctcgccggtcagcggtggcgggctcagtgaaaacggcaagttcagttatgggtatgcaagtgctcctgggaaaagggcttcaatggaggatttctacgagacgagaatcgatggtgttgatggagagaccattggattatttggcgtattcgacggccatggcggagctcgagcggctgaatatgtcaagcagcaccttttcagcaatttaattaagcatccaaagttcatcagtgatatcaagtccgctatcgctgaaacgtacaaccatacagattcagaatttctgaaagccgaaagtagtcacactagggatgctggctcaactgcctcaacagctattcttgtaggcgatcgcttgctggttgctaatgttggagattctagagcagttgtttgtagaggcggggatgcaattgcagtttcaagggatcacaaacccgaccagtcagatgagagacaaagaattgaggacgctgggggcttcgtgatgtgggctgggacgtggcgtgttggtggtgttcttgctgtttctcgagcatttggtgataagctattgaagcagtatgtagttgctgatccagagatcaaggaggagattgtcgatagctcccttgagttcctcatccttgctagcgatggactttgggatgttgtaagtaacaaggaagctgttgacatggtgaggcctattcaggatcccgaacaggcagcgaagaggcttctccaggaggcgtaccaaaggggtagcgccgataacatcaccgttgttattgtccgctttttggagggaacaacgactggtggtggaccaagtagggaggccgccagcgaccaaaactcatagtttctcccaggcagcagcatggcttgttcctgtctgtcatatctgatgctcaaggtagacgattacagtggcggcaccacccaccatgctgccaagaactgacccggcccgaatttcgtcctcgctttcatgctcctggctgaccttaggtggtgatggtggtggtaatgtaggagcagaatggcgatggggccagtgttgttacatatgatatgatcgaaggtgtatcgtgtcttatatataactttgcaatgtagattctatgcttgtgttccatgctaggtcttttttttcttttttagcatcaaatgcatgtaatagaagtaaatttaaacgatttgaacgaagttatacactgcagtatgtaacgaaatctttgcgtttgtatttctgatgccatgagcattatgatttctcataagctccgagggtcaaaactcc

SEQ ID NO: 15496 - DNA, 2235 bp, Oryza sativa
  ref <308>: DATABASE ACCESSION NUMBER: AK066017
  ref <309>: DATABASE ENTRY DATE: 2001-12-06
ggggaaactatcttctccacaaataactatctcctcctcctcctcctctccccatcagctccgccgctcgccgccggccaccctccccccttccatggtacaccatgcttctggcggcggcaactgccacagcagcgccggtgtcgtctagctctagcttcttcgccgcgacgacaagagccaccaccaccacccgcttcactgcccagctccagctctcgctgccacgccggtgccgatcctggtggggcaatgggaaagcgcgccggagcagccgccgccgcagccaccattgctgggccggtggcggcgccgcgacgccggaggaccacatggacgagctgccgccggggagaggccgctaccacccgttcgaggagatcgccgagaagctccaggtcgacgacggcgagcccgcccacctcaccgacgccgagtccgcacgaaccatcgtcgaggtgaacagcaaggcgacggtgatgatctcgacgctgatcgacgagggcgtgcacgagaggatcatcctgccggagttcccctacctcaccgatgagaacggagatatttacttcgaggtcgacaacgacgacgccctcctggagagcatcatgggagacgacaagactgcgcatgttatcatagggcttgacaacactcaggtctttgctgacttggatctggcagcggcatctgcgactgagtttgctcaagaagacgatgacgacgacgatgatgatgacgactcggatgatgaggagagtgactttgacgatgactttgatggggtgatgaaaaatccttctcaggaaattcagggttcttgattactttgccaattgcaattggtgattggattttccttgacactgctgcatctctgaaaacattgcaggagggtgtgtttgcagtcgatgacgacgatggcgatgaggatggagaagacgaagatctgcctagatggacagatctagaaaccatgaattcctgccatccattgtactttgcaaggatgattgcagagacctcaaccaagtctagtatagactggttggacagaccacctgcaagccttgttgttgagggtcaactgagaccagcctttgctgaagagagcaccatggtttcaaggcatttatcaaatgatgaaccacggaaagataacaaggagagtggtgctacatttttcaaggttgaggttctgagcattgagctgatcactgcatatggaactgagccaaaggtaaagataggggaataccggaaagctaggccagatatcattgcgcattctgcaccgaacataatatcgcgcttgagagctggtggagacaagataagccaggctctgaaatcactctgctggaggtgcaaggccatccaaatagaggaggcagctgtcattggagtggactgccttgggtttgacttgagagtgtgctcaggaacacaagtgcagacactgagatttgcgttccctgcaaaggccacttcagagtttggtgcagagaagcaaatacacgaacttctgtttcctaggatacagcaagagggacagtcaccacaaactagacagaaagagtcttgatgtaattcggaggagataatttattcatttggtaggaattactagctaaaataaaatatatgccacatgtcctttttcttccatttatccatggggtagaatttttagattccagttttgtgtcattgtagattgattttatgtatcaatctaccaaagtatttcaaaattctttagacctgttgaggaaagcacagataagagaagcactgtaggagcctctgaatatttggatggcaatcgatacaaataagacgtgccagcaagttcagtagtcaatttataatccagagaacagcaaagcaatgtaacattagatggtttgtgtgaaccaaattgtacacaaattcttcttgagcgagtcagtctcaagttacactagtcaagtagtcagcatcacctgaaaaaccgaaggctctacgggttcatttgttcagcaattcctgaaggagtggtacatgaagtggggaaacgaaaaggatgtaaccacagataggtacatatttccttctaacagcaggatctatgaaggttaggaaaacatatgcccacaggcatttccaaacacacaaccttaatgctgaaccatggggatgaatcttgtacaacttgattactcttgagctgttgcttgttcagaagattggtcg

SEQ ID NO: 15497 - DNA, 1624 bp, Oryza sativa
  ref <308>: DATABASE ACCESSION NUMBER: AK066018
  ref <309>: DATABASE ENTRY DATE: 2001-12-06
ggaacttcacaagaactccaccgagaggagaggagaggagaggaaacgacgacacctcctccggcgcggcgagacgaatctacgcgtaccgagtaccgacgcggcgaccgcctcgctccgtccctatcctcgccgctccggctgattccgtcgcggagcgcgcgcggccggcgaggagtcctgggagggcgaccgacgcagtcggcctccttccatctcggttcgaatcgaatcgaattgaagcctgccagtgaaaatgagtgacaatctgatggacaaggttagcgcctttggcgagcgtctgaagatcactgggtcagaggttagcaagaagatgacggctggcatgtcctccatgagcttcaagatgaaggagatcttccaggggcagactcccgcggacaagattgtggaggaggccacctcagagaatttggacgggcctgattggtcggcaaacctggaaatctgtgacttgatcaacacggagaaagttaacagtgtcgagctgatccgtgggatcaagaagcggatcatgctgaaggatgctagggtccagtacctctccttggttcttcttgagaccattgtgaagaactgtgagaaggccttctcggaggttgctgctgagagggttcttgatgagatggtcaggttgattgatgatcctcagacagtggtaaataacaggaacaaagcccttatgcttattgaggcatggggagagtctggtgatgagcttcggtacttgcctgtctatgaggaaacctacaagagcctgaaatcaagaggagtgcggttccctgggcgtgacaatgagagcttggcccccatatttactcctgcgcgttcagtagctgaagctgaagttgatgcaaacttttcccagcagaccttcgaagatgtgcaagtgcatacatatactgctgaagaaacgaaggaagcttttgatgtggctcgtaacagcatagaacttctttcaactgttctttcatcctctcctcagcaggatgctttgcaggatgacttgacatccactcttgtgcaacaatgctaccaatctcagcacactatccagagaatgattgagactgctggagacaatgaggccatgctttttgaggccttgagtgtgaatgatgagatccaaaaggtgctgtccaaatatgaacagatgaagaaacccgcagcgtctgagaacgcagaacaacggccggtagtcataccaattgccacagaacatgaagattctgctacggtcggcaatgaagatgccctggtcagaaaaccagctggttctcgagcaaggtcaggtggagatgatgatatccttgatgatctcgatgagatgatatttggcaagaagggaggaagcagttcccaagaagggcccaaaaagcaggatccgaagaaagatgacctaatcagcttttaaataccgttctggccagttcctcgtggaatcagaagatgtttgctgtttcatagtgccgaacgatatctgtattcatccccgtagaagatttcacattcgccaggatttggatcgcttgtttatttgcatacgatctatcatacttgtctgtcacagtttgttcggttgatttaagttgcttcacccttc

SEQ ID NO: 15498 - DNA, 983 bp, Oryza sativa
  ref <308>: DATABASE ACCESSION NUMBER: AK066019
  ref <309>: DATABASE ENTRY DATE: 2001-12-06
ggtgtggccttggttgcttcggaatctcaccacccaacccgttcggattagatagcccgcttcctcctctctctctcagctcaccacacctcgagtcgccgccgccgccgccgctgctgctgcttacctcctccgcgccgcgcactccttgcactagcccatggcgacggctatgatggctgcgaccgccacctcgtgctcccctcgccgcgcgccggtcgtcgcgtcgtcgtccgtgcagccgcccaggcggcagcagcagcagcaaccgcggaggggattgaagcagctgccggggctcgtggcgacggcggccgtggccgtggccgcggcgccgctaccggcgctggcggagcagatggagaaggcggcgctgttcgacttcaacctgacgctcccgctgatcgcgaccgagttcctgctgctgatggtggcgctggacaagctctacttcacgccgctgggcaagttcatggacgagcgcgacgccaagatccgtgccgagctcggcggcgtcaaggacgcgtccgaggaggtgcggcagctggaggagcaggccgccgccgtgctgaaggcggcacgcgccgagatcgccgcggcgctcaacaagatgaagaaggagaccacccaggagctggaggcgaagctggacgaggggcgccgccgcgtcgaggccgagctcgtggaggcgctcgccaacctcgaggcgcagaaggaggaggccgtcaaggcgctcgacgcccagatcgcctccctcagcgacgagatcgtcaagaaggtgctcccatccgcgtaatggccgccccgccgccggccgttcttgcctcccaaacaccaaccatctctcgtaaaggttttctccgtgttttatccgtgtgtatacgctgcttctcctaagaatgtaatttcagtgaacttctcgtgataagtataaaatcaatgatccttttgctagaaattggattgaaattataaactgcttt

SEQ ID NO: 15499 - DNA, 4001 bp, Oryza sativa
  ref <308>: DATABASE ACCESSION NUMBER: AK066020
  ref <309>: DATABASE ENTRY DATE: 2001-12-06
gactgctggtccggtcctcgcctgctgagtgctggctgctgcagctccaaggcaacaatggtgagtgggaggtccatcacctccggcgccgccgcgccgtgccacctgcgaccgacggaccggcacaccatggccgcgtgccgctcgcggcagcgaccacctctgccccccaaaacaagggcaaagggcccggcgcgccgctccggtaagctccatcgtcaaccgtctccgcgaggcacgcatcgtcatcccctctcctctcctcttctccgccgaggatctgctgtctcgggctcttttttttagggtttagggtacagtgctcgatcctgtaataattctgaaaaaaggcagtgcttttcgtgtctctgaatgccacatcacaatgcccaaatgccacggttgcaccgattttattccgtttctcactgtccaaatgccgcatcacgatcgcgccatgattattttttttttagccctcctcaccagctaacttttattcagataaaagggaatgattttttacagggatgggttattgggggaactacaatacaacatcactggtgaaactgaaaacaaccaagagacaggctaactaaaacatgttcagaaacatcatcaagctaaaccggatttttattcagacagaagggatttgttttctgatttgagattgcagccacatcaacatcaaagataggagatatttcagagcacacaatcttttcgttgaagactgggccacatgatgttggcaagagcaaccacactgttagttagggagaaaattgaattgcaggcagaacaagtccaagtttgcaaatccaggagagaccaggattagtgaaaagccaaccaattgatgcttgtcttgacttgacctggcaatagggttaggtagccaaggagtccaatactggagggttgatcggaattcatggcgggtgcactggtgagcgcctctacgggggtcatggagtctctccttggcaagctatccagtatgttggagaaagagtacgccaagaagaaagcggtagagaaggatgtgctgttcctgcgaaacgagctgagcagcatgaacaccgtgatgcagaagtacgcgatgttgagtgagcccgacttgcaagtgaaggcttggatgaaagaggtaagggagctggcctacgacatcgaggacaccattgacgctttcatggctcggagtgaaaaatccaatgagcctacaggtatcagaggatttatcatcaacaatatcctgaaactgagagagctgctctcaagctgtactatttctcaagagattgaaaaactcaagaaccaagttctcgaggtgaacgatcgtagaaaaaggtataagcttgatgtatctgtgtccatgggtaccggctgtgaatcaattgaccctcgcctgccagcgttttattccgaggtaggtggacttgtcgggatcgatgggccgagggacaaaattatcaagttgctaagggagaatgcagctgatgaagattgtggatttgtgaatcgacttaagatggtgtctatcgcagggtttggaggtttggggaaaactactcttgccaaacaagtttatgagaaaatcaaatggcagtttgattgtgctgctttcgtgtttgtatctcaaatcccagatatgaagagggttcttttggatttgctttgtggacttggggcttctggtaatacatgggatgatgagaagcaactcattgacaagatcagagaatttcttcatgacaagaggtatataattgtcattgatgatatctggagcatatcttcttgggagatcttgaagtgtgtattgcctgggaacaattctggcagtagaataattacaactacacgtattcttgacgtatccatgatatgttgctctactttcaatggaagtatttaccgcatcaaaccattaagtgacgacgactccagaaggttgttttgtagaagaattttccacggtgagcattcgtgtccatcacatctagaagagctttcaaaagcaattttaagaaaatgtggtggtttgccattggccatacttcatattgctagtttgttggcaaccaaatctaacacaaaggaagagtgggagttggtgctaaattcaattggctcagcacttgaaaatagccatactctacaaggtctgaaaaagatactgttactcagtttctatgatttaccaccacaattgaagacttgcttactatatctcagtatatatccagaagattgcatgatcaactccaaagagttgataaggaaatggatagctgaaggatttatcgcggaagacagtgggaagagattggaccaagtagcagagagttatcttaatgatcttatcaacagaagcatgatcttacctttcgacattactcatgctgatggtgtacaatattatcaagtccatgacgttgtccttaacattatcatatctatgtcgaaagaagagaattttgtcacgataatagatgggcataagtgcagttctttgcaggaaaagatccgtcgagtatccctccagttcaatgattcagaagatgttgtagtgccaacaaacataacaaacagaagttgtgtccgttcactcagtatatttgggattactaagcaagtgccatattttatggatcttcaatctttgcgagtgttggacttaggttattgtacattgttacagaatcagcacattgaatgtttaggaagtatgcttcaacttaggtatctggttctccattctcaattaatcactgaacttcctgatgaaattgggaacttgcaacatctagagatgttagatgtcacattatgttccatacaagctcttccagataccattgttcgattacagaaactcgtgtgtctatatgtgagtactaaagtgaaactaccagaaatgattggaactatgcaatgtttagaggagctgttccacatatcaagcgactctataagattggctggagatcttaaatgtctgaaaaaactgagagatcttgcaatagctgttgaagaccctgttgggacaaagagctctacattgagatacagggaagtagttcggtcatcccttactgaattgggcagacacaacctgcagtcactctcactgaattacaaaggtgatgagaatttcattctggattcgtcgatgggttcatgcttctcaactcagcgtctccggaaacttatcattgggaaaactctttccagggtgccagagtggatgagtatatttgacaatctcacacacttacaactgtgcatctcaaggatggaacagagtgatattaacatactcaaaggaattgactctctgatctttctccgcctcgtatttacagggcatgctcctgatggaaggatagtcatcgacaaccgaggatttcaagctctcaaggaattatatcttctatgtttcattcctgggatgtggccagtgttcgagccaggagctatgcaagaattacagaagtatcacctcactttcaagctacagaaagtacattgcaagaatagtgttttggactttggtctccagcatctttcaagcctccagcacataagtgcgataattattccatctggtgctaccagtgaggacacattggttgcagaggatgccatcaggagtgctacaagtatccatcccaaccaaccaatagctgaaatttttgtcgagtaaaaaaaatggtaaccggccagttataggttttctacgagtcaaaattctccccgaaacaagtagacctcattttcatgtgtctttgtgttatatgctcctctgttctggttgcatttgagaatgtatgcctttgttagtataaccctttcacaagtgaagaactaattacattagtcctctgatactgtagtcctaatgctctttttaggtgaggatagttgtactctaactcttgtatattactgattttatttttgtggttgtatgctaagttatttatttgctc

SEQ ID NO: 15500 - DNA, 1465 bp, Oryza sativa
  ref <308>: DATABASE ACCESSION NUMBER: AK066021
  ref <309>: DATABASE ENTRY DATE: 2001-12-06
ggtggtttttggtggctcctgattcgtttcctccgtctcactcctactcctcggctgcccccattcttctctggatatttttctttttcatcttctttgagttggagggcttgattttaggggggactgctcgatcggcagggttaattccgatctctttaaccttcccggatcagagccgggatcagtattaggctttttgctagaagcacaaaacaaaaggaatgctggaagatgtgcttctatgatagagagctaccttgtgtgggaattggaaaggtagctcaaaatatttatgctttgtgtgctcttgatgatagtgaagtacgggtttatgcacagcaagtgctccttgtgcatttgcacgatggggctagatgtggcagttcaaccatcatgttagattaccatcttgttggggacggttgaaattatttttcatttattgcctctctcatctgatactccctcatcaatcatcatcactaagttacatgattagtgctttctgaatacataaggcatttgataagatggtagaacaaaaggggaatattttgatgaagagatatgagataggaaaattacttgggcaaggaagtttcgctaaagtttaccatggccgtaatattaagaattcactaagtgttgcaatcaaggtgattgacaaagaaaagatattgaaatgtgagcttatggatcaaataagaagagagatttcagtgatgaacctagtaagacatccgtgcattgttcaattgtatgaggtgatggctaccaaaactaagatatattttatcctagagtatgtgaaagggggagagttattcaacaaggttcgacgtggaagactaaaggaagaagttgcacggaagtactttcagcagttaattagtgctattgacttttgtcatagcagaggggtttatcatcgtgatctaaagccagaaaaccttcttcttgatgaaaatcgaaatttgaaaatctcagactttggtttgagtgcacttgcagaatgtaagagacaagatgggttgctccacacaacttgtggaactcctgcatatgttgctccagaagtgattaacagaaaaggatatgatggtgcaaaggctgacgtatgggcttgtggagtgattctttatgtgctattggctggttatctcccatttcaagataaaaatgtgataaacatgtataagaagatatgcaaagcggaattcaaatggccaagttggttttcttctgatatccgaaagcttttgcgacgtattcttgatccaaaccctgcgacacggatctcagtttcagaaattatggaagatccttggtttagagtaggtcttaattcagatctacttaacaagaccataccaacagataaagttgataaagttgtgcatgttgacatggattcaacatttggtaatttaagcaacaatataaatgaaggaaaacaagaagc

SEQ ID NO: 15501 - DNA, 1354 bp, Oryza sativa
  ref <308>: DATABASE ACCESSION NUMBER: AK066022
  ref <309>: DATABASE ENTRY DATE: 2001-12-06
gttctcccgttcatcccttcactcacttccctcctccttatccacgaaatcaggaggcgcggcgagggcggcgctcacagccggcggcgggcggcgggcggccgcgtcgtccctcctccttccacgcaccgcaacctcgggcaggttggcgcatgtcgagtgcggcggtgaatggattggctggtgccggtggtggcatcatcgcccagatcatcacctaccccctccagactgtgaacacccggcagcagacagagaggtcagcaaaaaagaagaaggccaatggcgcagccatcgccaatacttccaccctcttccagatgctccagctgttccaaacagaaggatggggagggttgtatagcggccttaaaccctctcttattggcaccgctgcttcacagggaatctattactacttttaccagattctcaaaaacaaggtggaagatctagcagttgctcgcggtaagaagggtctaggggatggtactgttgggatgttctcctggcttggtattgcagctgttgctgggtcaatcaatgttcttcttaccaatccaatatgggttctcgtgactcgtatgcagacacatacacaagcagaaaagaagatcatggagtctaaaaaggagcttttgctgaaggatgttgctagggccaattcaatagaggtctcaattcttaaggacaggttgtataaacttgattctgaaaagcctcgtccatatgggacaattcaagcggtccgggaggtctaccgtgaatcaggcataagaggattctggaaaggacttattccaacactaattatggtatgtaatccatcaattcaatttatgatctatgaaacattggcaaagcgtctccggtcaaagagatctggaaaggaactcccaaaaaagaaccttactgctatggaggtattcttattaggtgcaatagcaaagctcggagctactgttgtgacatacccattgctagtggttaagtctaggttgcaagcaaaacaagaaattggcaggaatgtgatgtccagatacacaggtacgattgacgcgatcataaagatgatccggtatgaaggattgcacgggttttacaaaggaatgggtacgaagattgtacagagcgtctttgccgcctcagttctttttatggtaaaagaagagttggtaaaattcgtagttatgttaattgctaggagtaggactgtgctcggtcctagctctaagaaacgataggcagtttatatatatcgaaacaatttgcaacgacctcttcgagactatatatcgattatttacaagataggaaacccaaaatgtctccaaatactaatgcttctcttctc

SEQ ID NO: 15502 - DNA, 2693 bp, Oryza sativa
  ref <308>: DATABASE ACCESSION NUMBER: AK066023
  ref <309>: DATABASE ENTRY DATE: 2001-12-06
gcttggcttcctccgccgatgcttccctcctcctcctccactcccctctgaccgatggcttccaccccctccctctccgtctccgccgccgccgccgtcttcgcgtcggccgctgacccccgcaggccgccgccgccctccgtcgccatcgtcgacaagaatagttcatatggcaggagcttgcaggcggctgacaatggcggcggcggcggcatggaggctccccttcgacctctggatgtccaggaagcgatgaccatgctgacggagggcaaggcggtgcagtcagcgatgtacgtgccgctgctgcaccggtgcgtcgagacggggagcctcggcgccgccagggcggtgcacgggcacatggcgaagacgggcgccagcgccgacatgttcgtggcgacgtcgctggtgaacgcctacatgcggtgcagcgcggctcgggacgcccgcaggctgttcgacggaatgcccgagaggaacgtggtcacgtggacggcgctcgtaacggggtacaccctcaactctcagccggcgctgggcctggaggtgttcgtcgagatgctggagatggggaggtacccgtcgcattacacgctcggcgcgacgctgaacgcgtgcctggcatcgtgcgatgtcgatttggggaagcaggttcatgggtatgcgattaagtacggggccgagtcgatcacgagcatggggaactcgctttgcagtctgtatgccaagttggggagcttggattctgcgttgagggcgttctggaggatccctgagaagaatgtgatcacgtggacgacgatgatatctgcgtgtgccgaggatgaggaatgcgtggagcttggaatgagcttgtttatcgatatgcttatggatggggtgatgccgaatgagttcacattgacaagtgtcatgagcttgtgtggtacaaggctggatcttaacctgggaaagcaagttcaggccttctccttcaaaattggttgtgaaacaaatcttccagtgaagaactcgacaatgtacctctatctgagaaagggtgaaactgatgaggcgatgcggttgttcgaacagatggaggatgccagcatcatcacatggaatgcaatgatctcaggctatgcccagatcatggactcagcaaaggatgatctccaggctcgatcaagagggttccaggcgctcacaattttccgcgacctcaagaggtctgtgatgaagccggatcttttcactttctcaagcatcctatctgtttgcagtgccatgatggctttggagcagggtgagcaaatccatgcgcagacgataaagagtggcttcttgtcagatgttgtggtgaacagcgcactggtgaatatgtacaataaatgtgggtgtattcaagatgcaaacaaagcctttcttgagatgccaacacgaacttttgtcacatggacttctatgatctcaggctactcgcagcatggccaacctcaggaggcgatacaactcttcgaggaaatgagattagctggggtgaggccaaatgaaatcacatttgtaagtttgctctcagcttgcagctatgcgggtttggttgaggaagctgagcattacttcgacatgatgaagaaagagtattgtattgaacctgttgtggatcactatgggtgcatgatcgacatgtttgtgcggttggggcgggtagaggatgcattttcctttatcaaaaggacaggttttgagccgaatgaggccatctggtcaagtttggttgctggatgccggagccatggaaacatggaacttgccttctacgctgccgataagctgcttgagctcaagccaaaagggattgaaacctatatcctgctgttgaacatgtacatttccacagagagatggcaggatgtggcgagagtacgaaagctgatgaaacaggaagatgttgggattcttagggaccgcagctggattacgataaaagacaaggtgtatttcttcagagctaatgatagaactcatcctcaagcaactgagttgtatcaactattggagaatctgttggagaaagctaaagccattgggtatgaaccatatcagaatgcagagttatctgatagcgaggatgatgagaaacctgccgctggatcactaaagcaccacagtgagaggttagctgtcgcgctagggctgctgcaaacacctccaggtgccacggttcgcgtcacgaagaacatcaccatgtgcagggactgccacagctccattaagctattttcgctacttgaaaacagagaaatcattgtccgggacagcaaacggcttcacaagttcaaggatggccggtgctcctgtggagattttggtgctctattgtgagaaggatggaaatcttaccccccacatgctactctaggaactcaacagttttgtagtggaagcagggttacaagttacaggttgcacagaattcttttgatgaactgatcaccctttgtgatttttgtagatctttgtatgaaatcgaaatttataaactcaggcagtgtccccaaatgatctgtacacaaggttagcattataggacagtgaatacttgtgaatctgctgtaaatgctaaaatgctagcttcttaggatcagatctaagattttattgtttaaactcacaatgcaatatggcagtaacccccattctttgatctt

SEQ ID NO: 15503 - DNA, 2599 bp, Oryza sativa
  ref <308>: DATABASE ACCESSION NUMBER: AK066024
  ref <309>: DATABASE ENTRY DATE: 2001-12-06
gggaggccaatccgctcgctcgctcgctcgccggcgacccgaatccggccaggagggggggcggctggccggagctagggtgggtgggtggttggccgcaccaccttcctccgcgccgccggagcgtgggcagcggcggcggccggtgggaggaggggaagcatggcgggctccatggtggaccgggcgaccagcgacatgctcatcgggcccgactgggccaagaacatggagatctgcgacatctgcaaccgcgaccccgggcaatcaaaagatgttgttaaggcactcaagaaaaggattgggcacaaaaatccaaaagtccaaattcttgcgctgactctcttggaaactgcaatcaagaactgtggggatatattccacatgcatgttgcagaaagagatgtgttgcatgagatggtgaagatagtgaagaaaaagtctgatcagaatgtcaaagagaaggtattaactatgatagatacatggcaagaagcattcgggggaccacgtgcaagatatccacagtactatgcagcgtaccatgacttggtgcgtgctggagctgcatttccaaagagatctgatcgacctgcaccattgtttaatggccagtctccagcaggcagaaatatgcgtagtcctgatcagcaggatgaagctgaatcgtctgctggaaatgattttcctgctttgagcatgtcagagattcagaatgctcgtggtataatggatgtgctagccgagatgctaaatgctttagaccctggaaacagagagggactaaggcaggaggtaattgtggagcttgttgatcagtgtcgcacttacaagcagagagtggtactactagttaatgctaccgcggatgaggaacttatgtcacaagggcttgcactgaatgatgacttgcaacgtgttctcgcaaaacacgatgcaattgctgcaggcattgcagttcgagtggagaagaaacctaagtctctgcaggcacttgtagacactgaggattctatgaaccaagactctaagaaagagcaggcacttgtagatattgaggatcctacaacccaagagactaataaagaaccaagccaaagtgccagtgtgcagtcaccatttgagcaactagcgcttccagcacctccggtgtcaaatggctcagcaaccccagcaccaaaatccgatcttggcgtcgatcttcttagctgggatgacaacccatctacaacagaaaattcactagcgcttgtcccagttactgatccagtagttgattctactccaagtcaaaatgcactagctatcgttgacatattctctcaaaacaacacaaccaataacattgccaaacctgcggatccctttggtgttaattctagctctactcttcctggatcacagccatacaatgctccaacccagcatcctctgcaagcacagcagcagcctcagcaggtgggcctctatcctaatgggggagctgtgaaccctggaacatcataccccacaagttctgggtggaatggtcaaattgcgaacaatgcgacgcctccagcgcagcaaacagtgaattatgatgagcaaagtggagcccttcccccacctccttgggaagctcagtcagcgccaagcggcgacatgtcaaatggcggtatgcagtctcacccggtgtcaaacggccaatttggaggtatgccatctctcccaacaccatcaaaccagatgggtgggatgcagcccttgcacccgcagatgaaccagatgggaggtccacaagcccaccaaatgtacaacaaccaacaaccgggagccatgcaacccagccaacctgctgtaacccagatgcaatcaggctttgcgaaccaattcggttcgatgccaccacactccatgccaggaatgcaattccccgggatgcaaccttcgccgatgccaggagcgcagccagtcatgatgtatgcgcaaccgatgatgatgccgggtatgcagtttgcagccatgccgcaaccacgaatgtatggcccccagatgtcccagtaccggcttgtgcagcagcaagcggcacaatactacagcaacagccaagggaggccaacatactacgctggtatgaatgacctctcccagaaaatgtatggcctctccatgcaagacagctcttacatggggatgaacagctcgccctactctacaacaccttcatcatcatcttccatggggcaaccatcgaagcctgaggacaagctgtttggagatcttcttagcattgccaaaacaaagcagaacaaggcttaatgagaaacaatcaaatggagtattaaaaaaaaaagtgtgaagaggtctaatatctcttgtgtaattgttacacatttttttccccacgtggcttgatcatacgctgttgtagcatttgaatgtataatcttgttccggttttgtacgatgcccggccccgattgatttcatttgattcgttatacatacagtaccgtgtgtactgatcacggccgctgagaggatacgctggtaaattaattgatgatctagtataataagcatgtatttttcccccctctgatatactactgtctttaat

SEQ ID NO: 15504 - DNA, 2327 bp, Oryza sativa
  ref <308>: DATABASE ACCESSION NUMBER: AK066025
  ref <309>: DATABASE ENTRY DATE: 2001-12-06
ggctcgctccgcgcctctctctccccgctcgcgtcctcgctctgcgcctcctctcctcgcgacggtccaccgccggaccagcgacctcgcctcctcgctccgcctcaatgccggaccagcgccgaggcactaccgcactgctgcccacggccaggcacggtccagccgcctctgaccggcaccacagcgcctccgctgctcgcagggacgccgccgctacccgcccggctacctccgttgccgccgccaacacgctagtctcctcctccctgatcgagatcgagtcgacacatacaccaccaaccaccggccggccgccgcgcaccggcgagcaggatggggaggccgccgtgctgcgacaaggttgggtgaagaaggggccatggacgccggaggaggacctgatgctggcctcctacatccaggagcacggctccggcaactggcgcgccgtgccgaccaacaccggggtgatgcgttgcagcaagagctgccggctccggtggacgaactacctccggccggggatcaagcgggggaacttcactgagcaggaggagaagctcatcgtccacctccaggctctcctcggcaaccgttctctaccataatcgtggtccacaacatagccgtgctttctgaatactttcaatggatagtcaacgaagctctacactacaaatttctgcaataacatgtgatttcaccaatgaaagatggaacatttattgattgggatattgttgacaatatatggaatcatgctttcaggtgagttgctttatctatttgatgcagatctgagtaattttgtgccaaaagtgcacgcccaaaaagctggccacacttgtggcaaaacttgtctgaaaaataaatctatgacatgagaggcactggagtaaccaggtttggcacgctgcttatgtggttcgccaaacacttgcccgttgccgcaaaaggccgaacgtgcctaacttgtttctggggaagtttgggatgaaccaaactctatctttaacatagtttctttagaatcagcaacaaagttaatcttctatgcctctatggaatcttttggatgtcagcatggttactgctttatgcccaccatcttttcaccttacatatttatttatgctcttcaaatatactaatagtgaaatcccttcttatgtgtacaaccggataaagttgattaaatactaggatttcctttgtatggcatggagatgcaactactgaagttttttgctttgttagcttttatcctgaggagcatcctatgttgatagttgaaccatctacaaacacagggcagcaaagagagaagtatgtccatatgttctgtatttaaattaattgtgttgcttatgtggtcctatatctaaatttaacaattctcaaaacctttttatcttttttgtatcgtgggttgtcaaaataagcaactatagtatttctacgtaaaacacccataaagggtatttcaatcgaaatcccaaaacaggatattggttctttcgcttgctcttgatgatactgtaatggaatggcaaacctatttcttcgcattttggctaacaaatctgaattattttgaagaatagaaggatagacaaaattccaatgaccattggacatgattcgatctggcgttgaataatcaagaatttccctatcttttttaacaaaagtatccattaaggtgtttcttttatcatgccatttttgttatttatcagtttttttggaacaaaaacaatgtattttcttagttgatgctttatgcaggtatctattgactttaaagatcatgaaggcataatgcatatatcaaggctttgacatggtcttcgtgcaagaataaaatgccattttgtgttcgtcaacaagtgttatttatttttaatcaacaattgtttgtcttacttcaggttcactgatctaatgttttagtcttgcacctgtcacttgctaataatgttgtaaccttgctcctgtcacttgatagtatttcaaataatttccaatattatttgtgcagattatataaggtcgctttaagattaccatgttcagattcttctgccggccctgttatttacattatgcattggactattgagcctggttgtttttggaggaccagggagcatggctggagtatcatctagaggataacctgatgtggattatgcacttggctttgtcttgacaaataatatatgcggtattgcttgtaagagaggtcttgttttctgatcttatcctggattgtattaaggacaattcatgtggattaaggagaattcagaaacaaaatttgg

SEQ ID NO: 15505 - DNA, 3108 bp, Oryza sativa
  ref <308>: DATABASE ACCESSION NUMBER: AK066026
  ref <309>: DATABASE ENTRY DATE: 2001-12-06
gagggttttggaattagaagccgccgttgcgtgggagagcaaagtggaagcagccgaaaccgaaactagccgccgccgccgccttcgcctccgccgcgccgcgccgcaccactcgcccccaaggtccctaggggtttcccgcgcgcggagtgtggggaggaggaggaggaggaggaggaggaggaggcgggggggatctctccggcggcgaggatgaccggcggcggcgcggggggaggaggaggaggagggaaggggggcgcggcggcgggccccgtcccggcggcgtcgaggaagctggtgcagagcctgaaggagatcgtgaaccgcccggaggcggagatctacgcggcgctgcgcgattgcggcatggaccccgacgaggcggtcagccgcctcctctcccaagatacttttcaagaggtaaagagcaagcgcgataagaaaaaagaggttaaagagattcctgagccaagatctcgagcggcaagtaatgctgccagtcgaggtgtaagaggcggtgcagatcgaggcgggcgaaacagttcttttcactctagctccattgacaatgtggcttcaaggtcaatctcagggcctggtatgacatcaaccaattccactcagaagcaaacaattccaagttccttggtaaacaaaagtgtggttgctgatggaccgtcggtacctgcacaatcatcatctgggtttcagcacggttggtctgggacaccaggtcagttgtcaatggccgatattgtgaaaatgggcaggcctcaggtaaagcagtcctctagcaagcctgcggttactgcagacaaaggatatactggacaatacccatctttgcccagtactgtaaaccagaatttgaaacaatctgctagcacagtttcaccaacaaatcctgaccaggggttacattctgctcaagattctattcatcccaaggatcacaaccactcagcagctgtcaacaagcaggcatatgataatgattggcttccacaggacgagccaccaccaggaaatcaatcagccttgcctgagacatccggtgaccaatcattatatgagtcatcgctacagtcatctacactggttgctggtgtgattaacccccatgaaaattctcatttggatgagaacagatcagctgcattttcttccgagagacacttggaacatcatggaggcgattctgaatatgatgatggactgttgcaagaatcgagtacctatctgcctcagaagaattctcatgcagaagatgaagttgagggctccaattctgatgtagcgttagccactgaaaacttccagggtctaagcctacataatgaagagttagttccaacaaaattagctgaagataaccctgcagttataattcctgatcacctgcaagttaccggctcagactgtgtcactttgagctttggcagttttgaatctggagcattttctgggcttctccctgttccatcaaggagcgctgatgataacaatgtggagttgcctgttatagaggaatctgtacctctagatcaaattgattcaagagatcaagactattatgatagtgccgcagttaattcgtcaggaaatgagaaccttgatactatcataggaactaacatggagaacattgatgtaccttctgtttcacagcctgatgtcctgagacaggaagtgcttgatcattccggtcttcaatataacctaccatctgattcaagtgctgcatatgcaaacactacacagccaagtacaatggagtcctcacaaggaaacaaccaggcgcacactctttcccatctttcaaacttactgcaagcaaattcattacacaacagcctattggggtcaaacattgcacctcttcgggacttggacttcagtttatcacctttgctagcagcacaatcaatgacaaaatataactcagctgcaccaactactactggaccagcaatctccatgcaagagactctgaagccaggagttttctccaacgctcaatctacccaaaatcttccaagtactagtatagcaacggggcctcctctccctcagcaattagtccacccttactctcagcctactgtaccactggcgccttttgcgaatatgattggttatccgtatttggcacagaactaccctgctgcttacctaccatcagctgccttccagcaagcatactcgagtaatggaccattccatcagtctgctgctgctgctgtaccaggagctatgaagtacaatatgaatgtgccgcaattcaagaacaacctatcggctacaagcttacaacagcaaccttcttcagtgatctctggttatggaggatttggaagctctagtaatcttcctggaaatttcactcttaatcagaatgctgcctctgcatcaacaaatcttgggtttgacgaagcattgagcacgccatacaaagatcccagccaatatatggccctccagcagggtgacaattctgcaatgtggcttcatggtgctggttcaagagcaacgtcggcgcttccaccgagtcacttctatggcttccagggacagagtcagcagggtggctttcgtcaggcgcagcaaccgcagcagcactcgcaattcggtggccatgggtatccagctttctaccattctcaaagccaagagcaccaccagaacccggccgagggaggcctgaacggtttccagaatgcccaatcacagccgtctcaccaggggtggcagcagcacaccggctactgaggcctttaccctttgttatagttggggttaagttgcttgccgaccatggcgtgcgtgtatcctgaccagctgcagggtttaagcagctcggactagctgagcctgtgcctcgagcgctgaggatggagggtccacgccattcaaccaacagtttcgagagtgtttttaacatgttcgcgtgtgttcgtcagacaagaatgatttgtgctttgttttgatagccgagttattatatgtgcccaagtgcagtcttccttgtaactcttcttgagacctaacaggtcaccgttctgatttctaagattagtatctatcatcttgacctttgctgatgct

SEQ ID NO: 15506 - DNA, 2887 bp, Oryza sativa
  ref <308>: DATABASE ACCESSION NUMBER: AK066027
  ref <309>: DATABASE ENTRY DATE: 2001-12-06
gctcttcctctctcgtttcgtcgtcccctctcccccaccccgccttgcttccttcctccacaagcttttttccccaccacgccctgcatctctcccgcgcgcgctccccctctcctcccggccgactcccgccgatcgccagcggcggggtcggtccgatcgatcggccggcgaaggtgttcgcgcgcgcgcgcatgcaggatctctctggcgcgcggcggccgcaaccggaaggtccgatccctaccccgctgatcgcccgccgccgcaacgtcgcgtcgggattgatatagggggcagaggacgaggcaggatcagcgaggccaaccccactcgggcgacaaagatggacggccacccctcgccgcgttcacaccaccagccccctccgccagagcgggacggcagcttcaactacgacgaggccggcggcggcccgcgccagccgctgctgcggaagcgcaccatgaacaccacctctcagatcgccatcgtcggcgccaacgtctgccccatcgagagcctcgactacgaaattgtggaaaatgaccttttcaagcaagactggcgatcgagaaagaagaagcagatatttcagtatattgttcttaaatgggccttagttctgcttattggcatgttgactggaattgttggcttctttaacaatcttgcagtcgaaaatattgcaggattaaaactattgctcacaagtgatctcatgctcaagcagaggtacttcacagcatttttggcatatggtggttgtaatctagtcctggcaactactgctgcagcaatctgtgcttacatagcaccagctgctgctggatctggtattcctgaagttaaagcatatcttaatggggttgatgcttattctatattagctcccagtacactatttgtgaagatatttggttcaatacttggagtttcagctggatttgtacttggaaaggaaggacccatggtacatacaggagcatgcatagccaacttgcttggtcaggggggttcacgcaaataccatcttacatggaattggctgagatattttaagaacgacagggataggcgagatttgattacttgtggatcagcagctggagttgcagcagcatttcgtgcaccagttggtggtgtgctctttgctcttgaggaagcagcatcatggtggcgaagtgctcttctatggagaacattctttacaactgctgttgttgctgttgtgttgaggggccttatcgagttctgtcgtagtggaaaatgcggtctctttgggcaaggagggttgattatgtttgatctaagttcaaccatcccgacatacactgcccaagatgttgtggcaataatagtccttggaataattggcggtgtttttggaggccttttcaattttctcttggataggattctccgtgcctacagtattattaatgagagaggccctccattcaagatccttctcaccatgataatatcaatcatcacctcagcatgctcctatgggctcccatggcttgctccttgcacgccgtgccctgctgatgctgcggaggaatgccccaccattggccggtccggaaactttaagaactttcagtgcccaccgggccattacaacggcctcgcgtcgctcttcttcaacacaaacgatgatgccatccgcaacctgttcagcagtggcaccgagaaggagttccatatgtccaccctgttcgtcttcttcaccgccatctactgccttggcctcgtcacctacggtatcgccgttccatctggtctcttcatccctgtgatacttgctggggctacgtacgggcgcatagttgggacacttctgggtcccatatctgatcttgacccaggcctcttcgcactgctcggtgcggcttctttccttggtgggacaatgaggatgacggtatcagtctgcgtgatccttctggagctcacaaatgacctccacatgctccctttggtcatgctcgtccttctgatatccaagaccatagccgatagcttcaacaagggggtctatgatcagattgtggtgatgaaaggcttgccattcatggaggcacatgccgagccgttcatgaggaacctggttgccggtgacgtcgtgtctgggccactcatcaccttctccggggtcgagaaggtggggaacatcgttcacgcgctgaggatcacgggccacaatgggttcccagtggtcgacgagccacctgtatcagaagccccagagctggttgggttggtgcttcggtcccatctgctggttctgctgaaaggcaggtccttcatgaaggagaaggtgaaaaccagcggtagcttcgtgctgcgaaggtttggtgccttcgacttcgccaagccaggctctgggaaaggcctcaagatcgaagacctggatctcaccgatgaggagctggacatgtatgttgatctccatccgattacaaacacctcaccctacacggtggtcgaaacaatgtcacttgcaaaggctgcagtgctcttcagggcactaggattaaggcacctactggtcgtgccaaagaccccaggaaggccccctatagttggaattctcacaaggcacgatttcatgcatgagcatattcatgggctgttcccaaatctcggcaagtcacactaacaagggccaaatcgattgcattcagcagacatgtcttgtttttttgcttgccgtcgccttgtggctaccggtatcgaaggaagcgactgtgtgtaatattcgctgctcctatcttgcctttttgtttatctatattcatttcttccaaatgtactcaaaacattgaataatagtataatcaacaagagaatggaaattttgtagtttgtgttcctgtcg

SEQ ID NO: 15507 - DNA, 2270 bp, Oryza sativa
  ref <308>: DATABASE ACCESSION NUMBER: AK066028
  ref <309>: DATABASE ENTRY DATE: 2001-12-06
gattcccttctccctcttccgccgccgcctcctcctcctccgcatcgcccatggcgggggaaaccctctcctcgtcgccgcggaaaccctaaaccctagctcgattccggcgcccatcgcgctgccgcggaggcagaaggacggcggagggggtggagggggagaggagcgggtgctgatcagcgaggtggcggtgagggggaaggacggggagcccctggagcggcccgagctggaggcggccgcggcggcggcgctccgggcgtgccgccccaacgcggcgctcacggtgcgggaggtgcaggaggacgtgcaccgcgtcgtcgagagcggcctcttccgctcctgcatgcccgtcgccgtcgacacccgtgacggcattcgtctcgtctttgaggtggagccgaaccaggacttccatgggttggtctgtgagggtgccaacatgctgccatctaagttcctagaggacgcatttcatgatcgccatgggaaaataatcaatataagacatttggatcaagtgatcaagtctgttaatggatggtatcaggaacgtggtctaactggcttggtttcatatgctgagattctttctggaggaattctgaggctacaagtttctgaagctgaggttaataatatcaatattcgctttctggatagaagaactggtgaaccaactgttgggaagacgcaaccagagacaatactccgtcaccttaccaccaagaagggtcaggcttacaatagagcacaagtgaaaagggatgttgaaacaatccttactatgggaatcatggaggatgttactataattccacagccagttggagattctaataaagttgatcttgtcatgaatcttgttgaacgaccttcgggtggtttttctgctggtggtggcatttcaagtgggataacaaatggaccactttctgggcttattggcagttttgcatattctcatcgaaatgtttttgggaggaacaagaagctgaatctctcactggagagggggcaaatagattctatatttcgattaaactatactgatccttggattgatggtgacaataagaggacctccagaactatcatggttcagaactctaggactcccggaacacttatccatggtggggaccatcctgaccatgggcccattacaattggacgagttactgctggcattgaatacagtcgaccattcagacctaaatggagtggcacacttggattaatatttcagcatgctggtgctcgtgatgacaaaggcaatcctatcatcagagatttctataacagccaattaactgccagcggaaatgcttatgatgatacactactagctaagcttgaaagtgtctacacagactctggagatcgtagctcaacaatgttcgttttcaacattgagcaaggtcttcctattcttcctgagtggctcagttttaacagagtgacagcgcgtttgaggcagggctatgaaattggccctgctcgacttcttctaagtgcttctggaggtcatgtagagggaaacttttcgcctcatgaagcatttgcaattggtgggacaaatagtgtaagaggatatgaagaaggtgctgttggttctggccgctcatatgctgttggtagtggagaagtctcttgccgcatgtttgggccattggaaggtgtggtgtttggtgactatggtagtgatcttagttctggtcccaaagttcctggtgacccagccggagctcgtgggaagccaggaagtggttacggttacggtgttggcgtccgtgtggactccccactgggacctttgcgtcttgagtatgctttcaatgataaacaagcaaggcgatttcattttggggttggctacagaaattaaccagagtatcattgtgtttgtcggcgtgatccttcatttgattagctgctgttaggagatagtaccattacttccatttctttgcggtatcaatatgtgaaagccttttgcaaagcaaattttgtctgtcccaattcccttattgtaacatatttgtacatttttttcaatcctccctcttctcatgtagatgttcttgaaactgaggagaaaatgatcccaccaggtaattactcatgacttatggttgggtgaagttccctgggataatttaaacaagttttgtcgttgtcgtaggacaaaattttggatttgtatcaatgtcaccatttgtattgtaatgttagctggagaaatctgagcctctgctattcagctt

SEQ ID NO: 15508 - DNA, 1641 bp, Oryza sativa
  ref <308>: DATABASE ACCESSION NUMBER: AK066029
  ref <309>: DATABASE ENTRY DATE: 2001-12-06
gtgtcattaaactctacaacgtacgtatctctcctctcctcctgctcccgagcattccgtccccatggctgttgacgatctaaaccaccacctcatcgccgtcggagtcggagaagaagccgccaccgcccattgtgggctgcgcacccttgtgcggaatatggcgcagctggtggtgtcgctgggcatattggtcgccgccgacaagttggtggagcaggccttcgcagccgcctccatcaagttccccagcgccctcttcgccatgttctgcgtcttcgccctcctcctcttcctacctccttcgctcgccaacggattcatggctttcttcgaccccgccaccgtcttcatccacaggtggctgcccctcttcttcgtcccctccctcgtcgtcctgccgcttgccgtcagggacgtctcgcctgcttctgccctcaagatcctcttcatcacatttggtggctggtttgcttcactggtggtggctggttacacggcgctgagtgtgagaaggatagtgaagacacagcttataccagctgagcccatgaagagaccgtctcctttcgggccgcttgaattctgggcctgggctgctgtctttgttgcttcctttgctgttgcgtatgtttcccccactgcgcttggtaccaccgcaacaacatgccttcctttcttgcttgcttccactgttttcggttacatccttggttcccggttaccatctggtgtcaagaaagtgctacacccaatcatctgttgtgcactttctgcagatttggcggcagtagcatatgggtatctctcccggtctggagtggatgcagtgctaggtgattacctcacagagtctccgtcaaatccaggagctggtgacatcctcatgggatttcttgggtctgtcatcatatcgtttgcattttcaatgttcaatcagagaaagcttgtaaggaggcatgcagcggaaattttcacatcaatcgctgtggcatcaacattctcgttatattcaactgccatcctaggacgagtggtagagctagagccaatattgaccatatcaatattgcccaggtgtataaccgtggcattagctttgagggtagtttctctctttgaaggtgtaaatacttcagtaaccgcagcggtggttgtcctcacggggctgatcggcgcaaattttgcgcaagcagtgatggacaagcttcgcctcaaagaccccatcgcacgaggaatagggacagcttccagtgcccatggactgggaacggcagcggtgtcagccaaggagcctgaagcgttgcccttctgcgccatcgcctacgccctaacgggggtcgtcgcctcgttattttgctctcttccggcgatcaggcacagcttagtcttcatagctggcgatgcctctgcctcacaaacacaacacttttcttactagtattatttggatatatatttgtttgtctgtcactattcatgaaaaacagacccagtacagattgatattgtgattaataatcctacgaccgaataaatactgtatatacagagacacgtatatatggtaggagtaacatggaagggagaactatttgtatatgtaattaatttttgtaagggaggacctggacttggtgg

SEQ ID NO: 15509 - DNA, 2098 bp, Oryza sativa
  ref <308>: DATABASE ACCESSION NUMBER: AK066030
  ref <309>: DATABASE ENTRY DATE: 2001-12-06
gacagaaagctgggcctcgacccggcccagaaaggaaggaaggggaaaccaacccaaatctcgcttgcgcgtcaggccggcgtctccgtgattctccccgtcccgcggcgcaccggcaccggcaccggcaccggcggcgagatggcggactgggacggggtcccggcgagggagcggcggcagatggaggagatcctgcagctcgatatggaggagctcaacgtggagatggtcaacgacgacggctcctcctccgaggaggcgaacggcggcgacgacggcgccgacgccttcctcagggaaggagtggctagcacttctggacaattcacattcaacacatctctagcctcgttgcacacctatcttggtgaggttgatgatacacggggtcgagtttctctcttagatggtggcacaatcctcagcttgccaatgctatatcttcaaggtgttgtcctatttcctggagctaccctgcctctcagactaattcagggtagatttgtagcagctgttgagaaagctttgaggcaggtcgatgctccatgcacaattggtgtggttctcatgtacaagcgacacagtactcgacattatgctaatgcttcagttggaacaacagccgagataagacaacttgggaggatggatgatggttcattaaatgttgtagcccgtgggcagcaaagatttcgtctgaagcgtcattggatggatgttgatggggtggtgtggggtgatgtccaaatcattgaagaagatactcctttaagaaccccaagggatgcatttgcacagctagcatcatgtaacagtttacggcagcatacctcctcaccagttatcagtttggatgtctctccaatcaaacaacgggatcatgtggattcagaattggattgtggtacaccatcacctaaaagcactgcaagcaatcattcagcgattgattcaaggatgtgccattcagattcacgatccagcagttcaatgagatcttctaatgaagatgggcttttcatgcatgagcagttttacagccaggagctacatcctttaaaaggaagtgcagcagttcagtcaggcgagaataccaacatgggtgaggaggatttttgtttaacatcgctcagatccttgtcaagtgcaggaacaagagatactaaggagcagcgtcagtacattcttccaaagcaacattttcaggcaccattatcattttggcctcggtgggcttatcaaatgtacgattcatatgcacttgctcgtagggctgcagacctctggagacagataatcacacacccaagcatggatgattacgtgagaaaaccagatcttctgtcattttccattggaagcaaacttcctgtatcagaatctgtgagacaaaagctactggagattgatggaatctcgtatcgtcttcgaagggagattcagcttctcaaggcctttaatctcataaaatgtagatgctgcaagtctctcatagcaaagcgtagcgacatggtagtgatgtctactgatggtcctcttggtgcgtatgtcaatcctcacggttttgtccatgaaacaatcacagttagcagggcaactgggcttgctcttgatggcaatccttcaacggttcacagctggtttccaggatactcgtggacgattgcatcatgtacggactgtgagtccaacataggctggttgttcaaagcaaccaagaagaatctgcgaccgagatccttctgggggatccgtagctcccaaattgcagatgatgcacaagaactagatcaggacgaatgatgctccgtgtacagtagtaaactttgtgtgcccctcccttttttcttatgaagttatggaaaacactttattctctggtccataggcctagttctccgtacctgagtagtggtcgttgtgacgatcgctatagaataaccacttcctcctgtgtgtattacacaaccattgccttatgctaaagttccgtcacagaattttctgaaatgtagtgttactagaaatccatagtacaagatgaatgatgatatgatcagatgtttcaagcaatggtttgacatgtcttatgagc

SEQ ID NO: 15510 - DNA, 2179 bp, Oryza sativa
  ref <308>: DATABASE ACCESSION NUMBER: AK066031
  ref <309>: DATABASE ENTRY DATE: 2001-12-06
gctctctctctctccctcctctcctctcttctcttctcttctcttgggctcctctctcctgtgatccccctccgctagggttttagctatctcccatttcccccatccatcgccatttcgattggatcactcctctcccccctccaccgcctctcggatcccgccgccgcccgccgtcgccgcctccgccgccgcagactctatctctctgtgtatccatcccttctcgacctcgcgcaaatcccatccttttcgccccttctttccctgcgaaagatcgggtttttttttctgcccgtctctttctcgcgtttggttccaatcttttgctgcctggagatttcaccgccttgttcagagtcgagatctcccgtcgctgctcgatctgatctcgcctcgtttctcgaggagaaaaaaaaaacaaaacaaacaaactgcggtttttgtgttcgggagtcggtggagaagagatctctctccgagattgatattcttgcgtccatttgcttcgcctccgatagctttcggaggaatctaatctcgaatagtgaaggaaagttgccaccttggttgtgcttgtggttgtgggtggccgcgtgagttcctcctccttcctcctctgtggcgcagcttcccattccatgaatggatgggagggagtccacagtggcgtcaggctccaacttctcctccttctatgtgcagcaccggggcattggcgtgccgggaggctccgggcacccggccgggctccacggcccgccgcccggtggatatcggcagcatcttgatgcagtctctgcggggtaccctttccagccccctcacattgggggttcccacattgggcagggttaccaccatgttgatgcctcagcccctgtcgcgcagcacggcagtggtggcggtggtggtggtatggacattggcatgggtgtcgaaatgagcgcggatgctaaaggggatcaggggagtggtgctggccaggatgagccggtgaagaagaagcgggggaggccgaggaagtataagcctgatggggcggtcacgctggggctctcgccgtcttcgtcgacgcctcactcgtcgacctcggcgatgggtacaatggtgaccacaccaggctcagggtttgggtcgggggcaggatcggggggttcggggtctggtgcccttacagagaagcgtggccgagggcggccacctgggtctggaaagatgcagcagttggcttctcttggaaaatggtttcttggttctgttggaacaggttttactcctcatgtgattattatttcaccaggagaggatgttgctgccaggataatgtccttctcacaacagggcccaagggcagtgtgcatcatctcagcgacaggagctgtatccacagcaacccttcatcaggattcaagctctggtggtgtggttacatatgagggtcgatttgaaatcctgtgcctgtctggatcatatttggtgatagaggaaggtggttcgcgaacccggagtggaggcctctgcatagctctgtgtggccctgaccacagggttattggtgggagtgtaggtggagtcctgacagcagctggaactgttcaggtgatagtggggagcttcatgtatggtgggacaaagaaaaataaagcgaaagctgagcaagagacggagaataacgaagagccaattggcggtgaggaggagacccccacaatggcactgccagatcacaacatgccgcatcatacgatgggtggatggtcgcctgggttgatgaggcagatggactcaagaactccaaacatcgacatcaactctattcgcgagtaatgtgtattattgctggaaggaaggagcaccacctatatatctatctctgactgacggaattccccgaatccccgtgagtgcgcttggtagcatgcaatgcaacgcgatgcgctaacttgctgtaggtgtaagaggaagagagttgtttgagaaatgatgttgctggatgctgaggtatatgtcagtgctatgttaggaactcctctacatactaagtattagaatatgaatgttatggtggtgtactgtgaatctgctgcatctgcatctgcggtgttgtatgagaatgaaggatccggatcgtaccctattatattatatagaggaagaaaaaagaacctggggattt

SEQ ID NO: 15511 - DNA, 1702 bp, Oryza sativa
  ref <308>: DATABASE ACCESSION NUMBER: AK066032
  ref <309>: DATABASE ENTRY DATE: 2001-12-06
gagggttttcttcctcttctcttgcatcctcccatctcctctccggcggcggcggcgtcttgtgcgcgtgagaaagagaggagaagaagatggcgacgatcgtgaacacgacggaggaggagccgatgctggccgtggtgcgcttcaccgccgagctggcctgggcggacgccggcgccgacgtcgccgagccggaggtcacccgtctctgcgtcgaggcgcagcagcacatcctcgccgcccgctggctcgacatggcctccctcatgctcgcctccgccgacctcctcctccaatccacgcgcctccccgacaaggacaaagatctcgagtgcatcctcgctatcatctgcaacctcgtcaccaaggcccgatcccaagacgaggccctgcagatcgccgaactcatctgcgccaagctcacccaccagccccaagacaaaccggccctgcgcctcaaagttctcttcagcttgtacaatctgctcgggagcccctatgccaaggccttcgtctacaagaaggcactcgacctcgccgccgctgggaaggctgccgactgcattatccctacttttaagaacatcgacagcttcatcagcgattggggcattggcaaggtggagcagagggacctgttcctcgctgccgctaggatcctcaaggaccagaaaggcatgaacaaggagtacttcaactttctgaataagtaccttgccaccttcgatggatcggccgatgacgctgatgcaatcggtgatgcaaaggaagaagctgttgcagcaatcattgagtttgtcaagtcatctgatctctatcagtgtgatctactcaatatgccagcagttgcacagctggaaaaagacgaaaagtatcagctggtttatgagctcttgaagatattccttactcagaggcttgattcctatttagagtttcagtcagctaattctgccttgctgaaaggttatggactggttcatgaggattgcataacaaaaatgagactgatgtccctgcttgacctcagcagccgttgtgctggggagatcccttaccatgcaatcatagatgcacttaagatcaatgatgatgaagtggagtattggattgtgaaagctatttcatgcaagatattggattgcaaagttgaccagcttaaccaggttatcattgtcagtcggcatactgagaggatatttgggatgccacagtggcagagtttacgttcaaagcttggagtttggaggggaaacattgctagtgctattaacacaatacaagcaaacaaggtgactgatgatggatcacaggggatccaaggcttgatgatccgttgatggagaggggttcctgaattgaaattatagtttcaactttgagtagatgagcaatccttttgtatgagattacttgtaatgtgaattactttgatcccatgaccttgtggctggatctggattgctatggcatgctaagcaatctcattgtttttgtagtcatagcggtgcttaaaagtcggttgttacacaagtaccaatcagtcgattactaaagagttccaacagaatggcagatctattgtggcaattttccttcataacggattgatgagttaatgtattattgtttagaacatctggtgcgatttttcataacaattatgacagtcatagaacgtcttgttcaagaatactgaatc

SEQ ID NO: 15512 - DNA, 1238 bp, Oryza sativa
  ref <308>: DATABASE ACCESSION NUMBER: AK066033
  ref <309>: DATABASE ENTRY DATE: 2001-12-06
gggggcacgaccgccacgcgcattccatttcgacgacgaggcggcggagctagggtttgcggcttctcttcctcggcctatctctctcgtctcaggtgaatttgttgtgtttgtggtgggggacttggaggggagatgatggaggaggggttggcggtggcggatctacgggagctagtgcatctgccggatgttctggtggtatgcacttctgttggatggacaaatgaaaaacacatgctctatcttagtttattggaagaatcatttgtaagccaattacatgacagtaaatacagtttcaaggaactgtttaatcactctccaggtgcttgtatacatgaactatcatcgaagggacatgttaaaaatgtggaggctgagcaggaacatatggatgtagatgaagttgacagagctgaatcttggataaagattgaacatgtcagatcaccttctgaaaatcaagatgacgtaaaagtgtgttttcagatgataatgcatcaagtaccaggctgattcaagagtgctatgcaagggcaacaagctctggacaatcttccacgtgccatttaggcaagaacagacattccccttctaggagtgcagagggttcagatcaaaacttcattgatgaggagacaaaaggaagtggagaaccaaatggacgatgcagcaaaaagcgactgaagtctactgctaatacgatggacgatcaagtaatgaagggtacctttgagggcctgtatggataagggtagtttcttgaaattttttgggtttagctacaatttgaactaaatactaaactttctcggatccccttatccaaacaccccttaattgtgttatgttttcttcatactttgtgacttcgtttctaaccttttgacattgcatggcctcgtaggtggttccatttgtgaaggcagagttacaggaagcaagagaaaaggatgcagatatccatgacaactcaatggaagcggatgctaaaggtcacgagccacaaggataatgcccatccacgaagtgttcttcaagcctgactaacaacactcagtaactttaaatcaccatgacatctagatcgtagaggagaattcacttagtgcaagcttgtaaggttggttagacttaaaactatccaccttgtaagataaagtgtttttttagagtgtagcttttccagctcttgataatggttagtagggaaccaaagtgttctgtttgggtcc

SEQ ID NO: 15513 - DNA, 1211 bp, Oryza sativa
  ref <308>: DATABASE ACCESSION NUMBER: AK066034
  ref <309>: DATABASE ENTRY DATE: 2001-12-06
ggctcctggttccgagccggccgccaattcgtggttcctcctcctcacgggcggcggcgacggcggcgactacggcgatgcggctgctctccggcgcctctgcttcccgaatcccctgccccctcctctcactcgcccgcgcgagggcaagatgcttgccggtccccgcctctgccaccgcgtgccgagcggcctcctcgtcagccgcggcggccgcgggcgacggcggcgcgctgaagccgtggttgttcgtcgggctcgggaaccccgggaaagtgtaccaagggactctccacaacgttggattcgagatgattgatgttatagcagaagctgaaggtatatccctcagcagtatgcagttcaaggcaatggtaggaaaaggtcgtattggagatgcccctatcatgctggccaagccacaaacttttatgaatgcaagtggtgagtctgtggggcagttggtctcatatttcaagataccacttaatcaagttcttgtgatgtatgatgatctagacttgccctttgcaaaattgcgtctactgccgaaaggtggacatggcggtcataatggggtgagaagcattatcaaccatttgaagcagaaccgtgatttcccacgtctaagaattggcattggacgaccacctgggaagatggatcctgccaattttgttctccgaccatttaacagaaaagaacaggaagagcttgatttcgctttccataggggcttggaggcagttagaataatggcacttgtgggattcaacaagagcgcaacttatgtgaacaccgcacagtcctctgaaatgttgaatagatgataaagtgttcaatttattcttataacataaagattcttatgtcagatctgaatgtttcctatccagtagacacttgcacacatggtggtcattttactctcaggaaatcctgagctcccgaggacggaagagattatttgagctgcagcaacttggtacggtgattttcaccagcagcttaaatacagggaagttagagacgtcacactacatgcgtacttctgttccttacatttgtagccttgtattgatttcaaaaaacaattgtagcactgtaatttggtgacctggtagggggagagagagagagaagcctttttgtcttggtaatctatactttggaaatcgtcagcatactgttaaacaggatttcagtgttcc

SEQ ID NO: 15514 - DNA, 2838 bp, Oryza sativa
  ref <308>: DATABASE ACCESSION NUMBER: AK066035
  ref <309>: DATABASE ENTRY DATE: 2001-12-06
gggcgcgccccctgcccctccgctgcctcccccccacgtcgccctcgccacaatccacctcacacgcgtgacctccatcgctcgcttgccaaatgccttagctgcgtgtgttgccttcccatcactctgtgtctgtgtatataacggctcgtctcgtgtaaaagctactgctctaaatgtgcttgctaggaacgtgacggtgttagctaggtagtttgttcgtgttcgttcatggagtcgataatggagaagccgatgatggacacgggaggggggatgattgagcggaccaagtcggaccagctggcgccgccgccgccgccgtcgtcggcgcagtcgctgagcaggacggcgtcggcggagacggtgctgagcacggccgacgtgacgacgacgacgagcctgtcgcgcaagtccagcttcgggaagcgctcggcgtccggcggcgccggcgccggtgggaacagccacggctacagcaccagcaacaacaacaacagccacatccgcaagtcccgcagcgcgcagctgaagctcgaaatggaggacctcgtctccagcggcgccgccctcagccgcgcctccagcgccagcctcggcttctccttcaccttcaccggcttcacccctcctccccaggacaccatgtcctccgccgagctccatcccttcagcgacgacgacaacacgatggacatcgaggccgggacgccgcgcaagaagctgatgaccgagccgacgttgccgatatatctcaagtttgcggaggtgaagtacaaggtggcggtgaggggtacgccgagggagatcctgagcgggatatccgggtcggcggcgcccggcgaggtgctggcgctgatgggcccgtcggggagcggcaagacgacgctgctcagcatcctcggcgggagggtcgccggccccggcgacggtcgaaggctgcgtctcctacaacgacgagccatactgcaagtccctcaaccgcaggattggatttgtgactcaagatgatgttctttttactcatcttactgtaaaggagacattgacttatgcagcactgcttcgtctcccaagaacaatgacgaggcaagaaaaggaagaacgaacaatagacatcatatatgaacttggccttgaaaggtgccaggacacgatgattggtggatctttcgtccgtggggtttcagggggtgaaaggaaaagagtttgcattggaaatgagatcataataaatccatctttactctttctcgatgaaccaacatctggattggattcaactacagctctcaggataattcaacttctacatgatatagctgaggatgggaagacagtaataacaacaatccatcaaccatctagcagattatttcataagtttgacaagcttatcctcctgggaagaggaagtttgctctattttgggaaggcatctgaagccatgccctactttcagtccattgggtgcaccccgctcatcgcaatgaacccagcagaatttctactggatctcgccaacggaaacactactgatgtttctgttccttccgagttagatgacaaggtgcacatggaaaatcaaaacctgcaaactaataccaagaaatgagctacaagcccatccagccaccaagattgtttcaattgagtaattctttgtaaaacgccctaattgaagaattcgaagttggcaataccagggcgaaaggaagccagctttcttaaatcccacttcccaatccagtgaccaataatgaagaaccaactaattaacaatcaatccaaagcgagaaatggggccactagcttgttggcagccaatatttccatcctctttctgtagagggatcaaagaacggcgacatgattatttgagctggatgagaatcacccaggtcatagcaacatcagttatcttaggtctactatggtggcactctgatccctcgacaccaaaaggtctacaagatcaggccggcttactgtttttcatagctgtgttttggggtttctttcctgtgtttactgccatcttcacattcccacaagaaagggcaatgttgaacaaggagcgtgcagctgacatgtacaagctcagtgcatacttcttggccagaacgacaagtgatctgccactggaccttttccttccagtcatatttatggtgattgtctacttcatggcaggcctcaaagcaactgccgcacatttctttcttagcatgttgaccgtcttcctcagcatcattgctgctcagggattaggattggcaattggagctagcctcttggatatcaagaaggcaacaactctagcttcagttacagtcatgacattcatgctagcaggagggttctttgtaaagagagttccaccattcatatcctggctccgctacctgtcattcaactaccacacgtacaggctactgctgaaggtgcaatatcatcctgtcccggacattctgatcaatgccatacctcttgacaacggcgtgacagaagttgtagctctggtcgcgatgatcatcggctacagggttctagcgtacatgtctctgagaagaacgaagacttcagccagctagcgaatcggtcgtcgagtgcactaacaggagtctggatttctgctaggatggcacccgttcttaccagatgattggacatagagaagtttgtaactatatatatataaattgcgccacgaaaagatagatcttttttaactgttctgtctttctgctacttgttcagagcgcgacatatctgttcctacttgcctcataggtcaattgtgggcaacaataacgagtataagtcccaaaatttgct

SEQ ID NO: 15515 - DNA, 1116 bp, Oryza sativa
  ref <308>: DATABASE ACCESSION NUMBER: AK066036
  ref <309>: DATABASE ENTRY DATE: 2001-12-06
gagtcaaattttacccaatcgccagcgagagcttgctttgatttgatccgcgcgcggagaagacgaagcgagagagagagggagaggtggaggaggctagctagggttgcgagcgatctgcagcgtgggagatggggaaggggttcatgtcgtacctggcgatgaagacggacgcggcgggaggggaggcggcgcaggcggcgctgatcgacgccgacttgcaggagctgggcgtggcggcgcggaagctcgccaaccacgcgctcgtcctcggcggcggcctcgggttcggcaccaccttcctcaagtggctcgccttcttcgccgccgtgtacctcctgatattggataggacaaactggaagaccaacatgctgaccgctctcttggtcccttacattttctttacactgcctggtgggctgttctctctgttgaggggagaaattggaaaatggattgcgatcattgctgtcatccttcgtctcttctttcctcgccatttccctgattggttagagctgcctggtgctgtgatccttctcattgctgttgccccgaacctgtttgcgagcaccttccgaggcgacttagttggcatcttcatatgcctcatcattggatgctacctgcttcaagagcacatcagggcgtcaggtggattcaggaacgccttcaggaagggcaacggagtgtccaacagcattggcatcctcttgctcttcatctaccctgtctgggccctggtgctgaactttctgtaggcgccaccgcttcagcgcttctctacaccatccagctccgatcgctgttcgttcttgtgtacatgtcttgtacggtgatttggtatctggtgatctggtagtatcgttttgaggagatggataatgtatgtttggacctcctgcctcctgatgcacgttttcttggcattttcgtttgttgtagctttgctatcagcccgtgtttcgtcgttctgagtgtacaagcgtcaataaattcatctctgttgccttctgtaaatttaaagagcttttatccaagttctcttatgtgattatccccactactacttctgaacaataatgctatgcagttgtgtgaatatccaatgct

SEQ ID NO: 15516 - DNA, 2887 bp, Oryza sativa
  ref <308>: DATABASE ACCESSION NUMBER: AK066037
  ref <309>: DATABASE ENTRY DATE: 2001-12-06
gggtttcttctcccccatcgactccttttgcgctgcttctcctcgccgccaccgtgtagcgcctagggttttcttcgcccgcgcgcgtcgatccccttttcccctggtcattttctggtcctcttcaccgccgccgtgctccaccgtatccttcggcgaccgccgcgggcagcgcgagagggggggaggagagctcgcccgccgcgggcagcgcgagaggggaggaggagagttcgcccgagggcggaagccaacgaggggatgatggccggacggcgagctcgccgaggcacggctgttggagcgaactaatccggagggggtcgggccccttggtgtcttggtgctgctccgccccggatctgcctgccccattacttcactttctccttgcaatcacgtcggcggggaaggtcgtcgtcccacgagcagacgagctcatgtcggctcgacatggtctcccgagctcagcgggcatggcggacgaggtgaggcggcagggtgcagcgcgtaaacttaagttttaagtccttcaacaatgaatcgatctgtgcaagttatgcaaatattggttgtttgtgtgcctgctcaacctcagcttgctgtcctccggctgtggtggcaggaagggaagcacttgcctgtcttcctatagctcaaggtatcaatctttttgtcctgtaaatcttcccagacgttgtgctacatgctctaattgcacatgttttaaggcattcatggttgcacataaataattagccatgccatgagcttcgatgcaccttctactccattgcctcacgtatgcagctgtgttttgatatatatggtacagtgactttgtgagcagctcagtttaatagaaccaaggtaagatggttgatctcgatcattgtttcaaatttattgcctacaactctttgaaatagaaggtaaattaatcagacgctcgtctactttatatgtttgtgtatgtcatatacttgatgaaatgcttgatggacttagcccgtcggtatgcattattggttaagcactcaaaactgcacactgttgtcacttaattttagatttctcatcacgttcagttatataagagtcaggccataaaagatatggcagctattaactatataatattttgacccaaatggttcagttctaaagcacttaaagatgattattgcaggtattataggccaacacaaagtttgtttttgttatctcttagttgcttgcagtatactcatatcacattgaagccaagttatgctatgtattaccttgatttggtcatgaaatttttctctcaattcaggaagcatttttattcaacgatgtatgcactttcactgctaaactactatgcagtgaatgtgttcatgattgttttcttctgatcctagcacatttcctgagatatccttcaaatatgatgacttcaaattcatcgtgtaccttttttcctctctcatatttacattgttatgcctaggacgatagcttcaatttaacagtgcaccttcactacttgataattgcgatgggtaagatgctatcagtcaactgtgaatctattatgtacttatgttgtttcatctctacaaagccaaaaaatgaagttctccctagacacacccaaaccttccaagtagagcaataattttattagcaagcattatttccacgtatctattgcctctttgatttaaatagtaatccaagataaaggagttaatggaataaactaaatgggctgcttattttgtttaacgtccatagatttgcaagcaggagtccctcaatctatattttctttgcttggcaggagttacatttttttagatgacatccagtagggattcagaccactggagcttgagggatacacaccattcagtaatttgagaaattgatgtttcctaaacttatagattatatatgatactaattagttgtgtttgtcgtttttgagtaatcagtaccatatgtaaaatgtagctcaagccattttttgtgcttttacctctcctatcaaggtaggaggactgatgttggtatttgggaacgccttttcattttctttatgtaatgagaattaatatatttccaactcctaattagtaaatcacaacaagagcaaagcattaaggatataattcccaatccaagaaactagacaattggaataactaggctaaaaatgtaatatgaaaatacagaacattcaatgatgtgttgggaggatcatttccatccactgattgcatatgctaattctataatctatcatctcttttttcaaaaggtccttttggagattcttcatatggttatcctgacctgctaacttttatgatttaatctgtatgtgctgctgctttccatgtttctgcaaatgcatatgtattgatgtgctcttcaatctccatgcagagtatgctatcatgacacacaaggattttttgttgggtgctgtgtacaattatttttatcgaggcctttgaagaggccaccctgtgcagatttctcaatttcagccatagcaaaacaaggggcattttccatactcttagatatgtgatctctacttctctttatggagaaaaatccatgaaggtagattgtttctcctttatcccagaaatgaggtggcatttcaaaccggtttcttgcaggaaagaataggttgagcgaaggtaatgcagtctcattgtacagcactggcctgatgtctcgcacttgttcagttttgcatagtctccctttaaaccttatgtaatgaatatttggtacctgattgttatcgtgggtggcttccataccatacatgttcacggtaaccgtgtttatatgctattaaattagctagatgtttaacactgtc

SEQ ID NO: 15517 - DNA, 1849 bp, Oryza sativa
  ref <308>: DATABASE ACCESSION NUMBER: AK098947
  ref <309>: DATABASE ENTRY DATE: 2002-08-28
gatctctccttttttttttctccccaaatcacccctccgccgaaacgggagctcgatctccgccgccaccgccaatccccgaaccctacctctccccccctccacccatggcgctctcccgccgcctcctcccgctcctcctccgccgcgggtccaccccctccctctcccccgcccgcgcgctctccacggccgccgtgacggccgatgctcccgccgcggcggcggcggcggcggaggaggaggcgatgaccatcaagggcgtgcgcatctcggggcggccgctgtacatggacatgcaggcgaccacccccgtcgacccgcgggtgctcgacgccatgctccccttctacctctcccgctacgggaacccccactcccgcacccacctctacggctgggagtccgacgccgccgtcgaggaggcccgcgcccgcgtcgcctccctcgtcggcgccgaccccagggagatcttcttcacctccggcgccaccgagtgcaacaacatcgccgtcaagggcgtcatgcgcttctaccgcgaccgccgccgccacgtcgtcaccacgcagaccgagcacaagtgcgtcctcgactcctgcaggtacctccagcaggaaggcttcgaggtcacctacctccccgtgcgccccgacggcctcgtcgacgtcgcgcagctcgccgacgccatccgccccgacaccggcctcgtctccgtcatggccgtcaacaacgagatcggcgtcgtgcagccactcgaggagattggtcgaatctgcaaggagaagggcgtgcccttccatactgatgctgcccaggcgctcgggaagatcccgattgatgtcaaccaaatggggattgggctcatgtctttgtctgcgcacaagatttatgggccaaagggcgtgggtgctctctatctgcgtcgtcgaccccgcattcgtgtggagccgcagatgagtggcggtggccaggaacgcggaattcgcagtggaacagtgccaacgcctcttgttgttggatttggtgctgcctgcgaaattgcggctaaagagatggactatgatcacaggagagcctcggttctgcagcagcgccttcttgatggcatccgtggacaggttgatgatattgttatcaatggaagcatggagcatcggtaccctggtaacctgaatttgtcatttgcatatgttgagggggagagcttgctgatgggcctgaaggaggtggctgtgtcgagtggcagtgcctgcactagtgccagcttggagccctcttatgtgctgcgggcacttggtgtagaagaggacatggcgcacacctccattcgctttggcattggccgctttaccactgaggaagaggttgacagagcaattgagctcaccgtgcatcaggtgaagaagcttcgtgacatgagtccactgtatgagatggccaaggcaggcattgacctcaagagtatccagtgggcgcagcactgagacagctttcacttagagctaatccctggctgcttttgaagtgcacggaaggacacatagataggcctgtctggtgttggtgaagacatttctatgaaccatgtgatagttctgtcaagacaatcagctagtattgtacatctgttcacttgccaagttgccagctctcaggctggcaactaatgttttctgctaggttagcaccttgttctctagctagaataccccaacacgaaataagaatgcttgagtggttactgtgttgcctgaaaccctttaagatactaattggagttactggcataatgctgttactatatattttggtgctcacattataatttcaacacaccaggttatctgtt

SEQ ID NO: 15518 - DNA, 1270 bp, Oryza sativa
  ref <308>: DATABASE ACCESSION NUMBER: AK066038
  ref <309>: DATABASE ENTRY DATE: 2001-12-06
gagtttgtcatgatcaccaccacactgacaagaagaatatagcatgttattctactcattctccacttgtgagttctgacttatctgcacattggtgagacagtcaatgagtgcagatgagactgcagagattaaccctgtcttgtccagagaataatctttgatttcagagcatcttgccactcaaatatctcgcatacatacataagattcgctcgcatgatctgagctgttttgtctgaatttctgaatgcagctgaggcagaaatcggtgagagtggtaggtgtttgttgcgatcgttgaagcatgaagagcagcagccaagaagcgggagaggaggtgtccgagatcagcagccaggcggcgtccaacaacaacgagacgtgcaactcctcctccggtaaggtcagcctcgacctgtcgctcaccgtcgccgccgccgccgcggcggctgcctccgccaccgagtcgagcaccacggacagcggcggcacgcggccggcggcgacggcgacggcgacggcgcgcgagccggcgcgggtgttcacgtgcaactactgccagaggaagttcttcagctcgcaggcgctgggcgggcaccagaacgcgcaccggcgggagcgcacgctggcccggcgcgccgtgcggctcgacgcgttcccctacggctacgccgacgtggcctcgctgccgctgtacggcgccggcctgtaccccatcggcatccaggcgcacgcgtcggtgcaccaccaccaccctggcgtggcggcgccggcggggcgcgccgagttgaggtcggcgcgcgcgctgctcggcccgatgccgttcttcgtgcaggcggcaggcgatgaggatgccagcttcgggtggccgggcagcttcaggccaccgcccaccgccgccaccaccatccccgccgccgccgccgccccggtcgccgtcaactccggctcctccaactccaaccacggcggcagcgtcgtcgtgcaggccgccgccgacgagcccgacctcacacttagactctagctgtcccatccatccatccattagtctggtgtaacattcatcaggttgctcctgatcatctcctccgtttgtgagtagaattcttgcttgcttgcttgcttcgctctcgatcctgctgcttgagcttgacatcaaccaacctgctagtaaattactattgcttcaaatgcatgcgtggaagtattgtttttgtaaatacagcttagcctatcctaatatgattgtacttgtgccctaagc

SEQ ID NO: 15519 - DNA, 1656 bp, Oryza sativa
  ref <308>: DATABASE ACCESSION NUMBER: AK098948
  ref <309>: DATABASE ENTRY DATE: 2002-08-28
gttcacctcctcaccgccgcgccaccgatcacccgccccccacctccaccgccgccgccaccgcccgtcgccggagctccgaggatggcatcccgcgtcgccgccgccgccgcggcgatcgcgtgatggcccgcgccgcagctcgccgccgatggacgacgccggaagggcctccgctccagcggtggtgacggtgacggcctccgccgccgcccccacgcctcctcttcctcctcctccgcctcccccccctccctcgcagctccccgccaccgccgccgccacggacgagccttcccacgaccccgccgctctctatggagagggtatgtggcagcagatgaccatgagcggcagtggcgctatgcaacctggaccatatcctgagcggtccggagaaccggactgcacttactacctcaggactggattgtgcaggttcggtatgagctgcaggttcaatcatcctcaggataggaatctggctattgcctctgccagaatgaaaggagaataccctgagaggatggggcaaccagaatgtcagtattatctgaagactggaacatgcaagtttgggcctacatgcaaattccatcatcccagagaaaaagctggaattgcagggagggtgcagctaaacacattaggatatccactccgaccgagtgaaaaggagtgtgcatattacttaaaaacaggacagtgtaaatatgggaatacatgtaaatttcaccatccagaacttttcaatgctatggcttcttcacgtggttcacctatttatccttctgtacattcctctgcaaccgcgggtccaccttatactggaacaatggctagctgggcttttccaagaggttcttttattccaagccctagatggcagaatccctcaaattatgcaccgatgattgtaccgcaaggtcttgttcaagtaccaagctggaactcatatactggccaaatgatgcctgtttcatcttctgagagtcgactgcagtccccaggggctcaacaaacctatggaacttctcagcaagttgatgccagtgcaggcaatcagggaatgttgtcaccctacagatctagttcatatcctgtacctcaatacgcattgcagagagagaatgtatttcctgagagacctgatcaaccagaatgtcaatactacatgaagactggagactgtaaatttggtgcggtgtgcaagttccatcatccccgggtgcgatcaatgcctactccagattgtgtcttgagtccagtgggtcttccactacgtccgggagaagaactgtgcaagttctattctcgctatggcatctgcaagttcggcgcgaattgcaaatttgaccatccaacgatggctcctccaatgggagtgtatgcctacggctctgcttcaactaatgtacctatggttcggcgtctcctgcaatccccatccgcatccgcgtacacttcctaaggcggcgtcctggcagttgtgacccaaaccaccgtgatgtataaaaaagtccatcgcacgcccgtctcaggcgctgtgtgaatgttgccaccccctcctaactccccggaatcaaagttctgtaaattgagttgctaccggagatgtacagtttattttttgttaatgcagatctttgggaagtg

SEQ ID NO: 15520 - DNA, 2259 bp, Oryza sativa
  ref <308>: DATABASE ACCESSION NUMBER: AK066039
  ref <309>: DATABASE ENTRY DATE: 2001-12-06
ggtttcttctcggcggcgcgtggctctcccggcgccggcgcgccgccgccggcggccactctcctcccgctcgccgcagctgctctcagatctcccccttactgggactcgctccgttgctgcctcctccccatccaaatcgtggagatctttcttcgggtatcaggatcttcctttgggaaatcgactggctcgcgacggcgacgcgatcggggtcgggtctccggtggctggctggtcgcggcccacggttggatggattgacggaggggaggaggggggaatcggtggttcagatcaagcaagcaagcgaagcaagtttctttcgggcaccggatgcgaactccggagttcagatcagatcagaattgtgcgagacgttgatgaatgaatgtaagcaagagcctctgctgattgtgtagcaatattcagtcgaagatacagtgggattggtgttcggtgatcattgccatgaaggaactcagagagggttccgttggaaacgaactcatacaccaacatcggtacatctacctccaaacagcaaccaagtaacctcacaatgttcctatgattaatttgtgacaatattattatctcattgacgaattcttctcggcagtcatcgtcaattactttggacttctttatggcaacttctttgtcaccatccaaagttcctctgtagaccattccatgaccaccacatcctagaactcgatcatcgctatagttctctgttgctttcttgatttccttctctgtaagtataagaatggtgtcaacttgtcttgacctcatctcatcaaatagtctaagacctccattttgtttgaaatactcctccttttctttcctatattttcttctttgtaatttcatgaccagcaagcatatcaaagccatcagcacaactgcggaaacactgagacctgcagaatgatttttcaagatgaatcaactcatcgtaaacctgaaaaagctcattagtttcacccaaagcctttgggaagataaggattcccttcatatccttcagagcatttgcacaggagccattcctgatggcccagtcatggatgacaggaacacctctgttggccctcccattgacaaacctgaggtgcccaacgaggtcttgctgcctgaagctgtaccatccggcctccacaagcatggcgtagaagcatgggttgaattcccacaccgcgctctggttcatcaccaagatcgctgcgaagtccttcaggtctgggatgatggtggtctcgcagcagcccatcccagtgcagggagcaccgttggatgtgctgttgatgctctggcagtaggagtagcagccagccacatatagattagagttgctgtgcatgtagccaccaatgatgccgagggtatggcatccgatggccatgaagcggttgcgggtggtggaagggacgaacggcgtaccctccagggtgaaccctgtggtatggttctctggtatggtggtgtttgatgagaaacagatgtaactgactggaccgtaaacgcgcacctcgccacgctccagggagatgtcgatgacctctgtttctgataggaggtctctaaccataggccgtggtggctggaaggtgtcgttgcaggtgatggtgaagtagctgctcaggctggtcgcagaacaaccagcgccgatgccaaatgggtaagggatggatacatttccgcacttgccagggcagcctggcaatgaaattgcaggttcagaggtggtggttgatatcgccattgcatggaagacgatgagcatgaggagaacggatgcttcttgcatggttgcggagttggaggttcttcccagctccctacacatgaagttgtcttggaagttggaaccactgatgctctatgtaaggctgacttagttaaggggaaaacgatgaaagcttcagctaattaatcagctcctaaattctgagcacatataaagccaacccacactatggttaccgaagtttcgaaattttaaggttccgttgtttttccaatgtataccacattatttgtattggatcagaaagaaaatttcatttccacaaatagtcattgtccgactccaattaacaccgatgcctgaatatcccagacaattagtgtatgaactctgaaattgggtatgagttctgaggtgtatatcttcctctgaattttttcctccacttgtaatttatagattatacttctaacagtgatcaggagcactgtaaatttctt

SEQ ID NO: 15521 - DNA, 2131 bp, Oryza sativa
  ref <308>: DATABASE ACCESSION NUMBER: AK066040
  ref <309>: DATABASE ENTRY DATE: 2001-12-06
tattctcccggatagctcgtcctagcctagcctcgccgccaccgcttcctcctccgtggcactggccggcgagctcccaagcagccgcccccctccttcccatcctctcctcaatccggccatcggcgcccttctcccacgccccctactccgggcgccgccctcccccaccgccggcgccgctctcctaatatggcggcatggaacacctccatcctcttgccgccgccgccgccgttgttgtcgcgtgctgccgtcgcgacgcccgcgctcaatccgtaccctctccgcctgcaccgccgccacccccaaaagcccctctgccttccatcggagtcgtaccctgcggataccgacgccgacgcctcgtcggcctccctcgactcgaggccccgccgcatcgccctcttcgtggagccctccccgttcgcatacgtctccggctacaagaaccgcttcctgaacttcatcaagtatcttcgggagatgggtgatgaggtcattgtgattaccacgcatgagggcgtacctcaagaattctacggagcaaagctaatcggatcatggagcttcccctgcccgtggtaccagaaggttccactttcactagccctaagtcctcggattatcggagaagttgctagatttaagcctgacatcattcacgcctcttcccctggaataatggtattcggtgccctaataattgcaaagttgctctgcgtccctctagtaatgtcgtaccacacccatgttccaatttatataccgagatatacattcagctggctggtgaagcctatgtggttgattataaaattcttgcaccgagctgcggatctcacactggtaccatcagttgctatcggcaaggatcttcaagctgcccgtgttacagcagccaataagatacgcctttggaacaagggtgttgattcagaaagcttccatccccgtttccgtaatgacgaaatgcgtgcaaggctaactaacggtgaaccagaaaaaccgcttatactgtatgttggtcgtttgggagttgagaaaagcttagactttcttaagagggtcatggaccgacttccaggatcaagaatcgcatttgttggtgatgggccattcagggctgaactccaactgatgttcacgggaatgcctgcagtgttcactggtacattacaaggagaagagctatcgcaggcctatgccagtggggatgtgtttgtgatgccttctgagtcagaaacgcttggttttgttgtgttggaggctatgtcatcaggagttcccgtagttgcagctcgtgctggaggaatacctgatattataccagaggatcaggagggtaagaccagctttctgtacacaccaggagatgttgatgactgtgttagcaagatcgaacgtctcttgacatgcgaagagttgagagagacaatgcggaaggctgccagaaaggagatggagaagtttgattggagagcagctacgaggaaaattcggaacgagcagtacagtgccgcgatttggttctggcgcaagaagagggcacagctattgagacccatccagtgggtgtcccggaggctgttcaggcctacacctgcaccttccaccatgaatcaatcataaattcatcatattcatgaatcatgatgctcgattctgtcagttggaagcaggtcgatcaaattttagtcagatatataaacttgttaatgtgcccctgtgatgtgagaatatgtaagctcaagcatatcggatgaaggaaggtgaggcgaagttcattgaacataatgtgtaaggcaccgttcaatatgctgtctttgcttgccttcaacacaagagtgttcctacaatactgacgaaatatcaacctgtgaatttgtgaatgataattatatgaaaagcaaagcataggtttttaggtggcgtttgtgcctccagccatatattgtaaatcgcagtggtattccaccttgcttgcttcattgttgattgttgtatttagggattgtaaacaccctctagtggatgtttgaatgggaggaactttgtaattgttaaattctacaggatattttttcatcactatagaatacacaaaaaaatgaaatcctattaaatcttc

SEQ ID NO: 15522 - DNA, 2277 bp, Oryza sativa
  ref <308>: DATABASE ACCESSION NUMBER: AK066041
  ref <309>: DATABASE ENTRY DATE: 2001-12-06
gattgtaataggcttgtttgcactgcctgtgaagctagctaccgtagcgatggctggtgcgtttcgtcgttctgctgccctgcaggccatggctgccttctctgtgcttgcacttgttgtaccagatcaggttcaggggagaggcaagtgcccatctttctcctgcggacgtcttagctatgtgcatttcccattccgtcgtcaaggcgaccccgctgaatgtggtgttccatcatatgagctgacttgtgcagacagcaatgctacaattcagatcgacaaggcaacatacttggtaactgacatcaactacagtgatcagtacttctgggtggtcgatgcaagcttggattcagctaacaactgccctcttcctcggtggagtcagactccttataatgaaaactacaggcttggagaagattcacaccgccgtgtccaagtccagttgtcccctgatgtggattggttcgctacctttgtgaaatgctcgcaggaaatgaatagcagcaatgtcatgtacaggcctgtggcttgccggagcggcaactcttctttcgtctatgtgctaactggtctgggatcttatttagctgagaaccttgagccttcctgtggatacctggcaatgactcctttagctctgggtggtctagagaattggcgaactgctactgcggctgcgacactggaggatgtaaattatgaagatgttgtcagatccatgagtgaaggattcgctgttcgttttcctttcaggtctgggggattcatcgactgcctaaggggcttgatcagcgacagtaatggagaaccgacagtatatcggatcttcgtcattgttactaatatcaattcttacttctcgatatgcggccgccatgcaactcaacttccacacccttttgttgtgctcctgatgttagtgccacaaactttctggattttaagggtcatttctgcatgcaggttcgtcctggtgatgctgctgatgtggacctccgttgcctacatgtactggaaaataaagatgagagttgatgaagtagagaagtttctgcaattgcaacaaatgctgaccccaacgagatactcctacaccgacattattgccatcacaagtcattacagagacaagcttggccaaggaggatatggctccgtctacaaaggtgtgctactccctggtgatgtccgagttgccattaagatgctgaagggtgacgcaaattgcaaaggggaagagttcatcagcgaggtctccaccattggtaggatccaccatgtcaatgtggtgcgactcgtcgggttctgctctgaagaaataagaagagcgcttgtgtacgagtatatgcctcagggttctcttgacaagtacatcttctcgtctgaaaagagtttctcctgggataagctaaatgaaattgcattgggcattgccagagggatcaactacctgcatcatgggtgtgatatgcaaattctacactttgacatcaaaccgcacaacatccttcttgacaacaactttgtcccaaaagttgccgattttggccttgcaaagctgtacccaagggacaagagttttgtcccagtgagcgcagcacgaggaacagtgggatacatagctcctgagatgatctctcggggttttggtgccatatcaagcaagtccgatgtttacagcttcgggatgctactattggagatggccggaggaagaaggaatgctgatccgaatgcggagaattcaagccaggcatactatccatcacgagtgtaccgtcagctgacccgacaagaaacaggtgagatcaccgctgccgccgacatgcatgagttggagaagaagctctgcatcgttggattgtggtgcatccagatgaggtcttgtgaccgaccgatgatgagcgaggtgatagagatgcttgaaggtggtgttgattgtttgcaaattcctcctaggccattcttctgtgacgatgactacatcccggcaatggagtcgctgtatctgtcctccgaggtggagctggctgcaatctccgaggaggaagacgagagtatcactgagttgaattagctagtactagcaagtatggtgtgttgatgtcttttcgtgagcaggttgtgctcaagcctgtgatgattgtagacagtcacacagatgcagtttctatgctcctattcctatattcctgtagaatgcgtatatgtgggcttgtacgatttattatcttgtgcttcatctgtatgaatgcatgcaaaaatcgagcc

SEQ ID NO: 15523 - DNA, 2971 bp, Oryza sativa
  ref <308>: DATABASE ACCESSION NUMBER: AK066042
  ref <309>: DATABASE ENTRY DATE: 2001-12-06
gtactgtctggctttctcttctggtttcatattggttctagagagatggctctaaaggtgttcaattggctgaatcggaagaagcattctaatgtcgagtattgcaccatcaatgagaacaagggtaaggataccaggatatctctcttttatgtaccacatgttttgttgttctcatgttgtcaactcttgtttcttctcttctattttttttcctgatggagtagccatggaagagaaggaagactctctgcgtgcaagtgtgactgagcaagacactgaggccctgctgctccgtgatgtgcttattaatggtatacttgcaattggcacgctgggccacaatgtaaactcactctgtcctgagtcctgtattgaacaagatgagcccatcatcatgtgtgatgagaaagtggaacaagagaagtgcgaagaagaaaaggctgaggctaaacaggacacaccagttacagcaccaagtgaaccggcatctgctcttgagcctgccaagatgcactcatcatcgatgaaagaagacaacttcatgtgctttgtgaaggaggaaatcctaatgcatggcatggaagtggaagatgttcctaacatccaggaacgaccacttctgatgttagagaaggtggagaaagtgagaactacacttgccgatctatttgctgcagaagcattctcatcaagtgatgcagaggataagtgttacccgaaaatcgtcattgttgctggggcatccacttcaaagcctacgtcgtgcatggagaagatgcatcacaagaagccaacaaaaccaacgtcaaagccgctgaaggctacaagaaaattaagtcgagtatggttttcttcgtctctgctttatttgttaagccttgttacattatattttactagtctggaatttattacactttgttccatggtcagtgcgccacatcttacacatatgttttaccatatagctacaactggagtaagcattatgcatctagccagtctttagtggtaaatgatcactgacctggaatgcacctttttggtttttgtcatctgtaaaataagtaggtcatgaggaagatgttggggaagaagatccacccagagcagctcaatggacgtagcaatgcagagggccctgtcactgcataatgctaggtttgtggacaaaagtttcctttctctatctggcaatttattacctagagtttttttaaagctgtctgttgaactatacagggctcaaggcccttgtgttttgcatacgattttgtacctttccaaattttcttgatttttacttggattccattgtttgtaataaaattaggttaatatctgaggtagtatttgcatagaatggataccttctaccaaagttatatttgtttgtgggtcctagagctagcatgacccacgaatcacattcaagaatatagtaattcgtttaggctacatttcactaggaatagaacatatgaatattctcaggtttaataaggcagatgcaaaaaagaactgaatagcacaggaaagtaatttttccatttcaagcttctcacagtcaaaaacaagtaatggttcaaaaattgaatattctatcacctgttgcctccatttatgtggaactcacaagagggtctaagtgctgcttgacactctgacctgtatttaaataaaatgttatcacctattgcctctgcttattattgggatctcaaaacacaatctattactgtgtatgccttggcattttttaaaatctgagctgcccccttattcttcacattttctcagaaaaccatataaacttttagataaatgaagcttttattgatctcagacaattacatcaagttgatagaaccaaactaagaacacttctggcctctgataatggaactgctgtttgtttaagtagaaagaatggtgtgtgtattttaacggttggtgattgggaattgggatgcagtgaccatggagactgtgttcttcagaatatttttaagaaatagtgttttcggtggatcctatcatggaactgcctatggtggaaagagcaatacgagttgaaacatatagggattaggaagcatgggtttcggactaaaatgcattcgttcctgccatgatgcaaagcttcattcgaagcaaaatgagcacatgccatggtacagtggcgtgcaacgagcactgcaattgcacacgacgtgcatgttctgaaaaaggccagtggacactagacatgcagctaatcctcttttgatgaattctatcatgaaaccaatggattcgttgaaaatctgaacaaattgatggatttggtcccagctgtagaaaggttggcaaactcttctcgctcctgtattattgtaggctggagctatgatggaccaaatcatcagaagcaaatttcaccatatataagcatctacttttatctttttctctattttaaaatgtgatcatagtgaagttatatacattctatctgcttaacgctccacattatccaaaaaaatgcatcacactccatattgggaacacgttggtggttctgaaccaaagtcgatctcttgatgccaattttttttttgagctggttgagtagtcgaactgggaacaattactgcttgaggctacaaaatttctggccgacaatacgtcttgatcaggaactgactaaagaaattccctttcaccttttgcgggatttgttggatccatcctcacgcttcggattccttgctcaagagaaacatccatgcatatcgtcgacagcgttcgttcagtcctcttccttttgttgttggtgctgttgttattattgttattgttattgctgcctattcgctcgccagtgatgaagaatagtcctgcctatatttgcctgtagtacattgtaaagctacagttgacgtgtcttgtaagacccttattattattgtccataccacgacgtctc

SEQ ID NO: 15524 - DNA, 2607 bp, Oryza sativa
  ref <308>: DATABASE ACCESSION NUMBER: AK066043
  ref <309>: DATABASE ENTRY DATE: 2001-12-06
ggtaattattcgcaggaagcatcacttcgccgcaagacggcggcgaccaccgctcctcggctggagggagccctcgtcgccggcgaagcccgcgcggccacctcccctgccggagttggccatgttctccatcgcggccatcaacgagagcgacaccggcgggcagtgggagccgctcgcgcctaccaaggaagctcaggaatcagcactctctcagaagtaccacgaggggctcctcaagttgcaagaaaaaaattatgtaaaagctcgtgaacttctggaggatgtcttaaaggacccactaatatcaaaaattcaggctgataacattgtcagtgatcagcatttgctgcagctaaggtttcttacattgaaaaaccttgcgtctgtttttcttcaacaagggtcagcattttatgataatgctcttcgttgttacctacaagctgtagagcttgatgcaaatgattcagttgtatggaaccatctgggaacactttcctgctctatgggtttgttgagcacatcaagatgggcatttgagcaagggcttctatgtagcccaaataattggaactgcatggagaaactcttggaggtgcttatagctatctgtgatgaagttgcatgcctttctgtagcaaagttaatacttaggagttggccatcacatcatcgggctttacatgtaaagaagaccattgaggatgcagaaccagtaccctttgcacctcgaggtatcgacatacttgaacccaagcatgcaaaactcaaattttgtaacaaaagaaaatctggagatgatgaaacgcatcatgaaacagtgacaaagaagagtaggcagaatgctaaattgcagttgactgaagccaaatggatggcccttttagatggtatcctaagcttcttaagttcaaacaacacaaaatctaatgaagatcacggtgccaatacagagagtcaatgtgatactaagaggagtatcaatgggtttgcttataacatgatggatgtctccttatctacggaaacattgaaaactatggaatctgcaggtgggaatgaacatgatttgtaccatgatggtgaaagtgtgctgtctcatgactgcagaactgcagttaaagagaaggacaccaattcagatagagaacatcctcatgaaaggagaagcacacgtcttgagaggctgcgaagtcgtaaatctggtaaagatgaacatgaatccaatggaaaagatatatcacatgctataactcaatttctagattcatttatcttgaagcgcacaagtattccagaaaagatcgattgttctggaaatggtgatgcttctacccctgaagctctaacatatacacctgatcgtgaggcaagtgatgtgaagcaatttctttccaaaatatcaaaaaattgtggacctcttcatattggctatatgttacttgaggaaatagctcagaccaacataccttttcaagattactttgttaagttcattgaactagacaaaattactagaggctgggctcaagatagatctgcacaatgcagcttatttcttgctgaattatactatgatcaagctctttgttctggaagcccattagcatcctcagagttgtccaattcatcttaccatctttgtaaggtcatccaatcagtagctttggaattgccattcagaacctctgatggagcagcaaagtccaccaatttggatttgaatatggaaagccatatggaagaggtgtgttcaagcgataaaactgagaagaatgcctcaaatatgtccagaaactctgtaaattctgtcaactcggtttccagtaacattctttgtgatgaaacatctgaatgtgattcttcttcaaacactaattgtgttttctggattcgcttcttctggctgagtggttgtctgtccctttcatcagactgcaaagaaaaagcttacaaggagttcaacattgccctgtcacttatgagaagtagcaacgaagccaaaatcaatagagagtttgtccttctacctcacaataagcttgtaaaattgcttacagctgataggattcttcgtgaaattaacttggtcaagcttgaatctttactttggcataatgatgaaaacatcaataaaataactcatacagagttcatggaattgcttcctccacttttgctttccaccaaagatgtctatgttggcagtgcatatggtccaccaagagaaagtgagaaagttatttcactagagttaggtgccttggatgttttaatatcagcatgtgaaaatgctaaaccaatgaacatccaggtataccttgactctcatcgaaggaaaatgcaagttctaactgtggcagctggcatggttggatcggttaccaccaatgaggggaaaaaatcaagtgatatagagtttatggaaacaatgaataggaatcgactggaaagtgttgtagaagcagtcaaagatgtttctcgaaatgctagtaaagcgaaagcctttgttgatcagtgtgataaccctgtaagttgactgttctattttctgtggattttcttgactgtcattttaattcaagtctttcatacttggaacgc

SEQ ID NO: 15525 - DNA, 1814 bp, Oryza sativa
  ref <308>: DATABASE ACCESSION NUMBER: AK066044
  ref <309>: DATABASE ENTRY DATE: 2001-12-06
gtaacccccgccgccgcccagatgcgaattctccgccgctttccgcgtctgctccgacgctctaacgccgccgcccgatctcctgccccgatgcaccgcctcatctcttctccctctctcatggcatctgcagcggctagctggtgctggtggtcaccattgcttgctcgaggaggacctgtcgtccgtcgtgtttcccgatttccttgggaacctcggaacatgaccaccatcagtcgagtaaaaggcgacgagtcatacaggcgacttccatcccaggaaaagaagcatactgcgatcactcaaggtatgaaaaccattgacaccaggggcacaatcttggaggctagagctggagatgagaaaagtaatagagatgcggcgtcctcagaggtttcatacatcaaatacgatgtactggggcaaagtgcgaagcaggatggctgtgatgaggatgatcgaaggagtgaaacggaggaacatgttgaggaggacgaagttcttgatcctgaagaatatactgtgaacaacatacttccaaaaagtagacaccgtgatggctctatatatagggacatcatggacacaccgtggaaatgggagtttcatattgcagaccgtaatgagactcggttggaggcaatgaggttttcgaatcccacaaattgtgtcattcgcagtaatggaacttgcatgtcacatgttcattgccacatgctgcaaattttatcattggagttggctaaaattacactggatggtggttcagtagagttgtatggatacatagctgtgcgggatgatctggatccgttgcttaattatattgtcaactgtagcagggatgatcccatcattgtggagcagggttcgctcatcaacatggaaggccctaaccgaggaatagacatgatggactatgctctaattgaatatgacatgaggatcaagacaggtgaacaagaaaaagatgacctacagctgattgatggtgcatcaatgataggccctggaggcctatggaatcggccagaaacaatttgcattcctggcgattacggtgcagttgacataactttatcacgttttaattgttcagctgaggccaccgtagagattcttatatcagaagtgcaaagcagtttcaatttgttgctcggttgtttaaccagtgacttggataaggaaatccgtctctttgatggtgtcatcagtgagtcacgtgatttaaagaggtcggtggttgctgtaatgagggattctttcatagatttgaagttcaaagtgggtgcgtttccatccagtttcgaccagcattatgtttccttcaaggagaaaatccatggctatgatactcaagaaataaagactgattttgcgttaatctcagtaaatgtgacttggtcgactttgcctgccggactaaagtgattactcttctgttttatcgagtcggccaagagtgactaaaaacctgtggcttactaaacctaggtacggcaaacttggatagtaaagtattgtaataaatctgtcattgtaattaagccctttgtccctaaaaaaagtacttttagttactagtagcagggccgtgctaacgctacggcgatatttagtaagcatgcataaaaatatttatatatgtcaacatccatgttcattttattattattataactgtcacaaacttgggtagcttttagttgtgtagttcaattctcgatcaagagggagtaatttctgtaccttgttgatgtgaatactttgtaagatggttcttatttttctacatgcataaacaaacatcactt

SEQ ID NO: 15526 - DNA, 1169 bp, Oryza sativa
  ref <308>: DATABASE ACCESSION NUMBER: AK066045
  ref <309>: DATABASE ENTRY DATE: 2001-12-06
gctttaattcatcctctcttctcctcttctccttcatcactaggcagtagccacagtagccagtagctagctagcttgtcaagctaggagctagcagctgtgtgtcgtcgatggcatccaccgccgccttcctgtccacgctcgccggctcgaccagcctgggcggcgccacgccggccagcggcggcgggagcgggaggagcaagacggcgaggttcttgaggaggcggcggcgcggcggcgcggtgagggcggcggtgtccggcacggagcaggcgccggagacgacgaagaagaagggcggcggcggcggcggcggggacgagcgggtggtgcaggtgcacagcgcggaggagctcgacggcgcgctgcgggcggcgaaggagcggctggtggtggtggagttcgcggcgagccacagcgtgaacagcagccgcatctacccgtgcatggtggagctgagccgcacctgcggcgacgtcgacttcctcctcgtcatgggcgacgagtcggacgccacccgggagctgtgccgccgggaggggatcaccgccgtgccccacttcaccttctacaagggcgccgagaaggtccacgaggaggaggggatcggccccgaccagctcgccggcgacgtcctctactacggcgaccaccactccgccgtcgtccagctccactcccgcgccgacgtcgagtccctcatctccgaccaccgcggcgagggcggcaagctggtggtgctcgacgtggggctcaagcgatgcgggccctgcgtgaaggtgtaccccaccgtcgtgaagctgtcgcgcaccatggccgacaccaccgtcttcgcccgcatgaacggcgacgagaacgacagctgcatggagttcctccgcgacatggacgtcgtcgaggtgcccaccttcctcttcatcagggacggcgacatcgtcggccgctacgtcggctccggcaggggggagctcatcggcgagatcctcagatacagcggcgtcaaggtcacctagacatatacagattcatcactacgcagctcagctgcatgcagcaaccgtaattaaattaattactgtactactctcttgatcatgattgtaattttacaccaccacactagcttgagaagatcaagcttgttttatactggggacgatttgatc

SEQ ID NO: 15527 - DNA, 1574 bp, Oryza sativa
  ref <308>: DATABASE ACCESSION NUMBER: AK066046
  ref <309>: DATABASE ENTRY DATE: 2001-12-06
gtcactcaccttccattcttctcctgctaagctccagagaaagcttctcctcctctttcgcaaaccgtataaaatctcgcctctgaaatcgagcccgatccgaggcttccgcggatggtgctcacgatcatggaggccaaggggaaggatgcatgggggctactgctcgtgctcctccttggccagctcgtcgccttctccatggccgtctccagcttcacctcctccctcattgccacacttggggttgatgcgccgctcacgcagtctttcttcgcgtacttgttgttgaccttggtttatgtgccaatcctcttgaaacgacggcaaaagctgcagataccttggtattggtacctagccttggccttcattgatgtccaaggaaattatcttgtcgtcaaggcgtaccagtactcgtacatcaccagcgtaacactgttggattgctggactgttgtttgggtcgtcatactcacctggtatgcattgggcacaagatattctttctggcaaattgttggggcagggacctgtgtggcagggcttgctcttgtgctcctttcagattcaaaatcagcagatgcacaagatccgagtaaaataccacttctaggagatgcccttgtcattgccgggacaatattttttgcatttagcaatgttggtgaggaatactgtgtcaagaaaaaagatcgagttgaatttgttgccatgtttgcactctttgggttgcttgtcagtataattcagatattaatatttgaaaagaagaacttagttgcaattgcctggtctccaacaatgttatgtctgttcgcaggatttgcagtggcactatttatgttctacagcatcactccttttgtccttaagatgagtggatcaacattgttcaacctttcactcctaacatccgacatgtgggcagtcgccattcgagttttattctatcaccaacagataaactggctgtactatatagcgttcgcagttgtggccattggattgatcatctattcgctgaatgaccattcttcggacagtggaacaagaacaactgcaaatacagaagcagcagcccaataccagcaacttccaggagagaataattcaacaggaattggttcgaacgacagccaagaaaggaaacaagaggaggaagttcatatctgttagtgggggtcaatgtacaaagtcacctcccggtgttgaatttgggcataattacatatggttacaaagggcaaaaaaaaaaaagaatatgctagggggaaagcaccggagttttgtttgccctctataactacaaccagttgatgatccattgtcatctgcctgccaccaaggtccagctctcttaagtgttttgtgagagatcttttagaatccttgtatatatatgttttcctttgttttttgaaacccctgctttatcaatagggtgtattaggcaatttattttccctatatatccttcaaaaacaaatgtaagcaacaacaaattgaacatattggaggcatggatacatatacaagttattttaaatgaaagtataactttccatctctgc

SEQ ID NO: 15528 - DNA, 4344 bp, Oryza sativa
  ref <308>: DATABASE ACCESSION NUMBER: AK066047
  ref <309>: DATABASE ENTRY DATE: 2001-12-06
gacgcggcagcagagcgctgcacgacctccgcctccccaatccgccccgtctccttgcccgccgccccccgactcccgccgatctccatcctgctagcagaggtggcccggcgttctcctgctccctcactggtgagcatcctaatccatcccatccggcctcggcctcggcctcgaatttcttctcctcgcccgccgcttgcgccgatccccatcctgcgagcagaggctgcttccaccgcatcgtctatcgccggaggcgaaagaaggagaattattgatcaatcaattcagaacgaacggctcagatattggggaggaagacacgaagcggacctatgcatgctctctccggccgccaccgctgtagccgccgtccgtgccacggcggggtcgccggcggccgtgcgcggcatgcacgcgcgcatcctcaaggaaggtctggcccaccaccctccgaaccccgcggcgctcgtctccgcctatgccaagtcccgcctcctccctgacgccctccacctgttcgacgaaaccccgcgccgggacatctacatctactcctcgctcctcactgccgtctcccactccgcgtcccccgagctcgcgctgccgatcctccgctgcatgctctccgccgacgccctccaccccgaccacttcgtgatcagctccgttgccagcgtcttcgccaggctccgtagccgccgccttggcaggcagctgcacgcgcatttcgtggtatccccatacaacggggatgacgtcgtcaagtcctctctggtcgacatgtactgcaagtgtggctccccggacgatggcaggaaggtgttcgacagtatgagtgccaagaacagcgttgtgtggactgccctggtttctgggtacgcgtccaacggccgcagtgaggaggcgctgcagctattccgtagcatgcctgggcgcaatctgtttgcatggactgcgctcatctcggggctagtgaacaccggtgagagtgtcggcgcagtggagctttttgttgagatgaggcgggatggtgttaggattgatgatgcattcgtgctgtcgatcgtcattggcggttctgcagacctggctgcttttgtgctgggtaggcagttgcatggttccacaatgaggcttgggttcctgtccaacatgattgttgggaatgcgttgattgacatgtactcgaaatgcagtgatatactctctgctagagaagtatttgaggggattacattccgtgatgtaatctcgtggacgacaatggttgttggagaggcacagcatggtcgagctgaggaggcattggctctttatgacaggatggttcttgcaggagcgaagcccaacgaggtgacctttgtcgggttgatctatgcttgtagccatgctggtcttgttcagaaagggcgacagctttttgagtcaatgaagaatgagtatggcatcactcctagattgcagcactacacgtgttatctggatcttcttagtcgctcaggccatttattggaagctgaagagctaatgactacaatgccatatgagcctgatgaagctacttggggggccctgttgagcgcatgtacgaagtacaaggatgctgaaatgtgtatcaggatttccgataaactattagagctacgaccaaaagattcttccacatatatcttgttatctaatgtttatgcagtgaacggaaagtgggattccgtagccaaggttagaaagtgcatgattggattggagataagaaaagagccagggtatagctggattgaagctggaagagaattccgtttgtttcatgctggggaagtgccacttgatgttagagaagaaattatggtttttcttgaggaaatggtattggagatgcgcaaaaggggttatgttcctgatactagttctgtgatgcatgacttggaagaaagcgaaaaggagcaccatctcttcttgcacagcgagagattggctgttgcttttggattaatcaagtctcctccagggtctgtgatccgggtggtgaagaaccttcgggtctgtgtggactgccatacagtaatgaagttaattagtgaaataacccatcggaagatcgttgtgcgagattctagtcgttttcaccattttgaaggtggaaaatgctcttgtagtgaattctggtagaaggtctgctgatgtccagttgtgcttccagtcttctagaactctaggttgaagaaaaatccttcaataactgaggagtttctacatgatggtctgctccaacttccctctctcgcacaccacacatacacagcactggactctctctactttggttgcattttgaagttgaaatgttgcagaggctacaatggacagagtgtcatctattctcttatcttgggaagatctttcatccgggagggaggacatactgttagtttatgttgttctggcgttatggacttatggtaatgctattgctattcatgcttagttctattatcacctttcacatttccttgattattgcgttattagctttatgattaggcaattcccagaacttgatgctttgcttccagccttcgagaaaaaacggatacaatacatatttatggtgccaattcaagtttatgaggttcattcgttcttggaggttgaactccacactaaccgtattgagtatggtttcttcttttacttagtgagttagtgtttgctaggtcttggttagaaaaagactcagtgtttgataggatggtatatgatgattacactacatattcatgccacatgatccgatcggcatagtagaattggtagagcagcctctagacaacacatattatgaatggttccatgaccacaacacagatagcaaatagaaataggcttcattataaattctaaataatgcaaagcagtaaacctaaatacaaaatcacaaattacttgtacaacaaagttaaaaatgtgagttacaaaggttcatctgtgctatgagttgtagttggattgggccaagcatggactacaaattgtgatgaaagataaacatgcatgaggcttgagtgcttgatagatggttgacatctaagtggcggtcatattatttccgatgagaaggacaaagaggaacaccaaggttaagggttagcaacaccaaatctaagaatacaaggttgactatatatcgtacgggtgggtgtgataccaaaataattgaaggttctggttaattagcagcgtacgcattaaggttttgtagtgactggcatcaacgattatcttactgacacaagcaggagatgtattgtctatcatattgttgtatacaagagtcaaatgcagtaagtcaatgtaagccatccatgtctaaagcataacactaatgtgtcaaatttcccatgtataggtgctattaactttgccaagtgacaacaaataggttggatgtacaggtaaatttggctacagaagttcatgcatgcatgttttaatttttgttatgaactaagctagaaatatatcatatggtgaagcgtgcaaatggaatgataagtgatggcagaaacaaagattaattgagctgtggacacgcaatgaaatataagttaaattaatctgattgtacatatattagttattttagtcaatgaggagaagccaatatttgagatgtgaagatattctctgttcagccctttggagttcatgtgtcgttacagatgggtagtagatgacagaacagccagcaacatgcaaagaaacaaatggaccatgagaggcccaatgataagggaggtacaatagacttggggaatggtaagtgacttggtgcaattagttgttttaatctgggggagggccagaccacggcagctcacatgaccggtaaggtgttcgacgaaatgtttatctccatgccatttcagtttcctttcctcatcttttgcccttcgttgaatcgcatccatcaactgcaaaatactagattatagcaccttgccccaacttctcctttcttcttcttcctcccttttatttctctctcgcaggcaaaggtcgcacgcagctgcgggaggccagcactgattgggccgcgtgcggcggttgggcggtggtctccggtcgcgctgatgaaatatgcagtttgaccaagggcaaaagatgatggaggcaaagtcccaaagttttcaactatatgatttaatttgttaaatgttatatattataaaaaaacaaccaagattccatgccatatcaacatttgcaaacagctagtaacattttctttttgcacgtgcagtatttttcgttgaattatccgtggctggacatatcatc

SEQ ID NO: 15529 - DNA, 2458 bp, Oryza sativa
  ref <308>: DATABASE ACCESSION NUMBER: AK066048
  ref <309>: DATABASE ENTRY DATE: 2001-12-06
gactttcggcatccgctgctgttttctcttccgctttttcctctctctctcgcctcgcctctgcttcctcctcccgttcgtctcccctacctacctagggtttctcgccgcctcgcatcccctcctcctcctcggctggttcgcctcctactctacgcttgctgctgcaggtacaagcgataagcagtagcttcttcatcaaaggttttgtgcaaaattatgcgatcttcatgggctgattcagttgcgaacgccgaggaatcggcgcccgcgactggtgctgctcccacccctgttgctaatcaccagaactcacgccccactcgcagcgcatacgtgcctcctcacctccgtggccaggcaccaaccacaactgcagctccagctccagctccaggaccagctgctgtccagccctcagcttctgtacagccttctggttacgcagctattgttggtggctctcgctgggctggccctgccagtggtgatggtactggcgctgtaggtggcccacgccagagcgttggtggtcgtggtgggggtgggggtgggggtgggggttggaactcccgccctgggtgggaccggagagaccgtgaacctaacccttttgccaatagcgaggcagaggaagccacagaggttgattttgatacggcaaacactggcatcaactttgatgcctatgaggacattcctgtggaaacaagtggccatgatgtgccaccgccagtcaatactttcgcagagattgatttgggtgatgcgctgaatgagaacatacggaggtgcaaatatgtgaaacctacgccagtgcagcggtatgccattccaatctccattgcagggcgggatctcatggcttgtgctcagacagggtctggaaagacagccgccttttgtttccctatcattagtgggattatgagctctaggccaccacagaggccaaggggatcgaggactgcataccctcttgcattgattttatcccccactcgcgaattatcagtccaaattcatgaagaagcaaggaaattcgcataccagactggtgttagggtggttgttgcgtatggtggagcaccaatacatcaacagttgagggaattgggaaggggcgttgaaatccttgtggcaactcctggtcggttgatggatctgctggagagggctagagtatcactgcaaatggtgaagtacttagctcttgatgaagctgatcgaatgcttgacatggggttcgagccgcaaattcgtaaaattgttgagcagatggacatgccccctcgcggtgtggggcagacaatgttgtttagtgctacttttccaaaagaaatacagcgcatggcttcagatttccttgcggactacatcttccttgctgtaggaagagttggttcaagtactgacttgattgctcaaagggtagagtttgtccttgaagcggataaaagaagttacctcatggatctcctccatgcccaaaaagcgaatggtactcatgggaagcaagcgcttactctggtctttgtggagacaaagaggggagctgatgctttggagaactggctttacacaaacgggttccctgcaacaagtattcatggcgaccgaacacaacaggaaagagagtacgcgcttagatcattcaagagtggagcaacacccatccttgttgcgactgatgtagctgcccgtggacttgacatacctcatgttgcccatgtcatcaattttgacctcccaaatgacatagatgactatgttcatcgtatcggacgaacaggacgagcagggaagtctggcttggcaactgcatttttcaacgagggcaatctatccctggcgaggccgttatgtgagctaatgcaggaagcaaaccaggaggttcctcaatggcttgaacgatactcggcccgttcttcgttcggaggtggtggtggcagaaaccgccgatcaggcggtgcccgttttggtggccgtgacttccgccgcgacaataggggtggaggcggcggcggttatggtggtggcggtggtggctatggaggcggcggttatggagggggcggtggatatggcggtggctatggtggtggtcaaggctcaactagttcgtgggactgatactgattcccggctgtcgcgagcaacgatcatattctattgatttccctgaaaacatctgatgtgttgggatttgtaatcagcctggttggcatggtgctggaaaatgcgcccgtttaccttcaatttatggatggttgttactgcactggctttctcgtttactggcaatagtcttggttggctgattcacctgtccttttcagttgattgtttcgcgtagtttactagtttcggacgaggcattactggccagatgttttttttcttttgtttattaatgttctttcatttttgaccggaatacttctatactagttttggc

SEQ ID NO: 15530 - DNA, 2346 bp, Oryza sativa
  ref <308>: DATABASE ACCESSION NUMBER: AK066049
  ref <309>: DATABASE ENTRY DATE: 2001-12-06
tgcctcgtcaagtcagtctccctctccccgcgcggccgcgccccacccacacaaaccctccaccaccaccacccacccacccatccgttggccaccggcggcgtgggcggagggcggcgggccggcggccatggggaagaacctgcgtatcaagaccggcaaccgcgccccgctcctcgcccagggggagacgtcgagggcgctctccgatctcgaggaggggagcaacgtccagccggagaacgtcgggttctgccgcgtcatcaagttggcgaggcatgacgcggggaagctggttattgccaccatggcgctgctcgtcgcttcgctcagtaacattctcgttccgaaatatggtggaaagataattgacattgtttcaagagatgttcggcgtccagaagataaagctcaagccctagatgatgtgacgggcacaatattgtatattgtcataatcgtcgtaactggttcagtttgcacagcgcttcgggcatggctattcaattctgctagtgagagagtagttgctcgactgaggaaggacttgtttagtcatctagtaaatcaggaaatagcattttttgatgtcactagaacaggagagctattaagcaggctttctgaagatacgcaaataataaagaatgctgctacaactaacctttcagaagcattgcgcaatattactactacgtctattggtcttggttttatgtttgcaacttcatggaaattaacattgctggcacttgtaattgttccggttatatcaattgctgtgcgcaaatttggacgctttcttcgtgaactttcacatcagacacaggcagcagctgctgttgcttcatccatagccgaggaatcttttggtgccattcgcacagtaagatcgtttgctcaggagagtcatgaagtcttacgatatggtgagaaagtagatgagacactgaaactcggtctcaagcaagctaaagttgttggcatgttttctggagggctcaatgcagcatcaaccctatcagtggtcattgtagttatttatggcgctaacttaaccatcaacggttacatgacaactggttctctcacatcgttcattttgtacagccttacagttgggtcgtcagtctctgccttgtcaggactatacacaactgtaatgaaagcatcgggcgcaagccgacgagtatttcaacttctggaccgtgtttcctcaatggcaaattccggggacagatgcccaacaaatgaaaatgatggggaggttgagctcgacgatgtctggtttgcatatccctctcggccttctcatatgattctgaagggaataacgttgaagttaacaccaggttcaaaggtagctcttgttgggccaagtggtggtgggaaaactacaatagcaaatttaattgaacggttttatgaccctctaaaaggaagaatcttgcttaatggagtgcctttgccagagatttcacatcagtttctccacaggaaggttagcattgttagtcaggagcctgtgctctttaactgctccatcgaagagaatattgcttacggattagagggcaaagccagctctgctgacgttgagaatgcagctaaaatggcaaacgcccacaatttcatatgcagttttccagaccaatacaagactgtagttggagagcgaggcatcaggttatcaggtgggcagaagcagagagtcgccattgcaagagctttgcttatgaaccctcgagtgctcctcttggatgaagctaccagtgcactagacgctgaaagcgagtatcttgttcaggatgcaatggactctctgatgaaagggaggaccgtgcttgtgatagctcaccggctatccaccgtcaagagcgccgacaccgtcgccgtcatctccgacggccagatagtggagagcggcacgcacgacgagctcctcagccgcgacggcatctacacggccttggtgaagaggcagctgcaagggccaaggttcgaaggcaccagcaacgcaacagccgagatagaacccataagcaatggccaatagacaaatatagcctcttctgcatagtacttgatttttgtcccttctccgggtaggtggacaccgtttcctgatgatccactgaatgtaaacggatatgaatgcatccactctgaaaatgccacgcagtcccgcacaacagtacaaacacattctaattgtcacgagctgctgctgtgtcttacacaattaactcgcttatttttttatagaatgtaattatgccttgatggcgtgatgttgcgcggatgggtaatgaccgcaatcaatattgtgttgcttgattgcttctc

SEQ ID NO: 15531 - DNA, 1678 bp, Oryza sativa
  ref <308>: DATABASE ACCESSION NUMBER: AK066050
  ref <309>: DATABASE ENTRY DATE: 2001-12-06
gtgaagtgaaataaaccctatactctgttctgttctagaagaagcagaaatctctcggtagcaagttctctagagttatattttgccataatggccaaaaggtgtctgttaaatcacaaataaactcccttgcccacttgcccgcccgaaaatcagggactggcacgttgttatcatgttggatatgcatcatctcacggtattaattgcctcgtggattaagttattattacactccactcaacctaccagaacccattacgaagcagtgaagacgactctgtatcgacaggaacgtgcgtggttgtaacgacaaatcacgttatttcgatacaggttaatcacgggtcacaatactatgtagattgatttgatatatatctaaccgactcatacgggcaattgagacaatttggtatcacacggggttgttatcagttgcactcatcacccttgggtgttcacaagatgatgtattgatgtggtccagaaatctgtaacactgttcatcgcagcactgtaccagaagaattactccctccgtcccacaacaagcaaaccgtggattcccgtgttaacgtttaattgtccgtcttatatgattttttttataattagtattttcattgttgttagatgataaaacatgattaatattttatgcatgacttatctttttaattttttataacttttttaaataagacgaacagtcaaacattggaaacggaaatcaaggtttgtctttttttttggacggaaggagtatgtagatagagctgtgacggttactgtaggtcaaatgtttagacgttgatgcccctgatctgacagctgggaaatggaatgcactccatggttaccctaaatgcagatatattgtagaaaaacaaaatttatactatttttctcatcctaaaatataacaacctatgataatattagacttatcctaaaccatgaatttggacataccgtatgataaattcgttgtgttaggataagtttaatcccattctaaattgttactatattttaaaacggagggagtagaaagttttataaatgcttggctaatgaagttagttgaattgaattgctcgtactttctcatgaacttaagtttttaagcgagttggctaatagtccatgatgcacgttaatatggtattagagtcaggcatggaattcatatgatagctgatgtgattaaatgaaaaacttgaagctcttccattccatgtattataagagcaagtttaatagtacaatcaactactagctccaaatcatttgtaatcaatttaatagctaattcatacaataagaacatataaacgtatactacactattagcacatagtcccacctgccatacatacattttgtctaggagcccgtgctgcagctagcaacaaatttgtagcccgctgctcatctctctttttttatttccttgatatgtgtttatagctggcatatagcctggtattgtatctgctctaaggtacaacatccacatgattcatgtggagttttgaagtgaaccgttggctctctctcattagctcaagttttttggttgacttggttgacgcatgtactccatccgtcccaaaatataagcatttttagcatagtgataagtcaaacattttcaactttgactattaatagc

SEQ ID NO: 15532 - DNA, 2875 bp, Oryza sativa
  ref <308>: DATABASE ACCESSION NUMBER: AK066051
  ref <309>: DATABASE ENTRY DATE: 2001-12-06
gctgggctctccctcgacgccgcctcgctcgccgtcgccaccgacggctccctcaccgcctcgctctcccacccgtcccgcctccgcccgctcctgctccgcctctccgcgctgcccccgcacgcgctccgcctccagatcgacgaggactactcgtccaacacgccgccgcaccgccgcttccaggtccccgacgtgctcctcccggacgtcgaggcgcgcacgctccacctcccgcagcccaagacctccgccgccggcgtctccaccttcgcgctgtcctccgacgtcgacgtcgtcgtcaagcacgatccgttcgagctgaccgtccgccgcgccggctcgggggctcccgtcctctccttcaactcccacggcctcttcgacttcgagccgctgcaggagtccaagcaggagggcgagacctgggaggagcaattccggagccacaccgacacgcgcccacgcggcccgcagtccatcaccttcgacgtctccttctatggcgccgatttcgtctacggcctccccgagcacggctccacctcgctcgccctccgccccacccgcggccccggggccgaggagtccgagccctatcgcctcttcaacctcgacgtgtttgagtatctccacgagtcgcctttcgggttgtatgggtcaattcccttcatgatcgcgcacggtgatggtccgtcctcagggttcttctggctaaacgccgcggagatgcagatcgatgtgcttgcaccagggtgggatggagcctcgtccacagagaatgggcggatcgacacgctatggatggccgaggctggtgttgttgatgccttcttcttcgttgggtctgagccgaaggatgtgatcaagcagtacatcagtgtcacaggcacaccctcgatgccacagcagtttgcggtggcgtatcaccagtgccgctggaactaccgtgatgaggaggatgttgccggagtggattctgggtttgatgagcatgatattccatatgatgtgctctggcttgacattgaacacacagatggcaagcggtactttacatgggatcattcagcatttcctaacccagaggtgatgcaagggaagatagcagataaggggaggaagatggtcaccattgtagacccacatatcaagcgagacagttcgttccacctccacgaggaagctactgctaagggatactatgtgaaagatgcgactgggaaagacttcgatgggtggtgctggcctggggcatcgtcatatcctgacatgttaaaccctgagatacgagagtggtgggctgacaagttctcctatgaaaactacaagggatcaactccaacattgtatatctggaatgacatgaatgaaccatcagtcttcaatggccctgaggtaaccatgccaagggatgcagtacattacggggatgttgagcacagagaactgcacaacgcctacggatactacttccatatggctacagcagatggacttcttaagagaggtgaagggaaagacaggcccttcgttctgtcaagggccttctttgctggaagtcaacggtatggagcaatttggacgggcgacaactctgcagattgggaccaccttaaatcttctattccgatggttttaactcttggtcttactggcatgactttctctggtgcggacattggtggattctttggcaacccagaacctgatcttttggtgcgttggtaccaagtaggagcattttatcctttctttagaggtcatgctcatcatgacaccaagagacgcgagccatggttatttggagagcgaagaactgctctcatgagggaggcaattcatatgcgatattctttgctgccatactattacacactgttcagagaggctagtgtaactggtgttcctgtgatgcgtcctttatggttagaatttcctgatgacaaagagacatataataatggtgaggcttttatggttgggccaagccttttagcacaaggaatttatgaagagggccagaaatcagtgtcagtgtaccttcctggagaggagttatggtatgacttgagaaatggatctccatacaagggtggtgtgtcacacaagctagaagtttcagaagatagcattcccagtttccaaagggcaggcgcaattgtgccaagaaaggatagattcaggcgcagttctactcagatggtgaatgatccatataccctggtgatagcgctcaatagctcaagtgcggcagaaggcgagctttatgtggatgatgggaagagttatgattatcagcaaggggcattcatccatcgtcgttttgtatttgcagacaataagctaacttccatgaatatcgcacccaaaaatcttggaaacaagaaattttcgaccgagtgcgtgattgaaagaattataatccttggggtatcatcgggatcaaagaaggctattgttgaacctggaaatcatgaagtggatattgaattggggcctattagtctacgaagcggttcgagctctgttgcaccaacagtacgaaagcccaatgttcgagttgtagatgattggactataaggatagcatgagatatatccattcacatctgaagcctgatgcttattttcatcgctctcaggtcataaaattaggctagaagcgtagtgctgccttgctcaatgtggtctgtggaagcgcaaaattttatattttgatggcctcaaagatttaccatgtaactggtacgcgtgctgtttttactatctacttcaaattttgatataatttgagacagaaattgctgatgtacatctgtagctttgacactggtttgtgtaccacgatgcatgagatgtgaaattcttgagt

SEQ ID NO: 15533 - DNA, 3298 bp, Oryza sativa
  ref <308>: DATABASE ACCESSION NUMBER: AK066052
  ref <309>: DATABASE ENTRY DATE: 2001-12-06
gatcctcttatctagttggagcaaacatagcgattgaagcgctcggccttcgcctctaggatggccaaatcgcgctgggagaggacacctggggcagctagcgtctatattaggtagcacaccacggcgtcgcgggtgcgttgcaacggcggtcgtatgctgagcaacaagaggagcacttccgtagctccgcggccttggcggctggtttcgcaggagcggcgccacttccctctgcagccgccggagtcagagagatagagagagttgtgccatggagtcaggagacttggagggtggggtttgatttggtttgcttctagaagatttcctaaaggggaacgaacatgcatttcatcatgggcttacatccaccgcatggacccgctgctgccccatggttaacctcgagctagagacaaggagcctccttgtagggatgcagctcggggataacttgtagtggatggcacttgtctcactgatttggaaggatgggaagctcggcgtcgaggtgcgccattctataggaggtggtggggagggtttcgtgctcctagcctcaccttcctctcgacctccggcctctagaccttccttccacgtcttggcagccctcgtcttggcggaggatggctctaaggagaggaccgaggagacgagtgagctctctcagccaaattggtgggtttcccatcatcggccttcgcctcctcctgcgatctcccgcgcagtcgagcttatgctattgttgcttcaccgccgctgcctcctcttgtcaccccacgccacagcgatggtctaggaagcgagaaggccatgtgagaagctcctcgcttgccacccactgctggtcgccacgcttccgccttcccatcgatgagctggcgagctcgaccttgccggcctccaccgctaatgtttgtgcacacagaaaaaggagagaggaggtagggaaggaagaaatgatggtatgtttcactaacacgtgcagctcactgtaattttctttttctaattgatgtgccacgtaaacgccacatcagctaaacccaggctccatgctgccctgggatctcgttgacactcgtattagaacgtgaggatacgttgtaccaggttttgagattaagggacccgcttgaaactgactctaagatgagggacatgaactgaacttcttgttcctggactaattaaaatctgctcgagggagcccatcatggccagaaaacaattagctcctcggcccacgtgggacacacggcccaagtcgcgggcgataccttccctcccccttcccgccgccgctgtcccttgctcccacctccgctcctcgccgccgccgccgcgagtagtagtgcgggtctcgcgctgccgcttggcttggctcccatggacgcggcggcgccggaagcgacgggtggcttctgcggaggcggcggcggcctctccaccggccggaagctggtgccgtggtcgagctgggcggagtggcggcacgtgcgcgacggcctcttctccgcctcccccgccgccgctcttcgtaggatcgcggcgtggaggagcagaggcaccctcccggtccccgtcgatgtgaccgcggctttcgtcgagatacggctgcgggatcccttcttccggagtgtaatggctgtggatgatgcgctggagtcggaagagatgctgtcgatgctgtatagtatggcgatcatgaggctcgtaaatggttttgtggagaacccacataagaaaactggctattcaatatctgaattagctgaggctgttggaataccacgagttcttgtcgacattcgtcatgagagttcacatcgcactcttccctctcttcggctgctacgattggcagccattaaggcatttgattggttgaagtgtatttactgggattcccagactaatgctattcctgatgttcaagttgaagtaaggtcaaaattgcatgagatcaataactttatgaagggaaaagattcaatgaaagcaaagtcgggttcaaaaaggaaacgttctgagaaaatgatttcgagaaacataaaatatgtacgccggctttactacgcatgtccttctgaggttgcctttgttatattggactttttccaacgtggtgccccagagtcctctgaaaatagcgatgtgttagaaactgataaggatgtagatcagtcatctgatattcacagtgaaatatcaaataatgatatgagaactatcataactaaattatcagaaaaggaaccaaggttgctgcttggcatactgaagtcagtaattgaaacaattgagaccatggaagaccttgaaaacaaaggtgaatacaatgctagcctgccagctaaagtggaacttttaagttcccatgttctgtggcttgtgacaaagttaaaagaattgaaggattcaggttgcattggagttgtccatgagataggagtgctctcttcagacaggaatgcagtcccacgtttctgtctagcaaaacttctgcggaagctgttgagtttgtctattatagatgaaagatgtatcatagatgcagccctagtgctgattgagatggccaccaacaatgtgcaggagaaactgaggaagcttcctatgttatccctgggaaaggtggctagagattctaccctcccagagcccaccaaagaaacggaatcagttgaggaagcaacagagaagctggaaatgttcaagtcgcggttgaaacagaaggatttacgtttggcagaaaatgacaccggggcttcattgaacacaatcatgccagagaaacgtaacagatggtctacagcaaagtcttggaccccctgtccaataggaatgataccttgttcatttagttcagtggctgttcttccgacccttgacgtcgtagatcatgaatcaagagatgaaatattagagcaacatgtaagtgttgagcctgatgatcatactgagaggatcggctattattctgacccagagaagcaattggatgctgaaagaattccggaattatcaagaccatcacctgaagaatgtgagatttcagatatgccagaactggcatttcctctgaagggtaggttgctagttggtggggtgtggaagatggtgagcgaagaggagctactctttatcaagtcaaagatgaaaattttgttgtaacaacagctagttcagttttgtcatcttaaatcaacaatttcaggctgtaaaacgaacaagggtagtactgtgctagttaagagaaaaatgtatcgtttaccccccagttttgctt

SEQ ID NO: 15534 - DNA, 4260 bp, Oryza sativa
  ref <308>: DATABASE ACCESSION NUMBER: AK066053
  ref <309>: DATABASE ENTRY DATE: 2001-12-06
gattggatttggaagctaggaatgaagcaaaatggaagaactctctcctaagtccaaccgcttggagagctcgctcatgctactctgatcatctgatgccttcagcttagaagatatcaatggagggctccatgttcaacctcccaggaaggctcgaccggctcctgcgtcgtcatggcagcatgctgcccaagggggcagaggaggagatacctctcatcaagcaagatctcgaggaaataatctccgtcctccatggtcactgtagcaagccaaagctggaggaccatgccatggtggtcaggtgctggatgaaggaggtacgtgagctctcttatgacatcgaggattgcatcgaccagtatgagcatgccgccactgccacccggtcacatactggacctaatatttgtcgccgtaagttcaatcagcggcatggaaagatgatcccttgggttccctggaaacttaagcagcggttgtggatggccaacaagatcagagaattcagcctgcgcacccaggaggcgcttcaacgccacaccatgtacaacaaccttggtggcatcaccattgcttctactactggaggagatgtatgctctgcaacaccttggcatcccacgcagttcagagagcacaccgacaacgtctgttctgtcggtatagacgccgatggtatggaagctgccctgaatgacctgaacaagctcaaaaacttgctcgctagtatcccgactgcttctctcgtgcagttcagggagcacgccaataaagtgcgtcatatccaccccgatgtggaagccatcctgaacaagctcaaaaacatacccactggtatcaccactacttctactaccactagaggtgatgtatcttctacctcatctaggcaacccacgcggttcatggagtccgcgggtcttgttggcatcaacgccgcggtgaacaagcttgaaaacttgctcgatgtgtgcggagaggagaagctcaaggtggtgtccatcgtgggagttggaggagttggcaagactacgctcgccaacaagctgtactgcaagcttcagcggcagttcgagtgctgggcatttgtgcagacatctcagaagactgatatgaggaggcttctcatcaatatcctctcacaggttcagccgcaccagtcacctgacaattggaaggtgcatagcctaatttccagtatcaggacacatctgcaagataagaggtacttgatcataattgatggtttatgggctacatccacatgggatgttattaagtgcgctttgccggatggtaatagttccagcagaatactaaccacaacagaaattgaggatctagctttgcaatcttgtagttatgacttgaaatttattttcaagatgaaaccttttggtgagggtgactcaagaaaactatttttcagtatagtctttggctctcattctaagtgtcctccagaagtcagtgaaacattatatgatattgtaaggaaatgtggtggtttgccgctagctattgtcactgttgctagtcttttagcaagccagcttgagaaacaagaacaattggattatataaacaaatccttaggttacggtttgatggcaaatcctactttggaagggatgaaacaactactgaacatttgttacaacaatcttcctcagcatttgaaggtatgcatgttgtatcttagtatgtatcaagaagatcacataatttggaaagatgatttagtgagtcaatggatagctgaaggttttatctgtgcaactgaagggcatgacaaggaagaaatttcaagggcctattttgatgagcttgtgggcagaaaaatcatccagcctgtacatatcgatgacagtggtgaggttttgtcctgtgtagttcaccatatggtactcaatttcgttacatacaagtcaatagaagaaaattttattattgcaatagaccattcacaggcaactataagatttgctgacaaggttcgacgattatctatccactttagtaacgtagaagatgcaactccgcctaccagtatgagattgtcccaagttcggacagttgccttcttcggggtcttgaagtatatgcctttcgttatggagtttcgacttattaaagttctagttctacatattttgggtgatgaggatagcatcggcatttttgatctcactaaaatttcagaacttgttcgactgagatatttgaaggtcacctctaatgtcaccgtaaaactgccaacccagatgcaaggtctaccatatttggagacactgaaaatagatgggacaataagtgaagttccaacagacatttatttgccacgtttgctgcatcttactcttcctgctaagacaaacctgcccagtggaattgtccacatgacatcgcttcgtacaattggatattttgatctcagctgtaactcagcggagaatctatggagccttggtgagctgagcaatctccgggatttgcagctcacctattctgaaatacattctgacaatctgaaggataatatgaaatatcttggatccattctggggaaactccgtaatctcacatctataactttatcgcctcctggctcttcctgtccagatactctacatattgacaggacgaggatcaatgttgatggctggagcagtgtgtcctctccaccagcccttcttcagaggtttgagttgttaccatgtgtttgcatcttttctaacctcccaaattggattgggcagcttggaaacctctgcattttgaagattgggataagggaagtaacaagtaatagtattgatgttctaggagtattaccgaaactcactgttttgtcactttatgtccacacaaagcctgcagaaaggattgtctttgacaatgcagggttctcaatcctcaaatacttcgagtttatatgcagtgtagcatggatgaaatttgagatgggtgcaatgcctagtctaaggaagctcaagctaggttttgatgtccatatagcagatcagcatgatattattcctgttggcatcgaacatcggtctggacttgaagagatctctgcaaaaattagggtcgcctgtactgctcatgatcattgtagaagatttgcagagtcagctttgactaacgcctttatgatgcatccaggacgtcctagcgtcaacatacggtgtgtggattggacctttcatgataaggataatgactgtgtggggacacgagaggaagaatgtaggactccaatgaaacaggagcattttgtgaaagaagacttaagtgagaaatctgcagttctacaaaacgagcacgacgaagaagcacataaatttgttgacagaagatattatcccatcatggacgcggcagagatccgcaggtgtccgtggagcgtcaacgaggagcaggagcagccggtgttgatctacgacgccagaaccaagatctcccagtcgtcgtccatgcacagcgaattctgggcggccgtccaacggctcaccggcccagctgccacgccggccaagaccaagaggcacctccacctgacgacctcgcctgagctggaggacggcttcttgccggtacgtagtctcgtcttcccgtccgctccggatccacggtgcaacatgaagaagaagaagatgagggccggccctggagggggtcgagcagtgcggtcaaactgggcccccaaatcgtaggggccccaacccagggagcctgcaaagcctctcttctgcaacaaagccatgcgatgagatgatgcgaacagaaacgcccaattcctactgcaaagcctctcagtgccttgccgcctgccgagttgccgtcgaccgccccggcgccgccgttggctgctgctgcaagcctgaagacagctgcaactgctgatttgctaaactgcgcacctcagcctaacgatcaaaactaaaagtctcaagaggtgttgatgatgcgaagtgatcagttgtttaaaagatctgagttcagagggattgagcttggagacgtgctagtgtgtgatgagtcgtgcgcatccggacgtctgtgaatatttaattggtaagactttaaatttgaatttgtagttttatggtgtaatttatatgagtatctccataagtaatgtttttctttctagtacccgtcactgtggcatattttgaaagaagctttttgaagtcgaaattattaaagaaactattgagatctaaaatgtcgaagaaagtgtttgatgcg

SEQ ID NO: 15535 - DNA, 1336 bp, Oryza sativa
  ref <308>: DATABASE ACCESSION NUMBER: AK066054
  ref <309>: DATABASE ENTRY DATE: 2001-12-06
gacgagctaactgctaagaatttgcatgagctagcaattcgcatgattgcgatcgatcgaggatatcgagaccggagaggatttcagagggcgtggttggccggggtcgtggtgttccggcgatgcaaggggagagagacgacgaggcggcgggttgttttccggcgggaggcggcaaaggcaaggcgccgtccccgccgccgccgccgccgagccacgagttcgacggtgggcaccgacgcgggctgatcaggcggcggcggaggtggaggcctgtccgcggcgaggtgttcgccgtcgggttcatggtggcgggcgcggcttacttccttcttgccgatgctctcgccgtgggccgggacccggccgacggcggcgacccttccggcgggtggttcttcgccgcctacgtgctctggatcacggggctgaacctgttgtacgtgctggattatctgatgaactgacgatcgagcactcgcgccgcaacgccggccaactccggccgtctgcttcacatacggtaagccttttcgatcgccggcagccgctaccaattcctcaaccagctaccgcaaccacaatcccaactggtggacgtacgatcgcacttcccatcggcgatcgatcgccgcttaattccttcctccaccaaattaacctgacggatgatcgatcagccagtactcgcgacagattgttgctcccaccctagatctcatctaaagtactagctttgtggtttactccgaccgagttaattatcgatctataccctgtcgacatgcatctatctccacctcgatctcctcaagaagagagagagatccatctaccctctctgatctcttgatcattcattcttggaagcatttctactgaataatcttgtgatacgcatgcaatttcgcgcttgcgtgcgtttctctctacgactatatccagctaattgtctggaagatctctgccctcacgtgtatatgaaaaatacaaaagctaggatcgatttgatggaagatttatctcaaacaccaccaccaccaagtcccaggatgtgcatgcgctcgatctctgtttttctgtcaacctagatagcttcaaggtgaagcatcaaagaggacgatgctattatattgtaatctgaagactaatgtgttggcttaatttgtatatatccaagtgtactacagtactactacgtacgtactctctgttatgatgagatctaggggtttcgctggatgcatacttgctacatatggacaagcatgcatgcataaattaaatgaagttgtgtactcctcaagaaattactatacaacatatatattaaggc

SEQ ID NO: 15536 - DNA, 1451 bp, Oryza sativa
  ref <308>: DATABASE ACCESSION NUMBER: AK066055
  ref <309>: DATABASE ENTRY DATE: 2001-12-06
gatgatggggtcctagccctttctccctctcgcttattccccccccccccccccctctcgcctcgcctccaacggggacgccgccctcgccaactgggcgacgccgccgccgtcatcaactcgtcccggtcaccaccaccgcgtatccgcggtatactaccccggccgtgctaaccccgctgcactgcgagatcaagtttgtaaagacaaaaaccatgtctttcaaggacggaatttggcataattcaatacaacaaactcattatactttaagtgctctacaaatcagtacatttggacatgttagagctttagttgtccatcggactggaatttggttttgttaatgacaaaatttgctttctcactgatgcttgagatggatgatcttgaagtaaaaaatgatgaagagtaccagatggatcctattgaaatcaaggatggtgaagagcattcaatagagatgcttgttgagtagccacggtttctagagcccatatgtcctgaagaggttaatgaagatacacgagtgtacccacgtgtgggggatgagtaccaggtggaaattccaaatctagcaacagaagaggaacgcatgaaactaaggtcatgtccagttgatgacagtggaattttcggttttgattatcctgttggtgtgggactagctattccagtcacatggacccaaaaaacaagcgatcatgtaaaaaaagagcagacaggattctcaggacgcagttcatgttcttcacaagatgaatgtaatagccacgtcacagaagatattcctagaaatgttccaggctgtaaagttgaatgtgatgagcatgatgagaaacttctaaaatctgctgaacaagatattaactgcttacaaaatgggaaagccagtgattatattcctctgccaggaatgacacattattcctggactgatgaagaagcacaaacttttcttcttggtctatatatttttggcaaaaatcttgttcaggtgacaaaatttttgcaatgtaagacaatgggagaagttctatcctattactacggagagttcttcaggtctgattcatataatcgatgggctgcaagctgatctgcaactccagcaggtgactggatgggcattcaagaaaacatcctctggctttccgtccagtagatgttcattctagtcttgaaataaacgagtggctacttggcaagtgaacttcttcttcttcttcttcttcttcttgttttttttttttttttgaactggagtggcaagtaaagttggtatctgtgaattggttggagcttcgagggttgtgaattctgacatttgtcagaataaaagaagttcatactgtagcaattagatgccagtatgccaccgcttctagtgtatagaggaacttttcttccatctgttggaaataataaaagcagctcgtcgaatttacacc

SEQ ID NO: 15537 - DNA, 1004 bp, Oryza sativa
  ref <308>: DATABASE ACCESSION NUMBER: AK066056
  ref <309>: DATABASE ENTRY DATE: 2001-12-06
gggaggcaggcagcccggtccagcccaccaagcaggtgaggggcggagatggaggagacggcggcggcggcggcggagaaggcgacgtcgtacagttactgggtgcgggaggccacgggcgacgccgcgccgcttcctgcgccacgcaagatcgacgccgccgacctcgccgccaagcccgcgcccaccaccctcggctccgtctggaacaaggctggaacctgggaggaaaagaacctcaattcatgggccaacggtaggataaaggatttgctgggctcattagaccctttggaattttctactgggaaggcatctgtttacgaagtatccaagtgttcaggcgatgcatttctggtcactgtccgtaataagaagagagtaggctatacttatgagctgggcttaaaatttaaaggtgaatggttaattaaggaagaaaacaagaaggtgaaaggctatctggacattccagaattttcatttggtgaacttgaagacttagaggtgcaaataagttttaccgacatcaaggacctctcgtccgacaacaaggcacaaatcagcaaggatttgaagtcgtttcttgcaccgatccgggagaaactgcgcaagtttgaagaagagctcaaggatagatagcaaagctgcaaacttggttggaagcatcacgtatcaaaagatgatggcttaatctatagccatttcacgtatcaaaagactgcttcagacgtttactgctaaaagtttgttccaatacttgctgcaatatgcaccgtgtttgtttcattgccgatacattcatacttgtgccactgttgaacttacaagaccaattgagcagaaattttctgaagctatattcctgtcagttctgtagtttgtattcaggtagccaggcccatgggccacaactcgaaacaggtttcggcccaatcggcttgtatatctgattcagtagcactgtggcaattcaccaatcagaactcagaaattcagaactg

SEQ ID NO: 15538 - DNA, 1544 bp, Oryza sativa
  ref <308>: DATABASE ACCESSION NUMBER: AK066057
  ref <309>: DATABASE ENTRY DATE: 2001-12-06
gaatgacttcttcttcctcctcctctccacagtccacactgttcatctcctcctcccctccctcccaattcgattcccaaatcccaaaattgaccacccaaatccgcgccaatccatggattggatgcctcctccgaagcccacctcgccgcgctcccctcccctcctctgggactgggccgacgccgccgtgccgggctcctcctccggcgaggtatccgccgccgccgccgccgccgcggctcatccgggaaggcggcggaaggagaagcgaggcagggcggaggaaggaggaggtggtggtggggaggtgaggtgccaggtggaagggtgcggggtggagctcgtcggcgtcaaggactaccaccggaagcaccgcgtgtgcgaggcccactccaagttcccccgcgtcgtcgtcgccggccaggagcgccgcttctgccagcagtgcagccggttccatgcgctctcggagtttgatcagaagaagaggagctgcaggagacgcctgtatgaccacaacgctcgtcggcggaagccccagaccgacgtgttctcctatgcatcggcaaggccgccgtcgtcattattatttgatgataaccgacaaataagttttgtctggaacaaagctccactcagccatgtaaggcctttcgcaatttctccatgggaaagctcatctgaagttgggacaactgatggacatatttatttggataaatctcacatatccaaatctctcccagcatttaacaccgacatagatgagctcttaccaatgaaagacttctctgcagccactatttggatgttcttcggtgtcctttttatccgaactgcgcaggagagctgcatgtcatttcattaaggagaaaacaatgtacatattttgatggaagaatgaccattattccattttgcaggtccggacgcatctttaactgcttcaaaatttgatggagcaccggatcttcagcgtgctctctctcttctgtcatctagttcttgtggattacctgatcctgtacagcaagcatctcgcgtcatccaattcacaggcgccagccaaaacaaccgggaacttcctccacttaatggagggaattctgcttcagcatcatgtgccaatgtacaaactatagcacaaccggctcagctggttcgttttaccatgaatgctagcagcaatgcttgtcagtccaatttcttcggtttaaaccagataaactaaaggcctggactgagagcccgtcgtcgatttcgaccaatatccaccaaggtggccttgagaagatacaagaattgcttctatcaactatcagagtgcaaacaatgtcacagttaatgttgtcatcataaataccggtattggtctcccctgaactaaaatcgaacggagtgatggcttgcttgtgttttcgataatcgttatgcagttctaattttttttctattgttttctgccaatgtaccgattttcaaactgtgggtcttgtcatttatacttgtacaacctaatgtcaaaatgtcatgtatctttg

SEQ ID NO: 15539 - DNA, 1988 bp, Oryza sativa
  ref <308>: DATABASE ACCESSION NUMBER: AK066058
  ref <309>: DATABASE ENTRY DATE: 2001-12-06
gcttccgttggcgtaaaagaaaatctcccgtctcgtctcctccgctccttgcgccatcccgggctgaacagggaggggcgacgatctccttctggcgagcagagcaagggaggggaggggaggggatcctggtgatactatgcgtttgatgtcctctgttccttgacttggatgtaaccagttatctgcctcgtcagtaacctttttgatccttcaaacaaaaagtcagtagtacttgcacgtgattggcaaaattagtcaagacgggtgctctttgctgcgtggccgcgaggccacatgggacaaagtctaatcttgcaagcagagactgttctatggatcctaatgaaccttgctggcggatgaattcaagcttctctcctccaatgtcaaggagatgggactgcaggaatccatctgatggattgccacacaggattcatgatgctccaccttatgtatcatcactgtcatcccatagtaaaggaagtagaagtgcatttggcagtgaccagtacttgaatcaccagcattctgtatcagatggggcactgtcttattttggtagtccagctgatagtctccaggctccacgatggacgccctctcttcaaagatttgatctcggcgagttctctacacctgcaggatcaagacctgacacttctggttatccccaatccagtgagagacaattaactgcagtaagcagtttcagttctgcatcccccttctcagagtcaagtcagctggcatcttctagtaaaccaccatacttacatttaccacgcaatcatctgggaaggcgatctttcatgtcaaaaccagtgtacccgcttgtcttccgtaatccagtgtcggaagcagaagcctctgggatgcctgaagctagtaatattgggcgaacaacacctagtgatgattctcctgtgtggcggcgcagcttggcaagtcctgagctcaagttccacaatgcattgagtgagtttcggaaggtagaggcttcaccagagccaaacacaagctcaaggagggaaggattcagatggagcaatgctagtagctatgattttggatatgatggtgatgccattgacatttcagatcatattagtgtggagtcccaaagatccccgacaagttcagtgaggtttcttaagtgtggcttatgcgagagattcctgcggcagaaatcaccatggacctcaaaccggattgttcaaaattctgatatgccagtagcggcggtccttccatgtcgccatgtcttccacgcagattgtctcgaggaaagtactccaaagagtcaagtccatgaaccaccttgccctctatgcacacgaggcactgatgatgaagggtgtgtctcattctcggaaccattacatgttgccctcagatctgctcgtaggaatcaaggtaatagtttctctcttggtggttctggtggaagtaccagcgcaaatccttctcgtagtgatcatggcttgaagagaaatcagtctgcccttgtggcaagacgcagtggcacgatgttccgaaaccgttttaagaagcagttctccttcaaggggaggtttgggaaagatctcttcggtggtagagttttcaagaaggttggatcatcgtcttcttcaggtcaacaggacgatcgtcaacagccgaaagcctgactgaaaaaaaaaatacatgaagtagctagtatgaaatcgcgcgattataatgtgccctgctgctactctagcccctgtttaatcgagtgtgtcaagaagtcgtagtccatgtataatttatgatagaaggtgaaattctgtatgcatgcggccctgcgctagcacttattaggtggtggtgtttttgttttgttggactggagttcgccttgcatgtggcaccataattatgctctcggcatgaatgcttactgttaagtattgacaactatctcttcggctttgctgatggctaaaatctgtgtttattgttgt

SEQ ID NO: 15540 - DNA, 1903 bp, Oryza sativa
  ref <308>: DATABASE ACCESSION NUMBER: AK066059
  ref <309>: DATABASE ENTRY DATE: 2001-12-06
gagcagccaacttacatcgacaccgtccgtgcagggctcagtagcagcacaaaatggcagagcagctcaggcagagggtgatcgtctttacactcgttgttgtcgcgtgtctcgtcctcgcgacgacgacgaaggtggccgacgcgaggatgcttaagcggatggagagagacggggacgcggtggtggagtcgccggcggtcgatttggaggcgatggacgggagcacggagggcgccggcgacggtggcctgcagtggctcaagtccgtcagcctcgacatgctcggcgggatcaaggactccggcccgagccccggcgccgggcactagacgccggcggtggcaggggttttgggatccgtcagcgatggagcatgcgtgcacggctgaattgaggaaaaagcctctggtcctgttttagttcacaccaaacttttctcagactttcaattttccatcacatcacatcatacctaaaaccttcctacacacataaacttttaactttttttctaacctaccatttttttctaaacttcttcccaatttcaggaactaagcacaaactctgtttttcatgcccctttgctctgtactattacatttgttcttttgtgatgtgtatttgggttatactcctactaggttatatgatgacgtagtgaacatgtacatgtatagccatagtatgtctttttttttcacaggaatgaatagataagcacatgtgagatgtactatgtgcaaatagaacatatgcttacaaacagtggcggtaattgttacttctactgttcaacatgatccttttgtctccattctggttgagagagtttctgaccactatagtttatttcaaaatcaatattcagcttcatgaaataaacttcagaaaatgaaatatattacacaagataagaaacccaacttttctaaatactttcgtgctgttttgctgactactcgctaactgcttattagaatttggaggttcttcaaacagggcttagacaaatctgcaaggtctcctgtacatctattgaccattagttttatacttttgtaaccaatcgctttagcgctgctttcaaaataacgttcaaggttttgtttgctcttagtaaaaaccgataggtattagttaccgtttcaatacatcacaggttaaaattttcaaagtagaatgcacaccctaggaatattcactacatcaagtccctcgaacttttattccttttttatttataaatagttgaatgccggtgctttgcatcggaataaaaaagagaaccccaccttacgttctaaagctccgaaaatcataataataatattttcattgtaatcaacatttcacatcattttttcatgtatgtcaagcatacgtaattgctttcaaatatgtatttgtacatctgtttatataacggttcacctactcgctattaaaagatcccactggagtattttaaagaaacatagaaaacgccagcagctttggcacactttttgctcttgcgatgaccatgtatgcaagaaactgatggacagtcaaaggcaatttcttcttggtgaaatctcggtcatactatgcttatgcttatcagccaaaatttaaatttttcagctttatatttgtagttgattttggggttttatcatcgaagtttatttttcagactttgcttttagattattaagaacacatatataaaaattgggagtagctatacaacactcgacagttttttggatgaaaaactttcaaatgtaactattatgtaactatagtgtaattacattgtaattattatgtaactgctatgtaactgcaatataccaagtctgtaactcgatcgggtgtaacttccacaaaagtgcaatggagcaactggttaatg

SEQ ID NO: 15541 - DNA, 3328 bp, Oryza sativa
  ref <308>: DATABASE ACCESSION NUMBER: AK066060
  ref <309>: DATABASE ENTRY DATE: 2001-12-06
ctatattatgagaattttcccctagctaaaaataaattaatggaatctgtagcaatatgctatatgttaatcttgaatttgtgataatgtcaacattcaacctttcgactatgaccctatgtcacactgattcattgtcttatccgttgatttccaaatttgcttgatcgatacatgttagaatgcaattccaatagatatgaaaataacaaaattgataaaatgtttgattatgctatgaaaattatataaaatgaaaagctcaatttttatgtaaatcattgattctgggtacttaatcaactacaaaaggcattgccccaaatcccaaatttcataattttatcagttggtcatttttgcttttgatcctttcacacgatgacagtacctctgaggtattgtttcaccttcaccctgaatttacatgacaaatcctaaatgaaattataaatgcagctctcaatttggtttacctttcaccctgaatttgcaagattcaagtgcaggagctgaaaatttctctttcagggaccaagaagaatacaaacttaacagttaggtataatcataagattatatagtgtgtttcattttgttatcattaaactgatccacatggtgttcaagtgattacacaagtgtatagattgttttaaaagttgggttcgatagatatgtagaattccatgccgccatcgctgaagccgcgcaggcaagcctcaatgtctgcacctaggccttcagcgggtgcagctactgtgtgctgcggatggtacccttccattacagtgaggaggtcttccagatcagctatcacggtggttccttggtgtgcccatgggcagcacaccaactgtttgatgaaatgcatgatcgaggtgcactcctgttactgttttaatccttattattatctcatatttactctatttttcactgtatgttgtgatttgaagctctgcctatgtaaactaaaattgaattgttccttggtctcgaatacctcatatggtgcagacaaatatttcatttttgcagggtagaacaccctattattttagtgtatatatttactatgagatacttcactttttaatgactattggagtcacgtcagtatgttaatagtgatatagatatgctaacctgtccaattttacctgatattcccaacacaatagctttgtttcttgactgagatttatttgtctcctgtttctattgcagttaaaagtttgcagataaattcatatttcgtaatcgatcagcaagcctggacagtgttccaagggacatgtggactcggctgcagtatatctatttgtttgatctttagttgcatataaaatccttttgagatttatttattttaacccagaaaaaaaaggagatttatttattttaagatatgtccctttattgttcaactgcaactgatttggaagtccatacataacaagatgtaacagatgggccattaagaactctctgagtccgttctatcaaatataaagtaaggtgacttgcccttcccagtattaccttattactgttatttgccttcttttatttgataaaaaggtcatgtgaatcatggagtggaatattaaaaagccactgcatatagcattgctttatctggatgagttatcatcaagcatcatcatcatcctgatatttctaatcagcgttgcacatctattttatcaagctcctctgttactttctagctacatgaagtggagttactaatatattgctctatgaagtgaaagtttctttctgctcaaaaaactactcctataatacaatgcctaaatatgccaattttctaccactactgaatctgaagtttaactaatgtgcttcatttccatgttagcctttatatggttagcccaccagtattaagattaacaaattgcttgttatatttgtgagaactgaaaccgcttcttttgaaatgggctctaattgttgaagtctatttttttttcatgttttttcatggtttgagatgaattcttaactgaccaggaaacaaaatattgatatctttggaattacttgctttgatttttaaatacattttgtcttgtaactttatttgttttttgttagtgttgaacgattgcaaacgaatggtgcatcacttgctggtcaagttcctcaggagtataactttgtcatgtttccgaaattgtatcaggattagctatgaattggtctttgctcttgtgattattgtagagttacacttcaagctcgtggatgccgctggtccatattctgtgattaacaacatgattaaaaaaagtaaggttacttcgattatgtactgctgcttgaacttcatttactataggtttacaggtacctgtggattgagagggtcactgggtcatcttttgaagttggtttggatgacctgaagctatcaggtagattgtggtgttcttttcctcaattatgtagaggggagttctttttctggtattggagttcttatgaaagccactgaaagacaatctttacattttgtaacgtattattacatttctcaatacattttgtaaatttcagtatatttcactgaaatacaatccttacatttcgtaacgtgttattacatttctcaatacatttcgtaaattttaagtgtatttacatgttttctatgatgtattataggaatacatctatttcacatgcaggattccaaatgatatattactacgatggattccaaatgtccaacatgctatataatttattgacaataatgattctctattatttctttttgtgtgaatttaaattatcttattatcattgcttcctaaaacatatacaatatagttctttgatttgtatataatttgtatataaaatatcgccacttatattctgtcttgaagggaacaatgatcagattcttcagaagaagactcttcgaggatagcatcattggaacctgctaagcacttttacatccttgacttcaaagactggttccgccgacataccaactcgatttgatttttgctctaatttgctcaatgtggttgagttgtattgttcttctggagttttttttttttcattcgatctgtgttgtgctctttctatctactggtcagaccgaacgcctagtgcaagatgagctgcatcacttgctatggcgggcctgatggttgcatcacctggtgacatgtttatgcctgcaatttaatgtaatagttctctatctttttttttgttatttggacatatgttatcttcaaatatgtattaaagtgattgggtataatggttgatgctcttg

SEQ ID NO: 15542 - DNA, 2297 bp, Oryza sativa
  ref <308>: DATABASE ACCESSION NUMBER: AK066061
  ref <309>: DATABASE ENTRY DATE: 2001-12-06
gtctcgcctccatctcacccgcacgcctctccgcctccgcctcccacctcctccgcgcgctgccccgcatccgcctccgccgcccgctcgcgtcggcgccccgcatgtcctcctcctcctcctccaccaccgcggcctcccccgccgctgccgccgccgacggtggcggtaccggcgagaagcccgtggcggcgccgtacggatcctggaggtcgcccatcaccgccgatgttgtctccggcgccgacaagcggctgggagggatcgccctcgccggtgacgggcgcctcctctggatcgagggccggcccgaggagaaagggcgtatggttatagtcaaggaggatgataagcctgtggatatcatacctcaagaatttgcagcacgtactctagctcaagaatatggaggtggtgcattttcagtcaaagataatgttgttgtgttctcaaactacaaggatcaacgtctgtacaagcaaagtactaaaactggtgtgcctgtgcctcttacacccgattatggtgggcctgatgtcagttatgctgatggagtctttgatcctcacttcagccgttatgttaccgtgatagaagaccgtcgaaagagtagcttgaatcccaccacaacaatcgcagctataagcttgagtaatggggttgttcaggaaccaaaggtgctgattagtggcaatgacttctatgcttttcctcgtattgaccataataacaagcgtatggcatggatagagtggagtcatccaaatatgccctgggataagtcagaactttgggttggctacttctctgaaagcggagacttgaccaaacgggtctgtgttgctggtagcaatccaatgttagtggagtccccaactgagcctaaatggtctccaaaaggcgaattgtttttcctaactgatagagggagtggattttggaacatctataaatgggttgagcacaccaacgaggttatttcagtttacacgctagatgctgagttcacaaggccattgtgggtttttggtatcagctcttatggttttcttggtgaaagcaatcacattgttttcagctacaggcagcatggaaggtcatatcttggtgttctggactctgatataggttctgtttcattgcttgacacccccttcactgatttatccaatgtggttactggaaatgattacttctatattgaaggtgcatctgcaactgttccaatgtcaatcgcaaaggtagctttaaatgaggacagaacaaaagtagttagtttctcaataatttggtcatcctcatcagatgttgtacaatatagttctttcttcagtgcaccagaatttgttgagttttcaacatccagcaccggccagaaagcttatgcatatttctacccaccttcaaacccaaattttcaaggtttgccagacgaaaaacctccattgcttgtcaaaacacatggaggaccaacagcagaaacacgtggaattctggacctgagtgttcagtattggacaagtcgaggatgggcatatcttgatgttaactatgggggaagcactggttttgggagggagtatcgagagaggctattggggaaatggggtatcgtcgatgttgatgattgttgcagctgtgcaagagtcctggtggagagtgggaaagtagatgagcgacgcctttgtattactgggcgatcagcaggtgggtacactacgttagcttcactcgcattcagggacacattcaaggctggagcttctttgtatggtattggtgacttatctttgttgagagcagagacacacaaattcgagtctcactatactgacaatcttgtaggaaatgaaaatgcttactatgagagatcaccgatcaactttgttgacaaatttacatgtccagttattttgtttcaaggcttggatgataaggtagtcccaccagatcaggcacgcaaaatatacaaggccttaaaagagaaaggtttgcctgttgccttggtggaatacgaaggagagcagcatggtttccgcaaggctgagaacatcaagtttactttggagcagcagatggtgttctttgctcgattagtcgggaattttaaggtggcagatgatataactccaatcaagatcgaaaactttgactgatcgctcgaagaaagtgtagcagtagcttacatttcgtggaacatgacctcttacagtttgcatctgtttgaattgtccatgtactccgactaaatgttcattaaaatcaatcaatgttggagtctggggcaatggaatcgc

SEQ ID NO: 15543 - DNA, 947 bp, Oryza sativa
  ref <308>: DATABASE ACCESSION NUMBER: AK066062
  ref <309>: DATABASE ENTRY DATE: 2001-12-06
gtgcgcccccacgcaacccaaaagttcagcgtaaacttgcctatcaacaaaactacagctcaggcggccacgcgaaatcgcgaggtttcacgtaccaaaagcgcaaaaatccactcggattccacgcggcagagccactgcacgtgggcgcccacgacgcgcccccgtatcgatcggcaccgcgctttcctcctcctgatcttacccgctactatatcatcatctgcttgctttccccccgagagtccacggcctcctgctcctctcgatccaagataatttcactccagcgtgcgtcggccatgtcgagcttgatggacaaggcgaaagggttcgtggcggagaagatcgcgcacatcccaaagccggaggcgtcgctggacagcttgtcgttcaaggggatgagccgcgagtgcatcaccgtgcacagcaacgtcaacgtctccaacccctacgaccaccgcctccccatctgcgagctcacctacaccctcaagtgcgccggcaacgttgtggcgtccggcacgatgcccgatccggggtggatcgcggcgagcgacacgacgaagctggagataccggccaagatcccctacgacttcctcatctcgctggtgaaggacgtgggccgggactgggacatcgactaccagctcgacgtcggcctcaccatcgacctccccatcgtcggcaacttcaccatcccgctctccaccagcggcgagatgaagctccccacactcaaggacatgttctaattatcttatctctaatctcatcaaccaactccgatcgatcgaactctctgtatgtgtgatgtgtctcgcgaataatggcagctgctctgcacctgtgttcttcttgccctgcatagtatagcatggctgtatgagcggctgaaaaattacctctattcctaatggttgcaataataagctagagaaccg

SEQ ID NO: 15544 - DNA, 2574 bp, Oryza sativa
  ref <308>: DATABASE ACCESSION NUMBER: AK066063
  ref <309>: DATABASE ENTRY DATE: 2001-12-06
gacgtattcatcgggctgcttctcctctccctgcacgctcctccatattccgctgccgtcgacgatactctcgcagcgggtcaagtgctcgccgtcggtgagaagctcgtctcgaggaacggcaagttcgcgctcggcttcttccagccaagtgcaatagccatcagtaagtcatccaactacactaacgccctcggttggtaccttgccatttggttcaacaagatcccggttttcaccactgtatgggtcgccaatagggagaggccaatcaccgttcctcggctcaattcaacatggctaaaaatgtcaggagatggcaacctctacatcctagaccatgccactaattccatcatctggtccactgatcacgtcgttaatacgacaacggaaaccggcatgaacacgagtgccactctcctgaatagcggaaacctcgtaatacgaaacccgtcaggtgtagtctcgtggcagagcttcgacaacccaactgacgttgttcttcccggtgccaagtttggctggaacaaggccactgggttgaatcgccttgggatatcaaagaagagcctcatcgatccaggccttggatcatacagtgttgaactagacacgactggtgccagagggctgatcctcaagcatcgcaacccttccatggagtactggtcatctgatagagcactgattataccggtacttaagtctttgtttgagatggatccacggaccagaggcttgattaccccggcatacgtcgataatagtgaagaggagtactatatctacactatgtcggatgaatcatcctctgtgtttgtgtcgttagatgttaatgggcagatcaagatgtatgtatggtcacgagcaaaccagtcttggcaaagcatatatgcacagcctgttgatccttgcaccccctctgctacctgtggacctttcaccatctgcaatggtaattccactcaaacatgtgactgtatggagagtttttctgtgaagtcactgtgggattgggagcttgatgatagaacaggagggtgcatcagagataccccattgcattgtgtaagtgacaaaaacatgacaagttcaactgacatgttccaacctataggtcttgttacattgccctatgacccccaaattatgcaagatgctacaactcagggtgaatgtgcacaagcttgtctcagtgattgctcttgcacagcttattcttatcaaaatagtagatgctctgtctggcatgggaaattacttaatgtaaataaaaatgatggcatttacattaatgcggacaatgttctgcaccttcgtcttgctgccacagatttccaagatttgagtaaaaacaaaagaaaaacaaatgttgaacttgttgtgggcgcaagcattgttagttttgtgttagcattgatcatgatactgctaatgattagagggaacaaattcaagtgttgtggtgcaccattccatgacaatgaaggccgtggtggaataatagcctttcgatacactgatttagctcatgctactaaaaacttctcggaaaaattaggagcaggtgggtttggctcagtattcaaaggagtgttaactaacatggctaccatagcagtgaaaaagcttgatggtgcccatcaaggtgagaagcaatttagagctgaggtgagctccattggaattatccaacatatcaacttagtcaaattgatcggctattgttgtgagggtgataagagattgctggtatatgaacacatgttaaatggttctcttgatgttcatctatttcagagccatgcagctgtcctaaattggattaccatgcaccaaatagccataggagttgctagaggattgtcttacttgcatgagagttgtcgtgaatgcatcatacattgtgacattaaaccagaaaacatacttctcgatatatcatattttccaaaacttgcagactttgggatggcaacatttgtaggaagagattttagccgagttctaactacttttagaggaactgtagggtatcttgcaccagagtggattagcggagttgctattactccaaaagttgatgtttacagctttggtatggtgctatttgaaatcatatcgggaaggaggaattctcctgaagtacacactagtggtaattatgatgctacttatttccctgtgcgagcgattaataagctgcatgagggagacatgagtagtttagtggacccaagattacatggtgactacaatttggatgaggttgtcagggtctgcaaagttgcttgttggtgtatccaagatgatgagttcgatcggcccacaatgcgtgaagtggtccgggttcttgagggtctacaagagcttgatatgcccccaatgccaaggctacttgcgactttaacaaacttctctgctgtggcttcaatgtaattgtgttttcttctactttctgcaaattataattctacatggaaaacattgataaagaaaacatggttatacttgctaaattatatctttttatttaattgatggctgcttatggtaagcaagtattgtatc

SEQ ID NO: 15545 - DNA, 1771 bp, Oryza sativa
  ref <308>: DATABASE ACCESSION NUMBER: AK066064
  ref <309>: DATABASE ENTRY DATE: 2001-12-06
gtccgtcgtcttccttgttcctggtaggattcttgctatagttcttgcggcggatttggttgctggagcccttcgtggaggagctctgggagcagaggggggagggggaggggcgagcgctggcttcgctcgccgccgcgctcggagcggcactcgtgctgctccggctcagccgcgaggggagccgaacatgagattgtaccagcaattcctagaattggtgaagacgagccgcctccttcctgggactttgttttgactccgaaagctatggttggaagaggttcaccaaaactcagtatgattccaaagggatctcctaagtttggtaggatgctatctgcagcaagtactaggatgaagacagtctctcctcaaagcatacttgctaagaagactgcaagctctccaaaaggcaaccaagtcaagcagagagcaatttggaacgcggagttggagaagtcacttgttgaaatccttttcgagtacaaagtcaatggttgtagaggagataatggctggaccactaaaggttggaatagaatggtgaaggaattccacgcagggaacaaatgcgtatcattcaccaaaaatcaagttcaagaggagggtcaactgaaaagagattacaagatgttgaaagcggtcagacaacaaagcgggtcttcttggaacgagaagagatgcatggtcgagggatcgccagctatgtggcaaaacttgcaaattataagtggatttgtgatcaatatcttcctttgcatgtgatttgtgatttctttgatgccttacaatgatttgtggttatgcttttgcatgtgtagacattcccaaagatcaaaaagtttcgcaacaacaaggccagctttcccttgtatgatgcacttggtgagctatatgacggccatcttgctgagggaaaacacaactgcacctcctttgattcaatggaagatgagaaacccctgaggctagtacaggaattggaagatgatagtcaagagcaagatgatgttgtgctgctcgaagaccaaagaaactcaagagaggaagaaactgatgttgtgctgcttggagaccaaagaaacccgagagacaaagaaactcaagctgaggattcaagaattgttactgaagagcaaagaagacaggctttaatagcaaagaggagacaaaaaaagaagataacaagactagtaagaattcaagagtggagagcatgatggagcgataccttgagatgaggagtaaacaagccgaggaagaagttgcagctagagagaaggtatgttcacaagcaacagattattttgtcaagtgtgtatttattgagctcaatggatgttaccaaacaagagaaggcaaaggattatgcagttcttaagaccccagcaaatagagaagtctttatgtgtgcttgcgaagatgacttagagtctgctttaatttagctgagaagtgaaatggcctagcatcaccaaagttgacacatttgatgaaggaaaacaatggaagtacatggtccaaggtcgccagggtgacagaatggatccaaggtcaatactcaaagctactagactgccataggagaaggacatggtctgagtacaagaggatttatttgctgctctgacaatatagaatatttatgttttcaaactggttacaaaattatgctttggacttatgcactttgggtgtaattgtaatttattttttggatctagtgaccattttcatgtttaaacatgatattagcactttgggtctg

SEQ ID NO: 15546 - DNA, 2735 bp, Oryza sativa
  ref <308>: DATABASE ACCESSION NUMBER: AK066065
  ref <309>: DATABASE ENTRY DATE: 2001-12-06
ggccttgagaaagatggtgcttcaagccttcgactcatcatggattagttgagttgaccaccaccaccaccaccacaccacgacagacgggccaatccacccaaccgtctccacttccctccccaccgcgccaaattcccaccccctcctccgccgccgccgccgccgcacgtgcgcctccacctcctctccattgccgccgccgcggcacggtcaaccacccccacccttcggcggagtcgcggaggaatgcggggggggcaatagaaaattcgctcgctagcagttggcatggcggattagtttaatcttgaagtccttggtggtggtggtgaggaggagggggaggaggaggggattgggctggctaatggccgggtcctcctcctcgtttggctcgcagagcagaccgcgacccgggtttgaggggggagcagctccgcgccgcgctcgcggttgctggctgaggccgccgccgccttctcgggttgggggagtggttggggagccgttgggttcttcgctgctggggttttagggatcctaggctggcttgcttgcttgctcttggaggaggaggaagatcgtgggggtggagggtttcttgcgggggttggccggattttgattcgtcgcccgagcgggcttgatactggaaaaaggagaagcttccattttttttttctctgacttgaaaggggatggccttcccagatgatgatgaaaagatgaagggttgccggccaaaactttttggaacaaaagataagaaagttgtgaagagggcagattaccaaagctgttctgcagttaagtccgggccaagttcctcaaagtcacaatcttcttcccccttcagaacacttacagaagttaggagcatacgcctcagccatttacttggtcactcttcaagtactactaaaactgaacctttcaggatatttgtatctacatggaatgtcggaggaaacacgcctactgctgaattaaacctggatgacttccttcctgctgatgacaattcagatatttatgttttaggttttcaggaaattatccctctcaatgctggtaatgtgcttgtcgtagaagacaatgaaccagctgcaaggtggcttgctcttataaaccgaacgctaaacaaaccagttgacagtaatgctgatatcttccagcacaagccatcttcttcccttgattcaacctcgtctctgtcttcatcaaaccttgatgcctcattctccagccgcacaagaacagctagtggtagttctgcaatcttccagaagtcctccttgaagtctatcaggaagccttacatgccaacccagagaaaactgctcaaactctgcaattgctcagttgagatgactaggaagtcctacaaagatgcttgctttggatgtccacaagcatatgctaatgagacggactcttcagaagatgatacagatgatagatcgaatgatccttgtggttatatagttgatggaatgaattctgctgcctctgcctccagggatcagctaaaatacaacctcgtatcgtgcaaacgaatggttgggatttttatcacggtgtgggcaaagaaagaacttgtgcatcatataggccatgtgagaacgtcttgtataggtcgtggaataatgggctatctgggaaacaagggatgtatatcagtgagcatgacggtgcaccagacaagtttctgcttcatctgtagccatttggcttcaggtgagaaagagggtgatgagctgaggcggaatttagatgttttagagatactgagactcacgcaatttcaaaggatttgtagagctgggcgaagaattcctgagaaaattcttgaccacgatcgagtgatatggctgggagatctaaactaccgtatttccttgagctatgaagataccaagaaacttcttactgaaaataactgggatgccctttttgaaaaggaccagcttaacatcgagcgcaagtctggaagggtgttcaagggttggagtgaggagaagatatattttgctcccacatacaagtattctagtaactcagattcttatgctggagagactgcaacatcaaagaaaaagaggagaacccccgcctggtgtgacagaatactatggcatggagatggcattgtgcagttgtcctacttccgtggggagtccaaattttcggatcaccgtcctgtctgtggaacatttattgttgatgttgaaatacaagagagcagatcaaagaggcgatcatctaataccaacatcagaataggtgctgaagaactcttaccaactagtaagagtaaggctaataaaaataagggcaataaaggttctgggacctaaaccctattggaaattaaattggtagcaacagcaacttgtactaagatactgaagaatatttccatcggcacctgtaggtatttattccaaagcagattatttttttgtgacaggggaaaggtgattaccaagtcgtacagaaaatgtagtgcatatatactttccaaagggaaaggtgattatattatactcgaacaattttccacattctttttgttcttttgggtagaacaagtgtgcctatgcatagctatccagaatccattgacccccttgtattattgtgtctgtctgatcagtttgaacttttctgtaacaaaattgtactgagaacgaggcattattccaaaatgtacattatgttatctatctatc

SEQ ID NO: 15547 - DNA, 1444 bp, Oryza sativa
  ref <308>: DATABASE ACCESSION NUMBER: AK066066
  ref <309>: DATABASE ENTRY DATE: 2001-12-06
gacctggacacttctcccccatcccctctccgccgcccggatgaatcgcctccgcctcctcctctccgatccgtcgtcgcgctagactatatatctcgccgtcgtctctgatctctccctccaccggggaggcaaggcgagatcgtcgcgggttcgttctgttcttctgggttttctctgcttacggtttcttgctctgaatcgcggttatttatttattttttgaaaaagaaaagaagaaagtatttgctggtttcttgatttgtttgtgggttgttcacttgttcccctctgatttgcttgtgtagtaatccagggccttgtgatttcttcgttcgggggggtgtccaatttggagagatttggattccagggttaattgtttttttcaatttttgtttggttttgtcctgcttcttgggagattttgtcatgggggatgtgtcgttgaacccgccgatcaacgccgagccgctgaccaagggagatcaattcctggacttgatgtcagatggatggacaaatgagaggcacagcttgtacataagctccatggaggcatccttcatggaacaactctataggcatgaccaccatgggcttgacaggaataggagtcatgcgggtggcgcaattgggttcagggtgcaccgggagggtgtgtgcgacaacctaaggtctgagaggaatgatgctcacgctcatgatggaggcatgagctgcttccctgagaatccatggataaggcgtttcagaccacgcgatgccggtgtgaaccgcaagaatgatgcggtggggttttctgtggatgacgatgagtcgggtactgacatggtccgacagagggttcgggtgcatggaagagaagcgaagagttgtgctggaggaattcttgctgataaaagcacagtatctgatcagaattttcctgacgaagatgtcgaagtcgattcagagccatgcaagaggaggaggcggcctacaaattccactgctacacctcatgaccagacaacataacaggatcaatcaccttcatttgttgttgttccatccggaaaatcacccgcagcgacaaaaagccagcgaagaccaggagtttcgtcgagactgaaaggaagattggagaacatgggttgggttggaatcttgctcaacttgttgtggtgatgggcacttgtgctgctgctagtcctcagttgactaactgaaatgtatcgttcgttcttgtggtgtgtatgagagggctgcatttgtttcctagttcatatttaaatcgattctctggtagaacatcaggctcaaagactgtccacgattgaattgaattgaactgtgatgccttgtgttgtatttcagcggctgttgtgatctgcaagtggattcagtagtatccatgctttgtcattacacaacagaagtaataagagcttactgttttgtg

SEQ ID NO: 15548 - DNA, 2139 bp, Oryza sativa
  ref <308>: DATABASE ACCESSION NUMBER: AK066067
  ref <309>: DATABASE ENTRY DATE: 2001-12-06
gagttgcagacgaagaacaccggcaatggcgttaactgcttctcttcgctgctaccctctactgggctcagcagcagcagcatcatcgtcagtctcacttccggcctccacaagagcgccggtgcttcacaggacaacaggaggaccgaggagaaggctgcaacgatgcctgtgctcgcagcagtacgccgagaagcagtcatccggctcgcagcagcagcagcagaatcagcagctggagcgactcttctccaatctcaaccaggcaaccatgaagcacgaacctgggagtgtcaccagttcgatcttccttgtggccggcactacggtaggggcgggtatccttgcaatccctgcagtgacacaagaagctggattcttggcctcagcagttacatgcatcttctgctggatttatatggtaatagatcgtcactgactgggtagattatcaaaaccgacttgttagaggtgacatgcactcagagaagcctctcaaaggttgtaacagggttgttagttgctgaagtaaacgtcaatactatgtgtgaactaggatctggaggtgtctccctggtctcaatggctatgcgcactctagggacatttggagtaagaacagcttgcatctcatatttgtttatacattatgcacttctggttgcatatgtggcacgctcttcagagatcataacaaactcagtgggcattccattatgggagagtgctgccctgttttcactggcttttggggggctatgctactttggaagccagcgagtcattggtgcggttaatggttttttggtgttcagcatcctagcatccttcacaactcttgtggtggtggcaagtggaaacctgcagtggagttctcttcttgaagcaaattttgctgctgccccacaaagtataccgataattgctctttcatttgtataccagaatgtagttcctgttctgtgtacaaatttggagggagacctatcaaaagtaaggaaggcaattgtagtaggtaccgccataccccttgctctgtttctcatatgggatgctgtaatcctggggacacttccaggccttgcaggggatggaaccattattgatccactagaacagcttcgatcaagtaatggaacagtggggcctattgttgaggcattctcatttcttgcaattggcacatcatacattggatttgttctaggactctcagacttcatagcagacttgcttaaactaccaggtggacagaacaaacctctgccgtaccttctgactttgctcccaccgcttgttctgtcattgcttgatccagagatatttttcaaggcattggactttgcaggaacttatggaggcaaggatccttttaaactatctcttattatgaatagatgtagagaagaaacatgtatagtcctatgctattttaaaatttattttactagaagacttgtcaagttgtcatgcaatgaaaccaaccaatcatgacatttcagtcacccttttttttccattttgatacctaagaacttagcagctcgtttatttattccaatttgatatctaagaacttagcacctcatttacgtgttttttcacctaatcctaaaaaggaaataaaacagttttacagtttattggtggtgggtaaatgaaaaaacgtgagtgcttatctaggttcgtagcctgacccaatctgggttgaaagggaactcctagattagatttgccacttcagtacattaaattgatatcttatcaggagagaggaaaaaaaggaagaatgaactgatatcttgaatgtgctcttttcagttctagtactttttggagtttttccagcagctatgtcttggtcagagaggtactcagatgatctggaagctccagtaccaccaatagtcccgggaggaaaatttaccctctcatttgtcatggggggtgccttgctcgtaattttttcagagattttcaaggacataatgcagttgcaaggactacactgacacttagatctccaatatagatgcttcaacagattttcttttaaatgcaataccgctgatagcctcgtaatattgtacatagaattgactgagccagcttttcttaatttaattctttcacagttcc

SEQ ID NO: 15549 - DNA, 2706 bp, Oryza sativa
  ref <308>: DATABASE ACCESSION NUMBER: AK066068
  ref <309>: DATABASE ENTRY DATE: 2001-12-06
gacccctccctcagcttcccttcccatctgcccgtcttcttcttcttcctcctcctcctgccctacccgcggccgcgcgatataaatacatcaccctccccatccgcctctccgccagcaaaccagcacagccgtacgccgccggcaactgcgttcgcgcgagcgcctgtccgcgttgtacatatttgtgagtaatccgtcacctctgtacgcagcacgcacatgccgccgccaaagcgcagatgattccagtctttccctacttttgaatctgtgcctgatgaatctgcgtcgtcgtgctgtagcactagcgagtgtttcccttgcgacgtagagtttgctgatgttcatctaattagcccggaggactcgggaatcagaattcaccgtggtgtcagggagaaaaagtggatcgaacttcggatcacctggtaccatttgtttacgatacaggtattgaacgacaagatggttaattttggaaagaagttgatggctgatcaagtagaagaatggaaaggatactatattaactacaaattgatgaagaaaatgttgaagcaatacgttcagcagacccaacttggtggaaaagatcgagagcaagtacttaaagagttctcaagaattcttgatgaacagattgaaaggattgtactttttctgctacaacaacaaggccaccttgctaataggattgaggaattgggagaacagcgtgctgctcttctagaacagcatgatatatcccaagtttttcaactacgagaggcttatagagaagttgggcgagatcttataaagcttctccgttttgttgatatgaatgctactggtataaggaagattctaaagaaattcgataagcgctttggctataggtttacagactattatgtcaccactcgtgcaaaccatccttattctcagcttcaacaagtctttaagcaagtggggattgtagctgttgtaggagctttatcgcgcaaccttgcatatctgcaagatcatgaaggaagtgttttgtccatctatgatcatccatcagttaccttaaaggaccctatcatagaccaagtaaatcatgcggtacaaaaacttacacatgcgacgagttttctgcaattcttaggtcaacatgcacttatcatccaagaggacgtgcaaagtgggtcggaggatcttgtcgatgatcaaagttaccatttcatgtctttgatactcaacctagtgaacacctttctttacatggtgaacacatatatcattgtgccaactgctgatgactacgctgtaagccttggagctgcagcgacagtttgtggcgtaatcatcggatcaatggcagttgctcaagtgttctcctcagtttatttcagtgcatggtcaaataggtcatacttcagacctcttgtattcagtagcatcatgttattcgctgggaatctgctatatgcattagcatatgacctgaattctctgacagttctcctgattggccggctactatgcgggttaggctctgcaagagctgtgaaccgtcgatatatcagcgattgtgtgcctctcaaaatcaggctacaggcctctgcaggattcgtcagtgctagtgctcttggcatggcatgtggccctgctcttgctggtttactccagacaagatttaagatatactcactcacttttgatcagagcacgttgcctgggtgggtcatgtgcattgcttggcttgtttacttgctgtggctgtggatatcattcaaagagccgggacactttgctaagagttcagacacggcacagcctgctgaatctggccatcaagtcaatgctaatctggaggaaggtctagcgcaaccattgcttacaggctcagaagagggacaagaccaaaatgctgaggataatgacgataacgaagaggagtctaaaaattctcacgggccagcaacttcaatcagttcagcatacaaattgttgacaccatctgtgaaggtccagctattgatatactttatgctcaagtacgctatggaaatcttgctctctgaatcaagtgtcatcaccacatactattttaactggtctacaagcgctgtggctatctttttagcgattcttgggtgtactgttctccctgtcaacgccattgttggaagctacattacaaatttattcgaggacaggcaaattttggtggcatctgaaatcatggtcctcattggtataatcatgagcttccgttacacccctcactactccgttccgcagtacgtcttgtccgctctcatcacatttgtgtttgctgaggtcctcgaaggagtgaacctgtcgttgctttcacgagtaatgtcgtcgaggctcgcgcgaggaacctacaacggcggcctcctgtcgacagaggccgggacgctggcccgtgtagttgcagacgcgacgattaccgcggcgggttatctaggcccggacctcctgctcaacatcactctgctgccacctcttgtcatctgcatagcctccctcgttgcaacattctgcacatacaacaccctgtactaaggaagttgcctctctctgcacactgtagagccggttaaactttattcatgctcacattgggttgtattttacatgtatctgcatgcggtagcattctttgtttgtacaagtccttaaacagttcaataaaatgttcttctgtaaatc

SEQ ID NO: 15550 - DNA, 2646 bp, Oryza sativa
  ref <308>: DATABASE ACCESSION NUMBER: AK066069
  ref <309>: DATABASE ENTRY DATE: 2001-12-06
ggtcgtctccatttccgcctcgcgaggaagaagagagagagagagggcaaaggtcgtcgccgccgccgccgccgccttcgccgccgtttggtctcgtcgccttccggaccacccgcactagcccttctccctcctcgcgcgcgcacgcgccacacggccgacgacgacgagcaggtttggagggccgacgccgacgcggccggcctccttacgggtcccgtcgtctctgcggcggctgcgccgatatccatctcacgagcagagcaggagtagggagcaggagcaggggaggggggcgccgtcgtcgggcttagtcccgaactttagcacaagttgtactagagaagatatacatctccttgtgctgtactctgttttggtatggaggaagattctggtagatcaatatcaacaactggttttcttagaagaggctctagtgtctccttaaaagatcaaggcaatgaggagaggccaaacaagacaaaactcaacccaatgaatgccaggtgggctgacagtaaggagaagccaagatatttacgtgagccatttcgttcatcaggcactaaggctgcatgtccaagctcttcaaaagctcccgtcagaaaatatttcgaggaaaaacaaggacggacatttttaggagaggcagataatgcagaaagtagtagcagaagaactgaggccaaccgtctgcagtgtagcaagaaagctgttgttgaggaggatgtgcatccatatggtcagcaggatgagccagaagatttgttgtccacatcaactactgaagatcagcctgcagaacttgatcctgaactattagattcttctgtttcttcaggggtgtctgcacatgcaattggttctgtagtcagaaatgctgctttgagatctaaatcacgtcagcagaagggtaaagaagaattgtgtcagattagacctcaaactgcttctgcttttgttaatcggtccactatacctcgaaattctaccaatggtgtgaaatcatcaaatgctgctggccctggggtacagagacgtactctaaaaaaccttggctgcacatcaatatctgatgttttgccttctggctgttcttcagctaattctattcataataagagggctgaggttatgagaaacagggcatttgacggagagagttcttctagaccaaggggcttaaatggacactctagtttaggccattcacctgccatgtattctggtatcactggtcctagagtcagaactgctgaacaatcagcttctcagcaaacacggactagtagcagaagtattcaggagtctgcagattcttcaaggattaggcgaccttctactcagcatgccagagtaagggtgccaaatgaaagggaggatagcgtgtttgctcttcgtgaaactcttgcaagggatcgccaaccagaatgggctcatttctccttgggtgaagctgccccacggagatcgatgaggcctttttctatggaattaccacatgagatatactcatctagtcgtcaaggctcaagtaatcagacagcaaggagcagatcaagttaccgccctgacgaaagccctccacaaatgtttcatggtttgctggtggagagagagaactacaggcgtataaacatggaaggcatcgctgaggtgttgctagcattggacaggattgaacaagatgatgaattgacttatgagcaattgctggtgctagaaactaacttgtttcttagcggccttggcctgcatgaccagcacagagatatgagaatggatattgacaacatgtcttatgaggaactattagcactagaggagcgaatcggttctgtcagcactgccctatctgatgagcagcttgtgaagtgtctcaagcgaaatgtgtataagttaccaaattcagatcttgaagcgaacagagctgtactagatgacgccaagtgcagcatatgtcaggaggaatacattgagggcgaagaagttggtaggatgcagtgtgagcatcaataccatgtgtcctgcattcatgaatggcttagacagaagaactggtgtccaatatgcaaaacttcagcaataccttcagagatggacaaggggggcacatgaatataggttgttcaagctcgtaaatattataaatttataatgaaacagtgttagacatgctagacactgactcaattcactcaaatttgtgaatatgatggattgctttcttcttggaaactcctgtacatttttgtttcggtatccggtccaaattacacatcacctgccatcagataatgagaccagaggacccttgggaaaaattcctgcttgattggacttatggttacaataattaaaattctgctcgattggagtgttagtaaaaattcattcactttggccccaaccacatattagatttgcaattactgatttggtgtccagtgtttcaggtgctttgtagcctggtttgagtttggagtgttcgtaaggtgttatctgttgggttggtactcggatgtgtactcttccttgggtatcaatgtaataaggcaaagcttttgcctttgtctcaaaaaaaggatttgcaatttccttgatcttaatgaaatttggtcagcaccctttcgccgacccggc

SEQ ID NO: 15551 - DNA, 1144 bp, Oryza sativa
  ref <308>: DATABASE ACCESSION NUMBER: AK066070
  ref <309>: DATABASE ENTRY DATE: 2001-12-06
ggctcgctcccgatcacaccgtccgccaccggaagagagagcccccctacgacgacgacgaccatggcgctcgcctccacctccgccaccgcgtccgcggccgtgctcaagacgcccttcctcggggggaagcgcgcgctcgccaatgccgtcggcgtcgcgggcgccaagcccgcgccgcgccgcgcgctcgtcgtgtcggccaagaagtcgtggatcccggccttcaagagcgacgccgagttcatcaacccgccgtggctcgatggctcgctccccggtgacttcggcttcgacccgctggggctgggcaaggacccggcgttcctcaagtggtacagggaggcggagctgatccacgggcggtgggcgatggcggcggtgctggggatcttcgtcgggcaggcgtggagcggcgtgccgtggttcgaggccggcgcgcagccggaggccatcgcgcccttctccttcggctccctcctcgggacgcagctgctgctcatgggctgggtagagtccaagcggtgggtcgacttcttcaacccggactcgcaggcggtggagtgggccacgccgtggtcgcgcaccgccgagaacttctccaacgccaccggcgagcagggctaccccggcggcaagttcttcgacccgctcggcctcggcggcgagaccagggacggcgtctacatcccggacaccgacaagctcgaccggctcaagctcgccgagatcaagcacgcccgcctcgccatgctcgccatgctcatcttctacttcgaggccggccagggcaagacgccgctcggcgccctcggcctatgagcaatcaaccccgctctcgctcgccatggatctgacacacagagttgggtttcgcttgcatgcgcgcttcgtgtttgatcgctagctgttgcatcgatcgggcgcgtgcatgggctcggatcgaacgattggaggtcggaggagcagtagcaaaatgtatcttgttgtgttcgtggccgcttttgggttgggtggtgtgcgtgaaccaaatgggggaattaatcaaggagttatttttttttatttttcttcccagtgtatgtaccatatgtaatatatataattaaggctgcaggatgagcaaggatatttcattgatccc

SEQ ID NO: 15552 - DNA, 1069 bp, Oryza sativa
  ref <308>: DATABASE ACCESSION NUMBER: AK066071
  ref <309>: DATABASE ENTRY DATE: 2001-12-06
gattatctctctcccacggctcccactcccacccatccatggccgcctcggctctgctccgcctcctctctccctcgtccccagcatccctccacgcgcgcgcgacgcgccgccgccatccccgcgccgtagtacgctgctcgtcgccgtcgccggcgtccctcgacctccccctcctcccgttccagcccgcagaggtgttgattccatcggagtgcaagactttacacttgtatgaggctaggtatctggcgttgctagaagaggccttgtataggacaaacaattcttttgtgcatttggtgctcgacccagttgtatcaggttcacctaaagcttcctttgctgtaagacatggttgtttggtccagatagaaagttataggttgaaaggcttgatattggagcactagtatcaattagaggagtttgccgtgtaaacattatcaaccttttgcagatggaaccctacttgcgtggtgatgtttctcccattatggacatatcttccgagagtattgaattgggattaagaatttccaagctaagagagtctatgtgtaatttacacagtctacagatgaaactgaaggtacctgaggatgaaccattgcaaactaacatcaaggcctccctgttgtggtctgaaaaagaaatttttgaggagtataatgaaggttttatccctgcgctacccgaacgtctctcctttgctgcgtaccagactgtttcaggtatgtcagaagcagaacttctttccctgcaaaaatataagatacaagcaatggattcaacaaacactcttgaaagactaaacagtgggattgagtatgtagaacataatattggtatgatcgctgcaagactggcaattcagaatatatgatcctcactatgctgtcactcatgtaacattatcatcagggaagtgatatttacttatttgatataactgatcgtgcctatgatgtgaggtgtagttgaagcatttgcagagccagaattttaaggatgggtattgagtgtacagaactatgtgtaatgaaaaaaaaatcaatttgcccttggc

SEQ ID NO: 15553 - DNA, 2289 bp, Oryza sativa
  ref <308>: DATABASE ACCESSION NUMBER: AK066072
  ref <309>: DATABASE ENTRY DATE: 2001-12-06
gagtgctcgtctttccgtctcctccatctctctatctctctctctctctctctctctctctcttgcaaagaagcaaaggcagctcgcccttcttgcgcattccggtgcacgccactccactccacacacacacacacacacacacacgggcaagaactgccctttcttttgcagctctgacgacgggtttgggggtggttcttgatgggattcttggccaatggggatgggctgaaggcgctgcagagataaaagcaaaccaggataagtttgtaaattcagctggcaaatccgtgcaagattctgaatttgtgagagcatctctgatacaattcttgatcttagatagactgaaggatagatatgtcgtccgacagcaactccatcagttcagcactgtcacagacaacacccgtgcttcgcttgagagtttgggtcctgattgccatcggcattgggatactgatggcaattttgttcatcatagcattgtggctctctatgcggaggaaaaagaagacggcggttggattcgacgggagatcacatatggagatccctattgtgtcgaaagatatcaatgttgacagagttgatgcacagagcctgcatgacagtggaacacctatcatgccagtgcaggataagtatgaacagatgaagggtgtttcgcacttggcagagagtagatctgtcgatgtcgacgcgttcagccaatgcagctcagtgtacaacatagagaaggctgggagctcatattctgaagattacagcagctctgggcctggtaggaaaggcagttcatcgtatgggtatgtgtccgcttcaccgctggttgggttgcctgagctatcacatttgggatggggtcactggtttaccttgagggacctcgagtacgcaacgaaccggtttgcaaagagtaatgtccttggagagggtggctatggaattgtctacaagggtcgactgatgaatgggactgaagttgccgtgaagaagatccttaacaatgtggggcaagcagagaaggaatttagagtcgaagttgaagccatcggtcacgttcggcataagaatctggtacgacttctggggtactgtgtggaagggatacacaggatgcttgcctatgaatatgtcaacaatggaaacctagaacaatggcttcatggggccatgagtgggggcatccttacttgggaaaaccgtatgaagattctccttggcactgcaaaagcgcttgcatatcttcatgaagctatagaccccaaagttgtacaccgagatattaagtcaagtaatatactaattgatgatgaatttaacagcaaggtttctgattttgggttggccaaactactgaattctgatagtagctacatcaatacaagagtgatgggaacatatgggtacgttgcacctgaatatgcgaatagcgggatgctaaatgaaaagagtgatatttacagttttggcgttgtgctcttggaatctgtgactgctagagacccagttgattacagtaaacctgcagatgagacaaatctggtagaatggcttaaaatgatgatcagcagcaagagggcggaggaagtagtggatccaaaccttgagattaagcccccaaaacgtgcccttaagcgggcaatcttggttggcctgaagtgtgttgatccagatgctgacaaaaggccaaaaatgagtcatgttgtccaaatgcttgaagcagttcagaatgcatatcgacaagatcagaaaaggcccagcagccagatgggaagcgtcgatgtcgagtcacagcaatctgcggaggagatctcaaacagtgccgattcctgaggctccaatgctgaacagatacagaaaataggacatggaaacatttcattatcctgtctggtttggtcaaatattcaatatagttcaataccgtgattgcaacaggtttacatttagcaaagactggaagacataaaggcataggaatcgttcgtttccctttcttttcttcttcttcttcttttcgagaagtgcttctatgctcccctaaaatatccgccgtactatgttttctgtagatgagtcctccaactcgtttactctacgatatgtgtagttttgttttaggggagcacagaagcaccttcttcatctataccgtttaagttatcaggaggagctgacctcgaaggcatgaatgactagtaaccagattttgttacccttgtaaagaacccttgtcgatcctcagttttaccatgaagtacaaagttttgttggtgtacc

SEQ ID NO: 15554 - DNA, 2763 bp, Oryza sativa
  ref <308>: DATABASE ACCESSION NUMBER: AK066073
  ref <309>: DATABASE ENTRY DATE: 2001-12-06
ggatttggcatcctctgaggaatgaattgtaaaaacaaaaaagggaaaaaaaggagggagaagaaaacaaagtcaacctctcgtcggttacattacaatttacaggagcaagcagcttaattagcaaaggctgcgtagcgtaatccgatcaccgatgtatccatccagcaatccatccaagatcgatcaacccctcgtcgtgatctcgtcgtcgtactattatttatagtccaccgctagccatcgcactctgcagcagcagcagcagccgcgcccccacacctcgcctcctcctcggcttggatctcgccgcatcatctgccgccgacgacgacgaagaggaagacgaccgccatggggacggcgagcggggaccagccggcaggggcgtcgtcggacaagctgcggcacgtggagtccatgtcggagctgccctccggcgccggcaggatctccgggatcaacgccgtcgtcctcggcgagtcactcgccgccgaggagcacgacctcgtctacccctccgccgagttctccgccgacgccctcgtcccctcccccaagaagtaccaaaagatgtatgagaggtcaatcaacgacccggccgggttctggtcggagatcgccgacgccttctactggaaggagaagtggaaccccagtgaggtctgctccgagaacctcgacgtcaccaaggggcctgtccagatcagttggttcaaaggtggcaaaacaaacatatgttacaatgctgttgatcgcaacgtcgaggctgggaacggagacaagatcgcgatgtattgggagggcaatgagcctggtcaggatgggaagctcacctattcagagctcttggacagggtttgccagcttgccaattacttgaagagtgttggtgtcggcaagggtgatgctgtgatcatctacttaccaatgttgctggagcttcccattgccatgcttgcttgtgcccgcattggtgctgttcactcggttgtatttgctggcttttctgcggattccctggcccaaaggatcgttgattgcaagcctaagcttgtgatcacttgcaatgcagtcaaaagaggggtgaagcccatccttctgaaagatatagtggatgctggtctggctgaaagtgagaaacaaggagtcgctgtaggtctatgtttgacatatgaaaatcagtcagcaatgaagagagaagacacaaaatggcaagcaggaagggatgtttggtggcaggatgttgtgaccagtttcccaaccaagtgcgatgtagaatgggtggatgcagaggacccattgttccttctgtacacaagtggcagtacaggaaagccaaagggtgtgttgcatactactgggggctacatggtttacagtgcaacaacatttaagtatgcatttgattacaagccgtcggacatatactggtgcactgcagactgtggctggattactggacacagctatgtgacgtatggtccactcctgaatggagcaacagttctcgtttttgaagggactccaaattaccctgattctggtcggtgctgggacattgtggacaagtacaaggtgacaatattttacactgcaccaacactcgttcgatcactcatgcgtgatggcaccgagtatgttacacgtcactctcgaaaatctcttcgagtcttgggaagtgttggtgagccaattaatcctagcgcatggagatggttctacaatattgtcggggactctcgatgccctatctccgacacctggtggcagactgaaactggtggcttcatgatcactcctttacctggcgcctggcctcaaaaaccaggttctgcaacctttcctttctttggtgttcagcctgtcattgttgatgagaaagggaaggagattgaaggagaatgcagtggatatctttgcataaagaaatcatggcctggggctttccggactctctatggagatcatgatagatatgagaccacttacttcaagccatttgctggctactattttactggggatggttgcagcagggacaaagacggttaccactggctgactggaagagtagatgatgtcatcaatgtcagtggacaccggattggtacagcagaggttgagtctgcgttggtttcacacccaaagtgtgcagaggctgctgttgttgctgttgagcatgaagtgaaaggtcaaggaatatatgcttttgtaactttggtggatggtgttccttatagtgaagaactacggaaaagcctcatattgacagtccgcaaccagattggggcatttgcagctcctgacaagatccactgggcaccaggacttcctaaaacgagaagcggtaagataatgcgcaggattctgcgcaaaattgcctcaaaacagctggatgaacttggtgacacaagcacccttgctgatcctggcgtcgttgaccagctgattgcgctcaaagattgctagattgtaaaaattagatgacagatgcacttccactgatgcttgtgcgttccatttctcttcctatatgatggagatgcactttctcttcctacattttagtgtccatagtctttcgtttattcggtggaagttgctcctggtctagggaactgaaacacgatatggaatgatctgagagtgcggtgttggacttctgtatacttgtgttacacattgagatgacttgctccatgaatgtatttgatggacgcaataaatccatttcaataaaatattttgtatgattttccc

SEQ ID NO: 15555 - DNA, 3509 bp, Oryza sativa
  ref <308>: DATABASE ACCESSION NUMBER: AK066074
  ref <309>: DATABASE ENTRY DATE: 2001-12-06
gcctgccgcctcgcctttcgcccccctccatctcgccaacgccaccgcctccgcctccgccaccccctccgcccgccgcccgccgcccctcctcccctgcgccgccgcatccgcaccgcccaaccccgccggccaccgaggacgcggaaaccgcacctcactcccggtctcccacgcctccctctcctcttttagtcagaacgcggacgccctcctctctcgcagccgtcgttggagcgagcaccgccactccaatcgccggcaatccccttcgccgtgcgcacccgtcgttggagcgagagccgtcgtcggttcctcctccaccgtcgccgccaccggatcaccgacgccgaccgcccgcatcgtagcctccgtgccaatccccccatctcgcgagcagagcaggggaggggaggggaggggtgccgacgtgccgtggtcctgctgcatcccggaccgtcgcccacggcgctggcgacgattcaccgccgacgtcatcgtccaacaccgtgacttggcccttcgtcctccatgtccaccgcgccctcgccgccattcataagaacaacattgcagcacccaatctgtggcaccccatcgacacatacgacagcgtcgccctggctcatcgtggctaaccccaccgacgagtgatgcaatggctgtttctttgaggatttattatgcataatggtattctactgcagctatgcttttgaacttgcctaaggcggtaaaaccaattggagaatggttcctttcaagtgcaagggcagcatgcattggtgtagatgtttatcctagtcactttgcatccctattgaaggaatgcaagtctgcaaatacagttcatcaaattcaccaacagataattgcttctggtcttctttctttgcccacaccattattgtcagtctcactaccagcattgccatccgaaccatttatatctccaagatctctgggtactggtgtcgtagcttcttatcttgcttgtggtgctaccgactatgctctcttggtgttggaacgtgttacaccgtcaccagctgtgtggtggaatctacttatccgagaacacatcaaacaaggccgccttgacagtgcaattaatgtctcttgccgcatgctgcgtgctggaactaggccggaccattttactctaccacatgtattaaaagcatgtggagagctaccttcataccgttgtggtagtgcattccatggattgatatgctgcaatggctttgagtccaatgtcttcatatgcaatgcgttggtggcaatgtattcccgttgtggttctttggaggaagccagcatgatctttgatgaaataactcagaggggtattgatgatgttatctcatggaactctattgtttcagcccatgttaaaagtagtaatgcttggactgcattggatctgttttcaaagatgacattgattgtccatgagaagcctacaaatgaaaggtcagacatcattagcattgtcaacatactccctgcatgtggttctctaaaggcagtacctcaaactaaagaagtccatggtaatgctattcgtaatggcacatttccagatgtttttgttggtaatgccctgattgatgcttacgctaagtgtggtttgatggaaaacgcggtaaaggttttcaacatgatggaattcaaagatgtggtttcttggaacgcaatggtggctgggtactcccaaagtggcaactttgaggcagcctttgagcttttcaagaacatgcgcaaggaaaatatcccattagatgtggtaacatggactgctgtaattgcaggctattctcagaggggatgcagccatgaagcactcaatttattccgtcaaatgatattttctgggtccttgccaaattgtgtcacaatcatctctgtgttgtctgcctgcgcttctttgggagcattttctcagggtacggaaattcatgcctactctctaaagaactgtcttctaaccttggataatgattttggtggtgaggatgaggatcttatggtgtacaacgcgctaatagatatgtactcaaagtgcagaagcttcaaagctgcacgctccatatttgatgatatacctctagaggaacgcaatgttgtcacctggactgtcatgatcggggggcatgcacaatatggggactcaaatgatgccctcaagcttttcgtggagatgatttcagaaccatatggagtagccccaaatgcttatacaatttcgtgcattttgatggcctgtgcacatttggcagccatacgtataggtaagcagattcatgcttatgtgcttcgtcatcaccgatatgaatcatctgcatactttgtggcgaactgcctcattgatatgtactcgaagtgtggggatgttgatacagctaggcatgtattcgatagcatgtctcaaaagagtgctatttcttggacatcaatgatgacagggtatggaatgcacggtcgtggtagtgaggccctggacatatttgacaagatgcggaaagcaggctttgttcctgacgatataaccttcctggttgttctttatgcttgtagtcattgtggaatggttgatcaaggtctatcgtactttgacagcatgagtgcagattatggtttgacacctcgggcagagcactatgcctgtgctattgacttgctggcccgctctgggcgattagataaggcatggagaacagttaaggatatgccaatggagcccaccgcagtagtttgggttgcattactgagtgcctgtagagtacattcaaatgttgaacttgctgaacatgctctgaacaaactggtcgagatgaatgctgaaaatgatggatcttacacgcttatctccaacatatatgccactgcagggcggtggaaggatgtagcgaggatcaggcacttgatgaagaaatcaggaattaagaagaggccaggatgcagctgggtccagggtcaaaagggcacagcatctttctttgtcggagatcgatcacacccactatccccacaaatttatgctcttctggagagtctaattgatcgcatcaaagctatgggatatgttcctgagacaaacttcgcattacatgatgttgatgaggaagagaaaaataatcttcttgttgagcacagtgagaaacttgctcttgcatatggtctcctcacaacttcccctggttgcccaataaggatcacaaagaacctgcgtgtatgtggtgattgccatagcgcattcacctacatttccaagattgtggaccatgagatcgtagtgcgcgaccccagtcgttttcatcatttcaagaatggttcatgctcatgtggtggctattggtgagggtttcttttgtgaaagcatcagaggtagaagcataaactaagtagttaacaatgtattactatatattttcccacagtaaggaatactgatgtaatctagattctttatactctagccatgaaaacttatcattttgggcatc

SEQ ID NO: 15556 - DNA, 1915 bp, Oryza sativa
  ref <308>: DATABASE ACCESSION NUMBER: AK066075
  ref <309>: DATABASE ENTRY DATE: 2001-12-06
gatggttacccagctcacctacctagctgcatcagcaggagtgtgcttggcttcagctctagccatcgccttgctgtccatcgccctctacatcatcggcgtcgtcgcctccttcgccgtcctctgcgccaaggagttcgccgagagagcccacgaccggccgccgctcgtcggaacagttttccggcagctcaagaacttcgacagaatgttcgatgaacatgtcaactatgcaaccgcgcatcgcaccagcaggattgtgtatcccggtcactgcgaggtctttacttctgatccggccgtcgttgagcatgtcctcaagaacagcttcagtaaatacagcaagggggacttcctcactacagccatgaaggatctctttggagatggaatttttgcaacagatggggatatgtggcgtcatcagaggaagctagcgagctacgaattctcaaccaaagtgttacgtgacttcagcagtgacacattcagaaggaatgctgcaaaactggcagagaagatctcatgtgcagcagctaacagaattagcataaatattcaggatcttttgatgagagcaactatggactcaatctttaaagtggggtttggttttgagctcaacacactatctggatcagatgaatctggcattcaattcagcaaggcctttgatgaggcaaactcccttgtttactaccgatttgttgacataatgtggaaactgaaaaggtatcttaacattggatcagaagccaaactcaagaggaacattcagatcatcgacagctttgtgatgaaactgatccatcagaagagagagcaaatgaagattgcagctgactataaaaccaaagaggacatcctatcaagatttgtactagcaagtgagcaagatcctggaacaatggatgaccgctacttgcgtgacatagtcctcaacttcctgatagctgggaaagacaccacaggaaatacccttacctggttcttctacctgctatgcaagaaccccatagtgcaggataaggttgcccttgaaatcagagagtttgttgaatggagcaaggaagataacactattgaaagcttcaccaaacgactggacgaaggtgcaattagcaaaatgcactacctccaggctacaatttccgagacactccggctatatcctgctgtcccagtggatgctaagatggcagacgaggatgatgtactaccaaatggctatagagtggtaaaaggagatggaattaactacatgatttatgccatggggaggatgacatacctttggggtgaggatgcacaggagttcaggcctgaaagatggcttgtgaatggagtttatcagcaagagagcccgttcaagtttgtgtctttcaatgctgggccacgtatctgcttggggaaagaatttgcacacaggcagatgaagatcatggctgctaccctgatacatttcttcaagttcagactggaagatgaatccaaggagccaatctataaaacaatgttcactctccatatcgacaatggtctccatctgcttgcaaaccctcgagaaatttcaccatgaaccccaaacaagctactgcatccttttgttattttattggaacatatgcatttctaacatccgtcctattaggcaagtaataataatctgtcccaagtagtcgtatgaaaacaacaaagtagcaatgggacaatttgcccggtaaaagtaaggtgcttgtacaatttaatatgcttgtaatagggtgcttaaagaaagaggatgcagctatatcatcaactacgtatttaagcttcatttctttggatgcaagaacctctttgtatgtgcctggaaagctatagcttatattgtccataactaaagatagtctttgtgcataagaaacttttaagc

SEQ ID NO: 15557 - DNA, 1954 bp, Oryza sativa
  ref <308>: DATABASE ACCESSION NUMBER: AK066076
  ref <309>: DATABASE ENTRY DATE: 2001-12-06
ggtgcgagtcctcgtgatccatcctccccgacagatcgatccaattcgcatcatcgcatcacacacctcctcctcctcctcctccccccgcgccgccgtcatccgcggccttaccggcgaccgacgcggccgccgcgtcgccctcccgccgccgccgccgccgcctccgacgacgggtttccaaacggatccggtggaattccatccctctcgagcttagcgaggggggagagagaagaggaagaaagtgaggggaaaaaagcttcacaagaatacgcgcaccacgcatggggatccgagtcgggaggtagacggaggggcgagatccggcgaggcggagagcgggaggggattgtcgcgtggtttttggttgctcccccctaccgccagctccggcgatcccgaccacccaccggcgacgatgagcggcggcggcggaggaggcggaggcggaggaggaggaagccccaacaacacggaatggcgcttcaaccagacgctccgcaacgtgcaaggaatgctcaaagggcggagctttcctgggaaggtcttgctgacccgaagatcagaacctctatcacctcctgaatactccccgcgctatgagaatgatcgtgatgaatacgaacagaatgaaggctcacaagaaggaaaagggcaagcatctggaaacacagctgatagtatgagtgcaaagaaatcaaatcctccatcaacaagtagcaccaattcattaccagatgcccaaggattagtttctggggctagagctacagattctgcgcgaattgctaaattcacgaacgaactatctaggccagctgttatattagacaagttgcgggaactgtcttggagtggtgttccaccttatatgcgacctaatatatggagacttcttctgggatatgcaccacctaatgcagatagaagagaaggtgttctgacgaggaaaagacttgagtacgttgaatgtgtttctcaatactatgatattcctgatactgaacgctctgatgaagagattaatatgcttcgacagattgctgttgattgcccaagaactgtgccagatgttacctttttccagcaccctcaaattcagaaatctctggagcgcattttgtatacatgggccatccgtcatccagcaagtggttatgttcaaggaataaacgaccttcttacaccattcttggtcgtattcttatcagagcatctagagggcaacatggacacctggtccatggaaaagctttctccacaggatgtttctaatattgaagcggactgttattggtgtctttcaaagtttctcgatggtatgcaagaccattacacctttgctcaaccaggaattcagcgccttgttttcaggttgaaagaacttgttcatcgtatagatgaacctgtgtcaaagcacatggaggaacaaggattggactttcttcagtttgcgtttcgttggttcaattgtcttatgattcgtgagattccttttcatcttgtaacacgcttgtgggatacctaccttgctgaaggcgattatctaccggattttcttgtatatatatcagctagctttttgttaacgtggtcagacaagctgaagaaacttgattttcaagagatggtcatgttccttcagcaccttccgacgaggaactgggctcaccatgagcttgagatggtgctctccagggcttacatgtggcacacaatgttcaaaagctcgccaagtcacctcgccagctaggatacccgataatcatatctgtaatctatgacctgattttgatgtactctagacttgtcccctttggggaaggaaccatgaggagacttcttttgttttcagtgcatactatcaattgtaacactacccccaatctgtatattttacttacagattattatcaatgatgatgcatagatggcattcaatttgtgtatt

SEQ ID NO: 15558 - DNA, 3085 bp, Oryza sativa
  ref <308>: DATABASE ACCESSION NUMBER: AK066077
  ref <309>: DATABASE ENTRY DATE: 2001-12-06
gctgaaaaacattgtacacaacaattcccaattgattcaaatctctcttcctgctatcttgttctgttctttcttcctcctcaagctgctctttcctccctccaattcctcaaatctccacgaactcgctgaagaattagtgtactcatgacaatttggtatcagagcatcgatcctggagaagccacgctatacatctcgccttcagctgcaggtcgaagcgatggagaagcagaatatcgactttggcaaggtcttaatggagattcaggagtcgcttgtctcgctgaatcgggcgcaaggcgagacgcaaccgccgtcaacaagctggaccaaggcgtgaccaactggagaccgcaagtagaagcggcagtgaaggagttgcgtgaggaggtgggtgatatccgccagcaaatggacctgctcggcaaatcgcagtccgcgccgccggcgacgtcttcccctcgagttccgttgacggacgaggaaaggaaggcgccgttgcttcctacgccaccagcttcgcgcgtggctgcggcgggggacagcggagacaagtgggccagtggccgccaacatccacatgaacaccggggaagggcaccaggtgtggttaccaccgtggtcccgacctcggtcaagggtacgttcagttcacctgctccatctttgggaattttggattgggaaaatgattttgattcgggagagcgtaggtttaaccatagagtccctaagttagatttcccaaaatttgatgtttcagatccacatgattggagaatgaagtgtgagcattactttgatgtgaataacacttatccagggttgtgggttagagtctctatcatttacttttctgggagggctgcttcgtggctgagatcaactagagctcacttgcggttccctaattgggaggatttttgcgctgcagtatctgataagtttgatagagaccagcatgattcgctaattagacagatggatcaaattaaacagacgggttcggtttgggagtattatgaacgattcgatgaattgatgaatcaattgctagtttatgatcctggggtaaatatgtgttacttgacacatagatttattgatgggttgcgtcgggagattagaaatgctgttttacttcagagacccaagaatctcgagtctgctctggctgttgcttccttgcaggaggaagtgttggaatcatctgactccacaccggtgaaggagggcaagaagtttgagagttctgggcagcacaagactggtggaaattttaagggagcttttcctttaccattgcctcctggtcgtcatttgggggtaattcagagtgcaagagtggatgagaagaaggaaggggaaattaaaagattgtctgcatcttcagagaaagtgtcagctcttaaagcacagcgtcgggcacaaggattatgttacatatgtgctgagaaatggtctcccactcataagtgtgctaacactgtgcaattgcatgcagttcaggagctgttttctgttttgcatgaagcttgtgatgaggcagtttgcaatcctgagaattctgttttatcggacagtcaggtgttgatggcaatctctgtacatgcagttcaaggatctgaagctagtggatgcatgaggatgttgggtcagattcaaggcaaggacgtttttattttggtagattctggtagcactgcaagtttcattagtgctcgagtggcagaagggttatcggaactttctcagattgctactaatttgcaagtgaaggtggctgatggagctactttgcactgtcagtctgaaattccggcctgtgaatggagcactcaaggacagaaattttgcactactctcaagatattaccattgggaaattatgacatgatattaggaatggactggctaatgcagcacagcccaatgactgtgaattgggttactaaatctctcacaattgaaggcaggaatccagttgttactttgcagggaattttgtcaaacactgcacagtgcggacttattccttccaaatagttgaatgggttgaaacatagacaggcagtagcaaatcttgttcaactgtgttgtgttacagacctggaaccttcagaagaatttcctcttgcagtacaacaggtgctaaataaatttgcttcagtatttgaggaacctcagggtctgccacctgtgagatcgtttgatcacaccattcctttaatccctggagcaatgcctgtcaacgtgaggccttaccgttatactccatcccagaaagatgagattgagtctcaagtccaagaaatgctgtctaagggattgattcagcccagctcaagtccattctcttcacctgtgctgttggttaatttcttcctcctcaagctgctctttcctccctccaattcctcaaatatccacgaactcgctgaagaattagtatactcgtgacacgcagtcgagccattcgtcgccgcccgccagctgctcgctatcgtcacccagcgcagcttcggccctcaccgcccgccgccggccgaagggggaagaaccgatgagaaagggagagaaagaaagaaggaagagagggaggaggaagaagggatttatgtgggccccacatgtcagtgggcccacaatttcttttttgaatgacaaatgggccccgcatatatatttttaattctaatgccacttaagcgccatgtcaacgccacataggacgaagacctagtcaatactgccacgtagacgctatgtcagcgaaaccatcatccaaaaccgccgagggagtcaaattataccggttttaatagttgaggggtcaagatatccggtattatggtttagagtcatggattagattctggtcacttttaagggagtcaaagtgaacttattcctagtttttattagctgtatagctggccatctaaggtgaaattttttgcttggagattatcactgaattccatcccaactgagaaggtgcctaagcaacgaaatatgagtacaacttgtatatgtaaagtttgtggtgctgcagaggatacttgggatcatgcacttcttc

SEQ ID NO: 15559 - DNA, 3096 bp, Oryza sativa
  ref <308>: DATABASE ACCESSION NUMBER: AK066078
  ref <309>: DATABASE ENTRY DATE: 2001-12-06
gggtggattcattcaccggttcgaacaccggtcgggtttagagaggcaatccgccgccgccgcctgcgccgatccccatccgccccgcgagcgagcagaggcggcgctgccgctcgtcctgctgcttccgccgcatccacatccttcgccgccgccgccgccgcctgcgccgatccccccatccatcccgcgagcgagcatcctgctgcttccgccgcatcctgaaatttggcttaaccttgatgtttgtttgttcccaaaaagtttgggggtgttgaactgaaccccccatgccccatgttagatccgcccatgaatggatcatgattcactccaaaacactatggagcatcctgttcctggagaggagcatgaggaggataacagcatgaaagtggatgtggcatttgatggagtgcacagcccgttccggtacaggcacaagaaaaggtccaaggtttgggaggagtacaagcccatctttctgaatgggaaggttcagtttgcggagtgtctctactgccataatcgcctcagctgcaaagattccaacggcacaagccatctatggcggcatcagaaaatctgccctggcaaggaggaagcggcgcagaggcgacagaaggattcctacttcccatgcgttttggtgaatgagaacgatccagtttcaccccacgatccggtcaatgatgttattacagagacgcttagtgatataaactcggtaacacccagcggtaacagattcacgtcaaaggtgtggaaggagtttacacttgtctatattgaggggaaactccaggctgcagattgcattcactgccagaagcgcctcagtgcgaataagttcggggggagaagccatctgagtcgacatcttataacctgtgcaggacgacgtggacgtggagggggccaaattcatcagaagggtttattttatccttctagcgtgcctagtttgaagtccagggtgcaagatgagctctcacctgccttgacaaatgggaaggttcagatcgcagaatactctagcaagcttctgagggcaagtagctctggtgactcgacccctaagcccattcgagtggtaccagcagagcattccgtgccgactccagattatacaagcctgatgaaacagaggacctcatttgtgaccactccagctggtcaggaaacatctgatccagacctagtcgggatgatagctttgcatggttatcctttgtcaattgtggagcacgaagaaatgatgagatttgtaaagaaactcaaccctgtggtcaatttagtctctcgcaatgctatggaagaacattgcttgacactatttcagaaggaaaaggaaaatataaagggtaaaattgcacatttttcccgacgtgtctctctgtcagcaagcatctggactcctgatggacctgagacaacagtaaattacctctgtttgacagcacattatattgatgaagactggaaagttcataggataataataaaatttggaatgttttggtccgcgcctgctgatttggaaaggatgatacattgtatggaagcctgtgtcccagagtctgagagcggatcatataatgtcatattggatgccattagagattggaatcttgatcagaagcttttaagcttgacttctgttggtgaagttaggggtgacaccaatacttcattgctaaaggaaatgcttatagagaagaagtgccttcctattggagggacgctattcaatgttgcctgtgtggactatgtccttaacagtattgttttcaaagtgcaagcagatatacttcgtcttgttggtgacatagtaatggattttttagtgtcattgacccagcagcagcttctggaagttatttcacagacgggtctaaagtgtccacaagaagatgctaagtggtggcacaaactttattttagacttgaagtgcttttgcatttcaagaagtcatttccttctgaagaaagggtgtccccagaagatacaaaaactgctgagtccgtttgcaagattttgaggacaatttatcgtgtcattgaagttatttccagccctagctctccgacagcaaatatatattttaacgagatatggaaagtcaggacagttttgcaagaagaagcattaaatgatcacagagaaatagctacagtggctatggtgatgcaggaagcattcaatgagtattggcaaaattcatatttgtggttggccatacctgttgtgctagaccctagattcaaattcagtttcattgagtttcgtctgaaacgagcttttggaacagattcggcaagctacctatctgtaatacgtgaaacagtccgggaactcttcaatgaatactgccattctttgaatcaggcaagtgatgttgtttcaaacagtgaagctttgtgtgcagatgataatgattcgttggaagattgggatcagcatctccatgaacaagcaagtcgtcagctatcttcggagcttgatgattaccttgaagatggtttagttcctagaaaggatgattttgatattttaaactggtggatgactcatagtactaagtacccaacacttgcaactattgcacgggacatcttagccatgccagcatctgctgttcaatctgaagcagcattcagtagcagtggaccagtaattccaaagcaccagagtacattaaacatcagaacaatcgaggcacttgtttgtactcgagattggatgagataaaactgtgaactgttgagatgggttgcatgcagctttcgccggtggaagatttcaggcagtgtatgatggtgcttctgaccaaggataaccgctctgatgatcgagccccaacatggtgtatcaagcatttgggagctgttaaacttcatttcagtcgagatgtgtatgcatataaatgttactcccatcaccccatgcatttgcctggtgtagtgcagatgtatgccgttgtttagccaaagttcaggtcagcccagagccttaggtcaagtaggaactaggagttgtacgacgagaatgttgcaaatatcctctgttatgagcaattaatctgtgttatgtgc

SEQ ID NO: 15560 - DNA, 1172 bp, Oryza sativa
  ref <308>: DATABASE ACCESSION NUMBER: AK066079
  ref <309>: DATABASE ENTRY DATE: 2001-12-06
gataccctcccctctcctctcttctctccttcgcttcgccaccgcgttcgccatggccttcgtctccgccgccgccgccgccaccgccgccgccgccttcctccccggcgtctcgtccgcgtcccgcgcaggaacacccttgctctcgctgcaacggcagccgctcgcgggttccctgcgcgcggcggcgcaggggtcgagcgcctcttcggggcaggtggtgatggagagcaaggtcaaggcgaagaagaagaaggggtccggcgccgggaacctccccggagccatcgacgcggagatcagggaggcgcaggactacctcgccatcgacgagcaggaacctgttccggaaaacttcccttttgaaatccttgacgaagaagggatgagtgtggttattctgaaaagggactacaaagatgagaagattgaggtcattgtcagcatgccaaatttagaagggggccctgagtttgacgacgaagaagccgagggtgagggcaagaatgctagcaaggatgatgaagatgaagaggaagacgagagcgctggagatagcagcgtgtctctaaaggtgacagtctccaagggctctgggcccaaacttgagttcacctgcacagcctttcgtgaggagatcaccatcgacgacatgttaatagtggagaatgcagccacagaaggagatgagaaattcacttacgagggccctgaattcaccgagctaccggtgaatgtgcagaagggcctattcaagtacctggagcaaagagggatcactctgccgaccaccaactacatgcacgattacatggtgaccaagcaaaccaaggagtacgtcgggtggatgaccaagctgaaggacttcgtccggcaatgagaaattgccgagcaatttggcaggatttttggtagcttagccttttagcatacctgcatatgtaacaaggattactagaattatgcgaagcaatgcaacaaccggggaaactgccttccctgcaatgtgcgatttctgatgcccagtagtcaatctgaggctattggcacttatgatatcagtgcttattttactagccttttaccgtttcttggtgctgcttatctgaattttgtgtggaattgtgaattgtgatggctgaaatgatattctatgtgaaaagaaattactc

SEQ ID NO: 15561 - DNA, 1071 bp, Oryza sativa
  ref <308>: DATABASE ACCESSION NUMBER: AK066080
  ref <309>: DATABASE ENTRY DATE: 2001-12-06
gtcaaggcgaaggaggccgcggcgcaggcagagagctcggaggagaagaagacggaggagaagcccgaggcggagaaggaagcagagaagaaagaggaggagcaggaggcgaagccaagcgacgaggcgaagaaggacgccggcggcgagagcgaggcggcgccggaggcgaaggcgaagggcgacgacgttggcgccgaacccgccaaagaagccgttcccgcggcggcggtgaaggaggctagcaatgacgacgaaggagcaaaggacgagaagagcaagcccaaggacgccggcgacgccgcgccacccgccgccgccacaacgacggagaggtccctgcacttctcgccgacgccggcggcgcacaagcagcacgaggagcactacccctacccgtactacggcgcgccgcagccggtgatgagctaccacatggcgcagccgacgacgagcgtctcctactacgcgccgcggccggagccggcgtactccatgcagcagcacccaccgccgccggcgtactccgcgccgccgccgcagcagcagcaatacccgccgccgtcgccgtcgccgcagccgcaggcaatgcagcagcagtggtcgccgtcgtacctgtacatgccgtacccgcactcgtcgccggacacctactaccgcgactactacagcccgccggggacggcgcacgcgccgccgctgcaggacgagtaccgcatgttcgacgacgagaaccccaacgcctgcagcgtcatgtgaacgccacgcgccgccgccgccgccgccggctagcaggccaggccggccgggagaagtagtagttgaggagaggtagagtagcttgtttacactctcctccattggagaggtcaaagctctccttcaccgagcattttctttttttttttctttttcctttttttttttcttcacttcctctcttactgttctaattaactagagcatgtaattgtaatgagacacgccaaattatatatgtttttctcttatcattttgtataaggcaaagacatatacatatatataacagattacataactactataagt

SEQ ID NO: 15562 - DNA, 1977 bp, Oryza sativa
  ref <308>: DATABASE ACCESSION NUMBER: AK066081
  ref <309>: DATABASE ENTRY DATE: 2001-12-06
gtatgtccatgcttactgctttctttcctcctgccaattggtactgcttttctctggtagtagttaagctcagtcgatgtcgtccatggcggacatggcgtgcacggtgcaggcggaggtgatcttcttggggcagttccggcacccgcacctggtgaagctgctgggctactgctgcgaggacgaggagcgcctcctcgtctacgagttcatgccgcgcggcagcctcgagaaccacctcttcaagaggatatcggcgacggtgccgtggggcacgcgtctgaagatcgccatcggcgccgccaagggcctcgccttcctccacggcgcctccacccccgtcatctaccgcgacttcaaggcctccaacatcctcctcgactcggagttcacggcgaagctgtcggacttcgggctggcgaagatggggccggagggttcggagactcacgtgacgacgcgggtgatgggcacgcacgggtacgcggcgccggagtacgtgatgacggggcacctcaacatcaagagcgacgtgtacagctacggcgtcgtgctcctggagctcctgacggggcggcgcgccatggagcatgtcagggggaggagcctccacgccgaccaggtggtcaagatcgtcgactggacccgcccctacctcggcagcagccgccgcctccgctgcatcatggacccgcgcctcgccggccactactccgtcaaggccgcccgcgccgtcgcccacctcgccgtccagtgcaccagaccgcggcgcgaggacctcgcggtgacggtggctgcggctcgcggacgtgcgtcaactgctgcttctctggcctgtgtgcacggggaagcggttggcggcggcgacgtctcttctcccagccggcttaaaaagcccatctcgtggagctcctcccctcctatggccagatcctatcctggccgtggggagcttcgggagagggtggacgcggcggcttgtgcagaggacgacggtgccatggcgacgtgcgggagcaggccgcgagcctacctaagccgtggagtggtgaactgggctaactggtggctgatgagatgatgtggtggttccgcgacggttgttgtgtggttcggtggtggcgctggacgaaaatcattggcaaaagccttgcttagcctttggctagcacgacaacggcggcgcctttggcgtcgttcccttcttggaggcgtcgttatagcattttctccacgctaccagtctttaggtgaaaactgtgatccggtttccggacgggcgatggtggcgtttcacgtcgtatcctccttgggggcatcgtcttggagaaccttacccatgcaccatttgccgcttgtggactcctgtgtcagcttgatgcgctagatgcctaggtgcttggtgaggccttgtccttcttggttcctttcttgtattggtggcatccagcttcttcatctgtctctgtcgggtggagtcggagctgctacgtcgttggggtacgacgaagcttggcaacgataacatttgcagtttctctctagggatgtgggtgttgctagtacaggctttggcgcttcaggggcttggctgatgtccaaagtgtgagcttggtgttgctttgctcggtttagcggtgcctacaatgatgccataatcgccatggagtcggagctgctgggtcgctgggcggctagctcggcaacgatgacacgtgccttgtgatgtcaacgcggtgtgccgcctcttcagcatctcgacatcgatgttcgtcgttggattccgccatcgtttcgttgatagtttggctagagtggtgtggagctccgtgtgctgtgtggttgtaccggccacggtggaaaggcttggcgagtctctactcgccgagaggttgttttttctttttctgtaacccgtctgggtttttactcctgcttaatgaaatataattggcagttctcctgccggtttagttt

SEQ ID NO: 15563 - DNA, 1772 bp, Oryza sativa
  ref <308>: DATABASE ACCESSION NUMBER: AK066082
  ref <309>: DATABASE ENTRY DATE: 2001-12-06
gaatatcaaagattggggctcatcccttccatcactttgtagttatcagcatctagcagactttggctatgtactaaactcattttttttgtgtagtttcctctataattgcaaggaacaaacatggtggatctactagaggtatatgttcagtggtcatagtagagactatccaacaaatagtatcttttattcagaatcacaggagcagaagcatgtcaaggaggagactcatcgtctgcggcagcttctcgtcgaaattcacaccgctctggaggcagccaaggggtgtgccatcaccaattcatggctactacgctggctacgcgagcttgaggacgccgcatgtcgaggcgatcagacactgcgcaactggagagatatgtccagcaaggtgagctccatcatcgattctagtaactccttcaaacgcatcaagatcgcagcatcgcagctgattccatccaaggaatccaccatgaaagtttctgccactgtcaagaagctagaagcagtagcttctgggatccccaagttcactcagcttctcagcttgcagaatgaccaagcagtgttacatcatcgaccggttatcatctttgtttcgatccatgacagggtagttggcagagtcgatgagaggaaacaggccatcgaattcttgcttcacatagacaagaatggatcatcctctccagatggttgtgtgcttcccatttggggtgtcaaaggagtaggtaaaaccacgattgcgcggctcgtatgcgacgatcgcaaggtgaggagccatttctcaatgattatatgggtgaattgcagagaatatactagtccagccatggccttggtaaagtcattgtgcaagaagcttggtttgagttctaacgtaaccattaatctttcaagtgtgatcagaaaggctaagaatggagagatttctacttgttcttgatggtgcttctagctaccccaggggaatgaatgacatactcgatacactgttcatgaaaagtagagcaggaagcaaggccatcattaccactatgtaccaacatctggcaactaagatcaataagcatgaaaacttacctgtagggttcctggcaatggaagatctcggctgcatgttcatggaaaatgccctgggtggtgcacaccctgaagaataccagaaattacttgttattggaaagaagatcgctgtgacattgagggtgtgcagccctttagctgcaaaagttgtgagtggactgcttcgagaaaacctcaatgagaagtactggtacattgttctgaatcgctgtcagcagttcgtcgcatccagttccaggtttgttactccatttattctgggttgtaagcttcttcccaaacacctgcaacgctgctttggggtgttgggtacataccctcgctggaccttcacaagggaggaattgataagctattggatgaacaactgtgtcgtcgtcagtgaaaattgtatgaaaaatagcatagagaatgttgcgactgattactttgatgatttggtgaggaaggcattcatacaaccatcccacatcccagggctgtacaaagtggatgacatgctaagaggcatagctctgtacataggtccaatgcctgttccaaaaacaagaatacatttagcgaatttgattggggaaggattttccatccacgaagacttttggttgatgagactagcagagtagggttatagatcagagcctagttgaaataaagttataaggtttgatatttgtttc

SEQ ID NO: 15564 - DNA, 1776 bp, Oryza sativa
  ref <308>: DATABASE ACCESSION NUMBER: AK066083
  ref <309>: DATABASE ENTRY DATE: 2001-12-06
gaaaatcaaattccaattccaattccattttctcgatcaaacacagcacacaggattggacgccgagacgaggaggaagaagaagcgagcgaagcttgtgttggatcggagtggggaggagatgttgagggcggtggcgaggtgctgcgggcactggccgccgggggcggcggcggcggacgggatgctgtggcagacggagctgaggccgcacgcggcgggggagttctcgatggcggcggcgcaggcgaacctggccatggaggaccaggcgcaggtgctcgcctcccccgccgccacgctcgtcggcgtgtatgacgggcacggcggcgccgacgcctcccgcttcctccgctcccgcctcttcccccatgtccaacgattcgagaaggagcaaggggggatgagcacggaggtgatccgtagggcgttcggcgcggcggaggaggagttcctgcagcaggtgaggcaggcatggcggcagcggccgaagatggcggccgtgggctcctgctgcctgctcggggctatctccggagacacgctctacgtggccaacctcggcgactcccgcgccgtgctcggccgccgcgtggtcgggggcggggtggccgtcgccgagcggctcaccgacgagcataacgcggcctccgaggaggtccggcgggagctcaccgcgctcaacccggacgatgcgcagatcgtggtgcacgccaggggtgcgtggagggtgaaggggatcattcaggtatcgagaaccattggtgatgtttacttgaagaaacaagagtatagcatggatcccgtgtttcgtaacgttggtccccctattcctttgaagcggccagctcttagcgcagaaccatcgattcaagttcgcaagctcaaaccaaatgatctgttcctgatatttgcttcagatggtctctgggagcatctcagtgacgacgctgcggtgcagattgtcttcaagaatccaaggacggtaagttcagataacatctacagcattcgatcattccatcaccgggagtatatattccccgtgaatgaacgaggagtacttacacaatgagataacaccaagttcgtgtgaatattcatgcagggtatagcaaacagattggtgaaggccgctttaaaggaagccacgaggaagagggaggtcagcttccgtgatctgaagacgatagagaagggagtgaggcgccatttccacgacgacatcagcgtcatcgtcgtctaccttgaccgccaccgcggtcgccgtcacacaagggtcgtcgactcgagcagcaactgcaccaacgcccccgtcgacatctactcctccaactccggccaatccgtggagactcttcaagcccatcggggctccggttggtagaagaagactgggacgcctcccttgaaaagatcaagacggtctcttgttaattagtaaaaacatgtagagccgctgatcagtaacactagctgcagtggcatcatcggaagaaacgcgggaatgtacataaattagtagcggcgcgtggcattttgatgtggggaagaatatttgattttttttccttcctttttgggctaatttaattgcagagattactttttgctgttcttctttggtttatatttctgctgaaccagcagttaactgttgactgggaattaccgcatttatgtgcggcaagataatatagtagtggtataatggtattacactgtaacttgctgagattatattaactaaaaggtgaatcttaatggagatcttac

SEQ ID NO: 15565 - DNA, 1261 bp, Oryza sativa
  ref <308>: DATABASE ACCESSION NUMBER: AK066084
  ref <309>: DATABASE ENTRY DATE: 2001-12-06
gatagtgcaactaagcatctccctgatttttgtgtgctctcttttcattttagaatggcagatgagtatgatcgcagcagctacagaaggtctggtgctgatgacgaggaaggtggctacaacaagaccaacactggagattatggccgcagcggtgacgactacggtcgtgacactggcctcttcaacgagtccggcaacgacgacaatgagagtggctacaagaacaccaacactgatgaatatggcagcactggtagctacaacaagtccaacaccgacgacttaactggcggcttcaacaaatccggcacagatgactacagtggtggcggcggctacaacaaatctggcgccgacgactacagcagcagcggtggctacagcaaatccggcactgacaactacagcggcagcggcggctacaacaaatccggcaacaatgactacagtggcagtggtggtggctacaacaagtccagcgctggcgactatggcagcgagtacaaggactccagcaccggcgactatggtcgtggtgacgaatacaagaaatcaagctcagacgactatgatggtggctacaagaagtcaagcagcaacgatgatggctatggcggaagcggctacagcaagccgagcaccggcgactacgacagtggtaagaacgcctccaacactgatggatatggtggcagtggctacaacaaatcaagcacagacaactctgagagtggctacaacaagtccggcaccggtgaatatggcagcggcggcggctacaacaaatcaagcacggacaactatgagagcggctacaacaagtccggcaccggcgactatggcagcggtggtggctacgacaagtctgacgccggtgactacactggtggctacaacaagtcgagcactgatgagtacgcaaccggaagaggcaagaccagttctgacgactactagataattatcgcttatcaggaaagcgaatcagggtactcttgatgctgaagtactaaatatgctcgaatacagttggtccttgctaaaaaggatttcgtatgtattccctcttatttacaggatgggttgatcagtttgtctctgatatgcaaggttgatcacacatctcagaggatgtgtgatgtgcgtaatatgctctgtatgtgtatgtacctgaacgaaaatgtaatactactctgctatgtttgcacatgaataaaacgtgatatatgcagtagtatcaagcaagcgaatagttgcg

SEQ ID NO: 15566 - DNA, 2360 bp, Oryza sativa
  ref <308>: DATABASE ACCESSION NUMBER: AK066085
  ref <309>: DATABASE ENTRY DATE: 2001-12-06
ggggagtcatcattcccacaccgccggcgagcaagccgattccaccgcgccgccgccttatctgcttcgccggccggcggctgctcgccggctaccttcctatacggcgccggctcggccagggcgtcgcgaggcaaggccgaggctggcctcatcgctcgcagccaaccagcagagcctgccggctgccgccggtgctatgcccgatggcgacgccctcgtcggcggcggccgccgccggaggaacggtggctgcatggggtttcttcggctcagcatgttcaggctcgtatcagttggcgtgaactctggaagtggcatgtctccgttgaggtatagcatgacatggttcatactgggccttgacctagcgaatggttgtgagcacaagagcccaagtttcagcacaaggcatgcctcatttatgttgcagtttccttgtagcctcttgtctattgtctccaccatcgatcctttctgccaatgctcaagtacccaatcaaccaacataaatcggtcaccttgtgcattctgcttgacaggcctttgcccacaggtgatctcaagaagaaatgtgccaaatgcgaacacatccgtaagaggagacggcttacctgttcgtaccaattccggggctaggtaacccatggtacctaccacacgtgtggtctgtgggtcagaaccatgatcgtatgactttgcaagaccaaaatctcctaaccgtccattcaattcactatcaagtagcacattgctggccttgatatctcggtggatgacaacactttcacactcctcatggaggtagagcaagcaagatgcaactcctttgatgatatggaacctcttattccaatctagcgacagtttgtcttcagaatataggtacttgtcaagactgccatttggcatgtagtcatagaccaaaagaagttcaccttttcgcctgcagtagccaagtagctgaacaaggtttcggtgtcgaaggcggccaatgctaacaatctcagtgatgaactcctttgttccttgccttgattcatgtgacaaccttttaactgcaacctccaatttgttcgttggaagtatgcctttatacacctttccaaatcctcctgtaccaagtaggttcttgttcttaaatccttctgtagcaaggaacaaatccttgtatgagaacctatttggcccaaactctgtctcccaatcttcccgtagctcggtatatgtcaatttcctccgcacaagaagaactaagagagcccctgcaacaaagatggatgctgcaatagtggctggcataatgatcttcaaaacctttgagcgaggccttggtccaacatgaggtaaccttggtagcttccttatgtcaatcccagaagcagttccacccatgctgaagctccagccaagcacataatatcttgagttgatcaccccagtggctgatgagaagccaatgtatgctgtacctgggagcactgttgaaagattgtagatggctgagactagtggcagtgtaggtttagccactttgatgggagccaaggttacatcaatctgtgtggatcctgcatcatactcaacccacacttgcatcacgtcacggctaacaagcgtcaagttcttgaacacaccatttttgtcatcatagaagccagcatcccgggattgcacagagtggagactattaatgttgatgccaacatggttgtcactgatgtcctggaactcactgttttggatggtgtcaagctcaactgcgaatatatggttgcttgtgttgccgttgttctggtcattgaggatccctaaatactgggctggcagcgcgttggagaaactcttgtttgtggagataaagaaggccatgccatctgcacctttgtcaggaatagcagagaggatgctgaagatgaaggtgagcgaaaaagattgcacgtcaccagtgggatgcctacgaaattgcagaggagctgggtagagtgcatgacctttgaggttaaaggtgccattggtcagctgaaggagcccttctggtgttattgtagctgtgccatcaaggcttaggttggcttgactgaagccagagtagatgaactgctcctcagcaatggtgaaggatgcaaggtcgtggccaaggaatatgagttggcatagaattaaacgcttgtacatcttgccaggcatgaatgcaacctgttacaactctagattctagaaagatgcaataacaaagtactttataagataactgtgaacaatggcttgcggttgtctacccctctagtaatagtcaaactattgttatttttctcagtattgactcagccagctatgaaatatgatttttgtatatt

SEQ ID NO: 15567 - DNA, 2644 bp, Oryza sativa
  ref <308>: DATABASE ACCESSION NUMBER: AK066086
  ref <309>: DATABASE ENTRY DATE: 2001-12-06
ggcgaacttcctttccccattctttgctcggagattcctcgtcaaaccctaaacccccaaatccacccgcgcggatcgtgaggtaggagctcggggagcgccgcgggtggcggcaggagaacggagacggacggaggataccctccggggtggcgcgaagcccggtagttccctctgccggcgtcgtcgtcggccgatggctaccgccgctatgtgcgacggcgaggggcagcagggccgactgcgacgagcttctgttccacgcaattccacaatggattcgatggactgaccaggagtaaaacacgaactgtttaagatagagaaaccctctgttgcggatgatgagcttttcattgggggctactccttttgtccatatcctgagagctagaagagaaggtaatttgccaaggatctgaaaagcttcctccccaacatgactaatattgatattcaggaaggtgacgctagagagcatagccatccactctggaattctaggaaaataatagtttgagctcatcccaaaatatcggaggggattaggagcagtgaaccaagaattcaacaagaaatcgagagacgaaccattttcagtacagcattgaacatgcaggtactgaagcttgagtttgcacagtgtactgatggatggaacaaagttatctatttcatgcaaggtatttgatgagatgctgttgtcaactttcatatgataaagtttctgtaaagccttcatgttccctactcctgctggcagacttacttcatcggcaagtaaaaacagcaaccttttcaacttcacaatactcttgggtaattcctttatcattgtctgtgtcagatctattgtctcaagttgctgtagttcccctatttgctctgggagtttgctgatgcttactctgttcaaccttaggtatttaagacaaaacaatttctgtatgccatttaggtgatggttttctaattgatcattgcattcaatgctaattgtacgaagagcttgaaagtctgaaataggcagcacattttcagtggatccataagtagtgagtgatcgaacattcaaaacattcatatctgacatcaccataatttcttcttgaccatggtaatgaaccagtcgacgaatcttgtcttgtggtccaaaggcatgattctggtaaccaaatactgtgatgaaattttcttcagctgatttggaaataataagatcaaaaatcacatcatgtactcgacaagcatcaactctgccatcatattggatgctcactggtttttgggagatggacacaaatgcttggcaatcaaactgccctccaattttgttatatacttgacgagcaagagtagtcttgcccaaccctccaagacccacaacagacaccacacttaatcttgactccaacttttcccctcctttagttagccagttgatgagctcttctgctggttcatcaatacctactagggcatctgcctctgcaaaaagtgctggcaaccgagggtcaaggggtaccacatcaatagaacttgagatggtaccattgaagttatacctcttttgccgctcacttgcatcgtcaacacgcgccttcaactttaggatttgatcagcaatctcattacgagctccaagtgtcctcagcttgtgaatgctcttctggaagaaacccttgtgaactctgcttgagccaccatccatctgatgaataaagtcgtcgatgcagtcctcgatatcgtaggacagctctctgatttggttcctccattccttgacctggatatctagatcatccatgtcagccagcttgaggagaaaagcattcatgctttgcagctcgagcttcatggtgaggatctcctcattcacacccttgaagctgttgttgcactgcctctctaccagggcagggagctttccgagaaccgagctgagtaccccagtagcaacactcaccatggtgtgctccatttgtgatttgaggtgtatgtttggtggcaactctaaatctagcttgcttcacagatgccgggctcaaggaggaggaagagcttcattatgataaaaggtgaagtggtaggaagctgttggtgttactaaactagtggagattggtgacaaccaatatcatggttctcagaatttcaaattcaatcataagtgtggttgtgatgttagcaaaataaaaaaaagattatgaaagaagacagtcgcatgggaagaacaacactcttcggcaataagacaaagttataagatggggatttgcttaggttatcaatatatagtggaaaaatgttggaaagcttcagccatttcctaatgcaagttaggtgtagtgattttttaatctgccatgtcaatctttggctctttgcttctggtggtcagtcaattaggcatttacaataattaaaaatctaaactataaggctttctaaatggttggtagatcttcattttagtccaaataaagccttgtgtttcttttttattttttaacatggtaagcaggtatcgaaactctaaactcgatttcttttttcttttggatattatctcagaactcagatgtattcaatatgtaagtgaacagtttgcattaattcttcagcgatggcattaccttgctgc

SEQ ID NO: 15568 - DNA, 1880 bp, Oryza sativa
  ref <308>: DATABASE ACCESSION NUMBER: AK066087
  ref <309>: DATABASE ENTRY DATE: 2001-12-06
gaccacccgtgaagctctggagtcgagcgtgaacttggtccactacgccatggcggccgcaccacagcaatccgtgcacccaagcttgccctcctcaacctcaaccctccgcctcctcatctcctcctccccacgacggcctcctccgccgccgccaagagcccgccggtataacaggctcgcggcgtcggcttcggcggcgcgggagatgccgtggccgcacgtgctgacggtggccggctccgactccggcggcggcgccggcatccaggccgacatcaaggcctgcgccgcgctgggagcctactgctcctccgtcgtcaccgccgtcactgcccagaacaccgccggcgtccaggggattcatgtggtgccagaggagttcatccgggagcagctcaactcggttctttcggacatgtcggtggatgtggtcaagacaggaatgctcccttcaatcggagtagtcagagttttatgtgaaagtctaaagaagtttccagtcaaagctttagtggtggatccagttatggtgtccacaagtggagatactctttcagaatcatctactctctctgtatatagggatgaattatttgctatggctgatatagtcaccccaaatgtgaaagaagcgtcgagattacttgggggtgtatctttgcgcactgtttctgacatgcgcaatgcagcggagtccatttacaaatttggtccaaaacatgtacttgtgaaaggtggggatatgctagaatcctcagatgcaactgatgtattttttgatggtaaggagttcattgagctccatgcgcatcgcataaagacccataacacacatggaactggttgcactttagcttcatgtatagcttccgaattagcgaaaggtgcaacgatgctgcatgctgttcaggtggctaagaattttgtagaatctgctcttcatcacagtaaagatcttgtcgttggaaatggacctcaaggcccttttgatcaccttttcaagctcaagtgtccgccatacaatgttggctcacagccaagctttaagccagaccaactcttcctgtatgcagtgacagactctgggatgaacaaaaagtggggtcgttcaatcaaagaagctgtgcaagctgccattgaaggtggcgctaccattgtacaactgagagaaaaagattccgaaacaagagagtttttggaagcagccaaagcatgcatggagatttgcaagtccagtggagtaccactgctgatcaacgaccgggtagacattgccctggcatgcaatgcagatggtgtccatgttggtcaattggacatgtcggcacacgaagtgcgggagctcctagggccgggtaaaatcatcggcgtctcgtgcaagacccctgctcaagcccagcaggcctggaatgatggagcagactacattggctgtggcggtgttttccctacctccacgaaggcgaacaatcctacattggggtttgatggcttgaagacagtttgcctggcatctaagctgcctgtggtcgctattggcggcatcaacgcttcaaatgcaggttcagtgatggagcttggtctcccaaacctcaaaggcgtcgcagtagtctccgctctgtttgaccgtccgagtgtcgtagccgaaacaagaaacatgaaatccatcttgaccaacacctctagaacctagagctactacaatattctttgttcgaaggggatatgtttatcaaaatgaagagatgtttccaactttaataatcagaaggcatttcttgtaataatgcttgatcaaaagcatctgtgatgcaggggaatgaggaatcacaatcttgcatcattgggatgtaaggtacaatgttcagatttctttt

SEQ ID NO: 15569 - DNA, 4070 bp, Oryza sativa
  ref <308>: DATABASE ACCESSION NUMBER: AK066088
  ref <309>: DATABASE ENTRY DATE: 2001-12-06
aagatatcaaagtccgatgcggcaatgcccccctccattaatctgcgaaaaaaacctgaaaagtacaaagcaaaccaccctccgaatcctaccttctccttcctggagaggaaggaagagagataatcggagcatatgatgaggagatggtggtagcaggagcagtggttggcggcttggcgcggccacagaggcatcccattcccacgcggcctcgcccaagaatcctcctctccggcctcgacgcatgctcctgtttttggaaggaaacgaagtgaagaaaaagatcagaaaaggcaactagaattccaacagcctgttcattgttctgtgaaaaaggggcagttcttttgcagtgtgtatccatttattcgctgtttcttttggtggtttttttggaggcggaaaaaaaattctgttcgggtgcctgttcctgcgtgtttcgagggtttgctcagaggaagcagaggatcgaagggggaaagattgtctctctttcttttttttttcgcatttgggttctgagattgttccgcaacagggacctttcttgcctgtgagattctgaatcgcccgaggctggaaagattgaaacttcacggcgaggtctgcatgtttggctgaagacggagggggataaaggaagcagagggtcggtctgatgatgcagttccgcaatcttctttccttttgcgtgttcaggtcttgatgagatatattccttcctgtcaagtttctcaattttgacgtgaattccgagtccggggcatcttgaggaaaccgaggaagcacggcagatacaagggtttctgttggggctatcggatcatttctcatctgtttctgcttatcttctcttggtttcgcgattgctcgagattcaaagattgggttttgattgtctggagattgaagaagctagtaccattgttgggtacttgggttcacggctcaagggtcaaagaaaaggggcagacatggctgttcagatgatttagcaggtcattgtgtaggaacagttgtcaggcgccaccttgctttttcctgtattcatctggtctgggttcttcgaactaaggttgtaaacttgcctggtgattaaacgaatctgtctgacaatgttctcctctatcatggcaaagaagagttacaaacagcggtgcaaatctgagaaggtccatatgggctgtatgtcgggcctcatccacatgtttgacttccgtcgcagtccaaaacttatttcagatgggacgattaggaggagttcagtcagaagtgacctgaaaggttctgaagatttccatggaatcatcttttctgatgaggacaaagactatggggttaaaacaattcatgccagcaggccaagtattaaagcactgatggaagaagagatggccagtggaacgcagatcttgaaggaaacacaaaggaacatatttgggatacgttctgatgatttgaagtctgtgaacctgcaggaaggatctgatgttgacctagacttggctacaagtctcatggaattatacagaaatcataatggcagtcgcgatattatcacttcggaagtatcagatcactcttccagtttgattgacaaagagcacaatactgatgctagtactcatcctaaacaaatctcctgtagtatagagaaagcacttgaagctgtggctgaagcagtaataacccatcaatctgcaaacgggaaatacacaagcagcagctacgaagctaggcccaatgaatttcttgatgcattacaattgctgagcgcaaacgaagagttctttctgatgcttctgaaagacccaagctctaggatgttgcaatgcctgcagaacctgtacacggcactaggaaatcccatgttagaactggcagaagatgacaaacaaacaaagtcgaaagttaccattaacagtctagagcagtctgaggtttcgaaatacagcgtgcaaaaaacacataattttttcttgaaggaggataagctagtcatgaggagaccaccaaaactgaatgatagtcctcgtggcgttagcagaatagtaatattgaagccaagtcctggaagaagtcagactagtctgatttcaagtagtgcaatgtcgtcaccagtacaaactcgtgctgatttgcaaggtcaggaacaaagtgacaaatatgctcgccatttctcacttagagagcttaaaaggaggctaaggcttgccattagtaacaatcgaaaggatgtcatgagtagtactttccagaaagatgattcaacacaacagttcattctcgagagtatgtcgacaagtatggactcttctgaatgtgaaaaggctgagaaaccctcaatagttgacaagaaaacaatccctgaagatagtggaagtggcatggggaatgatgccactcattgtgctagctctttcttctacgaaaaagctaagaagcatctaatcgagaggctagacaatcaaaagaatgacacttctcagatcgtacacaaatcagaaccctttgggaaattactttcatattcggagaatgatacgttttctcaaactgattgtcctcaagaggatgttaaactgtcagaggattcgactgcttcatcagcattactgacgactgaacaagaggatatttcatcaaattctgacccaccaatgaagtttggggagctaataccattggacaccagcacatcggctaacacacagctggatgaatttaagacagaccatgccagtcatccagtcaaagagggcactatctcgcaggagttaactagtgaagggattgacagcatgaatgatgcaacagataccccccaagtctctattcagatcgaaacttcaactgaaagcttggaacaaataaataccgaccaatgcttcgcagaagagtcacaaaccatgaatgcattaccagaagtatccctgcacactccagaaaaagttaacgagcaattcaatcatagtccatcggcagttgttggattaaccaagccatccatcttgacattttcttgctccccggagaatgcagatgacaaagaggagagactgagccctcaatctgttctagattctttcctgggagatggtatcagccccagccacaaaactcgaacgcaagatgaattgtccatgccaagcacaaggattctgtttaaagaggatgacactccctcgggaaccccaactttgcaaaacacaccacaagaagctattttggatgataaacaggcaaggctttccttcataaaggttgtgcttgaggcttcagacttcttgtctgaggaaagttcagagatatggtatgtggacggatcactgcttgacacatctgtattggctgaagtaggaactttgtactgcctgacagacgatgcggtgtttctctttgattgtgtggaagaagctctttgcaagatcagggataacttttttggttgtgacccttgggtagcttatctgaaacacagtgtgaggccagctccggtaggaacagggctcattcaagaggtggataattgcatcgattctcttgtcagtgatgaggttccaagtacattagatcgggtggtgctgaaagacctggagagtggatcatggatggaccttcgggttgatactgaagaagttgctatagaggtgtgggatactttgcttgatgatttactggaggaaatggtgtttgacttgtggctttaagattgttttgttgccatccgatggaaactgatagagtttatagttcggcacttcggcaggattttattcaccaaaaaccatagtacaaaaagctttgaaaaagtgagtgtgacagatttaaacagagtgtatacagcgcagtagagttaggcttgcctgactgtttgcatcatactataaatcttgactatatgtggctcctaacactaggaatttttcttcttattaatgcttcttctatcatttctgttctctgtacaggtgtgaaagtaggaagaataagttcagttgtatatgtactgcctaattatagttttttttttcctcatgaaagtaaaacaatttcccttgtttatc

SEQ ID NO: 15570 - DNA, 703 bp, Oryza sativa
  ref <308>: DATABASE ACCESSION NUMBER: AK066089
  ref <309>: DATABASE ENTRY DATE: 2001-12-06
gacaggctagacacttgctagctagctcgatcggtcactggccacttcacatcttcttgctcgctcgctcgatcgattgcttacaaggtttcatggccactaacaatccggtcagtctcaaagcagaggagcagaaatgctatggcggcggcggcggccgggtcattcaggcaatcacgatgctcgtggcgacggcggtcacggcgcaggcggcgtaccgggctcgccgggagccatgggacctcgccttcgtgctcttcgcctacgccgacctgggcctcctcttcctgtgcctctcgatgtacgagcgcctgccgcctccgctggaagaaatacagaagggggacagcggcgacgacggtgcggcggtgaggcggcggctcaagatggccgtgtgggcgctgtcgacggcgctgagcgtcgccttcgcgtggcgcgtggcggcggtcatgccggcgccggcgatgagggccgccgtctggggcatgacgtcgacggtggcggtcgccggtttctacctactgttcgtctacaggcctgtgaccatttcctcctactccgaaatggatacctgcaaacacaagcagtcgtcgcccaagctcgaccagatggtataacgaacaatgtggagaagaggagcttaatgtttaatcttgtaatcaatataaatttgatagcaataataagtgaattccccattcac

SEQ ID NO: 15571 - DNA, 1329 bp, Oryza sativa
  ref <308>: DATABASE ACCESSION NUMBER: AK066090
  ref <309>: DATABASE ENTRY DATE: 2001-12-06
gctcctcccccacccaaacccacggcggcagattcgatctcgaattctcgaactctctcgatcgaaccctgtgccctctgctccccgcaaaatcctccgcatttgatgagtagtcctatcactcttcttcctccccgcgcaaatcctcgccgccacttggatgccagggagctccacctcgccgccgaccaccaccaccacccttctctcctccgctccccgctggagagggtcaagatcttactgcagaccagaactcatgggtttcaatcccttggtatcctccaatcattgaggaagctgtggcagtatgagggaattcgaggcttctacaaggggaatggcgccagtgtgcttcggattgttccatatgcggcattgcattacatgacttatgagcagtatcggtgctggatattgaataattttgctccatcagtgggtacagggcctgtggttgatctattggctggctcagccgcaggtgggactgcagttctatgtacctacccattagaccttgctaggacaaagctggcatatcaggtttcaaatgtgggccaacctggcaatgctttgggaaatgctggtagacagccagcatatggtggtatcaaggacgttttcaaaactgtttacaaggaaggaggcgcacgagctttataccgtggagtaggcccaactctgatcggtatcctaccatatgctggactaaaattctatatatatgaagacctgaaatcgcgagttccagaggattacaagagatctgttgtattgaaactctcttgtggtgctttagctggtctttttgggcaaaccctcacttatccactggatgttgtccgaagacagatgcaggttcagaataagcagccccataatgcgaacgatgccttccgtataagagggacatttcagggtctagcactcattattaggtgccaggggtggaggcaactcttcgctggcctaagccttaactatgtgaaggtcgtcccttcggttgctattggtttcacaacatatgacatgatgaagaatttgctgagagtgccaccccgagagagactttatcaatcgtctggtaacgcatgaaacggcactggcctaattgtatcaggacaaagtgaattcaataaactccacccggtggcgttgtattttcaatcataaattctatcgctatgttgcataggagggagataagtcgtaattaactgtttgatttgtaaataatgatagtcatttgagttactgtagacttggataagcttgtgtattgaatgtgctacctgtattatacaatttgatcaaatattgcaactg

SEQ ID NO: 15572 - DNA, 1010 bp, Oryza sativa
  ref <308>: DATABASE ACCESSION NUMBER: AK066091
  ref <309>: DATABASE ENTRY DATE: 2001-12-06
gactcgccaagcctctcgcaaccttagctacagtcctacagaaacaaaaggagagcgcgatcaaggaacgggcgttgcgcgacatcggcgcgggtcggcgcagatgggcaactgccaggcggcggaggtggcgacggtggtcatccagcacccgggcggcggccgcacggagcgcgcgtactgggcgatgtccgcgggcgccgtcatggcggccaacccgggacactacgtcgccgccgtgatcacctcgcctcccgccgccggcgcctcctcggccacccccgccgccgcgcccgtcaagcacctcaagctgctccgccccgacgacacgctcctgctcggccgcgtctaccgcctcgtcagcttcgaagaggtgctgagagagttcgcgtcgaagcggcatgtcaagctaagccgtgccacgatcaaggccaaggatgacgtggaggaggagacgaatcccgccaagcctcgccgccggcgaggcagcggcggcatcgcgccagaggaggagtactccagccggtcactcgcaaaggtcatgcgccagagtgacgagccggagcccgtggcgagggcgagcccgtccgccgcgccgaagccggagagcgacattgatgaccacgccgacggcgaggcggccgagccggactgcgacctggaggcgctgctgccgccgcacggggtggtgttcggccggcgagtcgcccggcaatggagaccggcgctgcagagcattgcggaagggtgaggccgacccactggctcaggctggccgacggcgagccggctgcaagacttcgtcgtcgactcgtcgtttccgagcacacagcgtagtactgcagttgtagaaagtgaagtagtgacaagtctcactggacgtgtagcgtgacaagtcatgtagaataaagctacgagtaccttgtggatatatccagctgatgcatgtacgtatactatggattgatgatgggtgtaacgtgacggatcgtatactccatttagtttgc

SEQ ID NO: 15573 - DNA, 1252 bp, Oryza sativa
  ref <308>: DATABASE ACCESSION NUMBER: AK066092
  ref <309>: DATABASE ENTRY DATE: 2001-12-06
ggctcagccccagtacttgagcctctcttccttccccttcctcttcccatcgcgatacctcctccttcccgtcgaaccctctccagtctccactccactgaatcctcccacctcggctcgaaggaatggcaagcggtagtgaagctgagaagtcacctgaggttgtgctggagtggcctaagaaggacaagaagaggcttctacatgctgtttaccgtgttggagatttggatcgcaccattaaatgttacacagaatgctttggaatgaaattactgaggaaaagagatgtgcctgaagagaaatatacgaatgcatttcttgggtttggacctgaggacaccaactttgcacttgaattgacatacaattatggtgttgataagtacgacattggagcaggatttgggcatttcgctattgcaactgaggacgtgtacaaattggctgagaaaattaaatccagttgttgctgcaagatcactcgtgaacctggtcctgtcaagggaggatccactgtgattgcctttgcacaggatcctgacggttacatgtttgagcttatccagaggggtccaacacctgagcctctttgccaagttatgcttcgtgtgggtgaccttgatcgctccatcaagttctacgagaaggcccttggtatgaagctgctgaggaagaaggatgtacctgactataagtataccattgccatgttgggctatgctgatgaggataagacaactgttattgagttgacatacaactatggtgtcacagaatataccaagggcaacgcatatgctcaggttgctattggcactgaagatgtctacaagagtgctgaggctgttgagttggttacaaaagaactagggggaaagattttgcggcagccaggtccactaccagggctcaacacaaagattgcctctttccttgaccctgatggctggaaagtggttttggttgataacgccgacttcctgaaggaactccagtgaagatgagagatggcccaagttctgtgctaggaggcaaagcacaaaccttatgtagtaatgccagtgcaatgtaataaagaagcggtttccgctctatgaacaagaataaattctggcacatgcgttgtgcttatgctagtactgtctgggtttggctgtaaatccgctatgcattgctacctgtatcagcatgactgttggagtgttgttgataacaaggaccagtttgtgcagttgagctgagtttcctg

SEQ ID NO: 15574 - DNA, 1612 bp, Oryza sativa
  ref <308>: DATABASE ACCESSION NUMBER: AK066093
  ref <309>: DATABASE ENTRY DATE: 2001-12-06
gagatcggagttgcggcagcggcggcggcgatggcgatccggaacttctggtcgatggccgcggcggccgtcgggttccggctcgttctcgtgctcttcggcggggacctccacctcgcctcccgccccgaggtctccacccccctcacctccatccgccgcctggcggaagggtactggctgaagcaggcttccatgtcgccctactccggttcaatgtatcatggttcccctttgcttctattggttcttggtccattgactaacaaaaggtctgttggacatcatgatcatatatattgcagtttgatttttgtggccgtagattttatagctgccatgcttatccgagcaactggtcgtagactccaaatagcacgcaacagaaacttgaagtcacttgagctcacagaggcagtgagtaattcagttaacgtaagtgcaggagatattgcttccctcatatatttgtggaacccctgggcaatagttacttgtgtgggttcatgtacttcacctatcgagaatttaatggttgtgataatgatatatggagcctgttcacgtcttgctcctcttgctgcctttggatatgttatggctacacatctctctctttatcctgcaattctcattgtaccgatcattcttttattgggatatggtccagatgctcctccaacaaaagtatttcgtataaaaagctcaagtgccagtaaaactgacgtatcagacaatgataaaagttctagctcaagagatgttcaacaattcttgtggaaaccagttttccacttcatattgtggatgcttttctggacattttatgtgttgctattgagcagcatagttctaaataaagtgggtggtcttcaggagatgtttgaaaagacatatggttttatccttaccgttaaggacctatcgccaaatattggtgtattatggtacttctttgctgaagtctttgactttttcagaagcttcttccttatagtcttcaatatgaacattgtttttatggtattaccattggcaatccgtctgaagcatcgtccatgcttccttgccttcatttacacagcaattgtcgcaatattgaaatcgtatccatcggtcggagattcagctctttatcttggtcttttgggcctatttgctaatgaattagcagagatgcaattcactttcttcttgttttttggatatatcggagtctctctccttagccctgtcatgcacaacctgtggatctggagggggactggcaatgcaaatttctactttgccactggtttggcttacacttgccttcagaccgtgttggttgtagagagtgtaagttcaatgataaagcatgacaggaagctaagattacttgttacagcttgatttcattctctctaagttcaacaactctgacgctttagtgtttttgcttgttctcccggatacaagcgtgtttttttgggcagagtttggagtatatgtagtttattatttttgtagtatatgtattgttacgattgttatttgtaccgcccgtgtttgtaaaatatggaccacaaatcatgtaacccagtagactactagaaagacaccaggtttcccc

SEQ ID NO: 15575 - DNA, 1183 bp, Oryza sativa
  ref <308>: DATABASE ACCESSION NUMBER: AK066094
  ref <309>: DATABASE ENTRY DATE: 2001-12-06
gatctccccatccgccattgttgtgttctcatcctcttcttccatctctctctctgtgcgtgctctccgacgtctctcctctccctctcgcgtgcttggtcgctgtaggagggggttcaattgatttgaggtagccatggctgaggcactgtgcagcggcagcgtcgcgtccccgtgcggggaggtgggtgtggggttcgccgccggccttgtgaggggcgccgcggcggcggcggcgctcgcggagtctgtgccgattggtgggtacagcagcaagagcacgttcccgagtgggagggtggcgctcacggagaggaaggcgaggcccctgccacggaatctcgaagcggcgcatgggcagatgaacctgacgattgggaaggccatgaggtggtgggagaagtgcctgcagcccaacatgagggagatcgagtcggcgcaagacctcgccgactccctcctcaacgccggcgacaagctcgtcgtcgtcgacttcttctccccgggctgcggtggctgccgcgccctacaccccaagattgctcaactagccgagaagaacccggaggtgctgttcttgcaagtgaactacgagaagcacaagtcaatgtgctacagcctccatgttcatgttctgccattcttcaggttctacaggggagctcagggccgtgtcagcagcttcagctgcacaaacgcaactatcaagaagttcaaggatgcacttgccaagcatggtccggacaggtgtggcctcggcccggcgaaggggctcgaggagtcggagctcatggcgttggccataaacagggacctgaacttcacctacacaccaaaccaagaccttgtcccaattgcagacgccctcctgaaggaagctgctgcacctggaggtccatggctgccattgcccgcaacggcgacgcagctgttcattcagggatctgagaattcgctgttgtcatctggaagatagccggtggttcgacggcaagattggcttcaatttgtacatatttttccgcttgttctagcctgatgttatgacatgctgatgcgcaggctcatgatttttgtttatgagcctgctgagtgctggaggcatgaaattccttgcctgacggacctgtatgcgtgatgcacgtctgcatcgaaaattgaacatgctagattcattcatgat

SEQ ID NO: 15576 - DNA, 1858 bp, Oryza sativa
  ref <308>: DATABASE ACCESSION NUMBER: AK066095
  ref <309>: DATABASE ENTRY DATE: 2001-12-06
gaggtgccgtatgtggggagcgagatccagcagcagaccatgtcgctgatttaccttggtgtgccggaggagaacatcctgcagacacatatggaagggatacatcgttactgcggctcggacgcgaaggttgatagcctcgcttcacagtatgtccagaagcttgggatgatcatcaagaggtctacgcatgagctggatcttgatgaccaggctagcatcagaatgtgggttgataggaacaagaagtctgtgttctactaccaggattcgacggatacagatgcatttgttctagggatccagacagagtggcaactgcagcagatgattcgctttggtcatcaggatcttttggcttctcattcctcgtttggtgttagcaagctgaagtatccattgcacacactccttgtctttgactcaagacaacatgctctacctgttgcgtggattataacccgatcagttaccaagcaagacactttgagatggatgaaagcacttactgagagaatatattctgttgattccacctggagaatcggtggatttgtaattgatgacccagcttcagagctggatccaatcagggatgtattctcttgcccaattttgttttctttatggcacattaggagaacctggcttaaaaatataatcaagaaatgcagcaacagtgaggtacagcgggaaatgtttatgcaactaggaaaagttatgtacagtatctggagtgagaaaaatcccatggatgctcttgagcaattatttcaagacttcgttgaccaaaccaccttcatacaatatttcaagtccttttgggttcccaaattggagatgtggattgacaccatcagaagtcttccactagcaagtcaggaatcatcaggcactattgaaggttaccatctaaagctcaaggttaaagcatatgatgactcacagcttgatgctctccagcgtgtggactggttggtgcataagctcacaacagagctccattcgagttactggctcaatctgtatgcggatgaaagcggttcatttcctgaggtgaaagcagagtacattgcgtccacttcatggcatagagcgctgcagatacctgacgatgctgttatatttgatgacaaggaaccattttcagcaaaggtgacaagccagaaggatactagtcagatgtggactgtctggaatcctgggtctgagttttctctttgtgattgttcgtggtcaatgcagggcaacctatgtaagcacatcataaaggttaacatgatgtgtggaccacgcaaggatttccagccctcgctctcatttcaatcgtttcagcgtgtcctacttgatctgtggcaaaaacccatggatgattcattctcactcgatctgtcagtagcatgggttatgcaaatgcaggagaggatccagaaggtgactgagcttgctaccgctgacggcattgcggaagtatctaacagattgccgattcaatggacaaacaagaaagggaggaaagtagctgcaaagcgcaccagccctttacgtgttcttcctcactccaatggtattgtgcaaaaggatttcacacccaagaagaacagaaagagaaagaggttgtcaacagtctcgggttaacagtactccaattgttcttgtccagagagttatttttctctctgtgtaattagatggctaaccgtcttttgtttgttttctgtctcaactagttacttttggtataggcattggttactaggatgatcacctcacgtttctgaaaccaattcttctgttgtttagttggatataattattcaggcagcataagaaatacatcgaatcagtctctctggtc

SEQ ID NO: 15577 - DNA, 1820 bp, Oryza sativa
  ref <308>: DATABASE ACCESSION NUMBER: AK066096
  ref <309>: DATABASE ENTRY DATE: 2001-12-06
ggtggtgtggtgcggtgcgagccggacgcaggcgtcgcctcgcctcgtcgcgcgcgcggctgtagagagagaagcctcgtagacaccctagcctcctccaccggccttgccctcctcgcgcgcacggcctcctccaccggccttggcctcctcgcgcgcacggcgggcggggcgtgcaggtttgggggagtagcgacggcgacgcgcccgacctccgtccacctgcctccatatcggttcgggctgcagcatgtatgaggaagacaacattcagggagaattgttactcgttcaggcagaacttgatgacatccaagggcaaattagtgcactgattgatcgtcaagaggagctgtatgagcgtgaatcacagctgaaagctatgctcgaagtatctaaagcatccaacaacacaatcaataataccccttcagttggtccaaaagattggtctgggagcttcttatgggactctcgggctgatgatgttcgttttaatgtatttgggatttcttcataccggcagaatcaaagagagataatcaatgccatcatgagtggaagagatgtactggtcataatggctgctggtggagggaagagcctctgctatcaactacctgctgtacttcatgatggaattacattggttgttagtcctttgctttcccttatccaggaccaggtcatgggactagcagctttaggtatacaagcatacatgctggcttcaactaccaataaggaagtcgagaagttcgtctacaaggcgcttgataaaggtgaaggagaactgaagatattgtatgtgacacctgaaaagatatccaaaagtaaaaggttcatgtctaagcttgagaaatgccaccatgcagggcgtctttctctcattgcaatagatgaggcacactgctgtagtcaatggggccatgattttcgcccagactacaagaatcttggcattttaaaggtccagtttcccagtgttcctatgatagctttaactgcaactgcgacaaataaagtgcaaattgatttgatagagatgcttcatatccctagatgtgtcaagtttgtcagcacaattaacaggcccaaccttttctataaagtatttgagaaatcaccagttggaaaggtcgtcattgatgagattgcaaactttataagtgaatcgtacccgaataatgaatctgggattgtttactgcttttctaggaaggaatgtgaacaggtcgcaaaagaactgtctgaaaggggtattttagcagattattatcatgcagatatggatgttatttctcgtgagaaagttcatatgcgctggagcaaaagcaaattgcaggtcattgttggaacagtggcgtttggaatgggaatcaacaagccagatgtcaggtttgtgattcaccacagccttagtaaatctatggaaacatactaccaggaaagtggaagggcagggagagatggactaccttcagaatgtattctgtattatcgacctggtgatgttccacgccaaagttcaatggtcttctatgaaaactgtggcctgcaaaatctttatgacatagtacgatattgtcagtctaagaggagctgtcgtcgtggtgctttcttccggcattttggagaggctgcacaagattgcaatggaatgtgtgacaactgcacttctagtcttgagctcaaggagatagacgctacccgtatgatgattttacatcagcttggaaattttactgttgcactgaattacatacttgatacttgcatgttctttagtttatatttttacaaaatggtatttttgggag

SEQ ID NO: 15578 - DNA, 2181 bp, Oryza sativa
  ref <308>: DATABASE ACCESSION NUMBER: AK066097
  ref <309>: DATABASE ENTRY DATE: 2001-12-06
gccctctctcggttctcgcggtggtggccacgggcgcaggtgaggggatggtggacggcaggatggccggcacggcggcggcgctgggcctgtcggtggtgtcgtcggtgtcgatcgtcgtctgcaacaaggcgctcatgagcacactcggcttcgtgttcgctactacgctgacaagctggcatctcctggtgacattttgttcccttcatgtggctcttcagatgaagcttttcgagaacaaagatttagaccccaagacaatcattggatttggaatactaaatggcatatctattgggttgcttaatctgagccttggattcaactctattggcttttatcaggtaaccaagctggcaataattccatgcactgtatctttggagactatattgttcaggaaaacattcagccggagaatccaaatggcactggcagttcttttgtttggtgtaggtgttgcaacagtgacagacctgcaactgaatagactgggatcgctgctgtctctatttgctgtactcaccacgtgcatttcacaaattgtatcctctaaacaaagtatacattcaatattattttctttgcactaaaataatgacacttgattctttgtttttaatagatcaataatcagacatatgcattatagaaaaaatggcttttggtgttagctcatatcaaatatatattaatttaccagataaatagtttcttatatctattttgatatgcattctcttgcacctaaagtggatgataacttttaacatactctgaaactctgatagtttctacgacctccgtcccaaaatatggcaacttttggctatgatgtatccagattcatagctaaaaatgcttacattttgggacggagggagtaggtgtttctcaaatttaagtagctgatctgatacacgttgttttttttctctccatttttttgtatcagctataaatatgtggatccaacgtagtatattgatttaacatcatatccttcttctgctatcactatttccttccccatacagcttaaccaattttgctagatgacaaactttatccagaagaaattcaaagtctcttcaactcaactgctctaccaatcttgtccataccaagcgctgactcttttcatcattggtccatttcttgatggttttcttactaaccagaatgtatttgccttcaagtacacgagtgaaatccttgtgagcattccctggctcgatgttccctttcttatttgtcttctatccattatacagtaatatatctgtttgttatctttttgtcaggtattcatcgttctttcctgtctaatatctgtctcggtaaacttcagtacatttcttgtgatcgggaaaacatctcctgtaacataccaagtagtaggccacttaaaaacctgtatcatcctcggttttggatatgttttatttaacgacccatttagttggagggacatattagggattcttcttgccttgttaggaatgatcctgtattctttcttttgcttgatggagaataaacagaaggccccggaattgtcagctccatttttccacactaaggtatcagatagcacttcttttctgaagccttaatgctacatttgcgacttgcagctatttttttcatatctcgtccttgcaactttagctgacccgttattttctttcactaacttactttttcgtgaatgtgcaaaaggattacacgtcaatatattagaactttcactaacttactataattccttgcttctcacccatcggtaatcgcccttgcttatcaacctggcaggtgaaaggaggtgaagcagggactcttctcctagtacagaacgggtcagctaaagttgcagatggtgttgtgactgagggcccaatgtggaggtcaaacagagacttggacgcatgatcatcccgctcctgcagaagggatcaagggactgacatatggtctgaaaccggtgtaattttcatcggcattttgctccagttcactccagctagctagttctgaaggctccttgctctgcgtcttgtacatacatattcggcacctatttttgctacgactgtacataacatgtccacggctggaattaaacaaacatttgcattcatactattatatgaagatttcatgtctgttatttacccg

SEQ ID NO: 15579 - DNA, 1356 bp, Oryza sativa
  ref <308>: DATABASE ACCESSION NUMBER: AK066098
  ref <309>: DATABASE ENTRY DATE: 2001-12-06
gaaaaggtgggcattagaatacacaccttgcagggacacatgcagagtcatcaggatgaaaagctagtccatggtgataagaaaagcagcttgcttgcaccagacctgatcaccccaaagcaagaacaagaagaacacctcctcaccaatcagtcagtactcagtacaagtgaagcaatctcagcaagaacagcatagttacatatatatatttagatagatagccatctcatttcatataataagcccaagtccagtgcagtgaacacaagaagctcttgttctgaagattcagaaagagcaagaacttgttgatttcaatcaagaaatcagagatatgtatccttacagattcagcaacgtgatgatcggatacctgaacctggcgacgctgctggcgtcgatcccggtgatcggggcggggctgtggatggcgaaggggtcgacggcgacgtgctcgtcgatgctgcagacgccgctgctggtgatcggcttcgtcgtcctcctcgtctccctcgccggcttcgtgggcgcctgcttccacgtggcgtgggcgctgtggctctacctcctcgccatgatgctcctcatcgccttcctcctcggcctcaccgccttcggcttcgccgtcaccgccggcggcggcggcacccaggtccccggccgcccctaccgcgagtaccacacctccgactactcgtcctggctgcagaagcacatccaggacgccaaatactggcgccccgcgctcgcatgcgtcgttggatccaaggcttgccccaagatcgccaattggtcacccatggattacctccagcatgatctcaccccaatccagatgattaattgtattgtatccataatagtcggggtgctgcaagccgccgacggcgtgcgcgtacagcggcggggtggccgtcggagcgcaggacgaggactgcttccggtggaacaacgcggcggggatactgtgctacgggtgcgagtcgtgcagggccggggtgatggagaaggtgagggaggattggcacaagatctcggtgctcaacgtcatggtgctggtggtgctcatctgcatctgcgcctgcggctgctgcgccttcaggaacgcccgccgctccgtctccgagtacccttacggggtaaaccgcatgcacaagatccacccccgatgggactactactggtggcgatggtggcgtgataggagagaacagctctactaggctagctatttgtattctacccttgtatgatattttgatcttgcccaagaaaattaaaatagttgagagttgattcgttcctcaatattgtactctgaacatctgaaagtcttcaactctctgggttttc

SEQ ID NO: 15580 - DNA, 1052 bp, Oryza sativa
  ref <308>: DATABASE ACCESSION NUMBER: AK098949
  ref <309>: DATABASE ENTRY DATE: 2002-08-28
gaccaacaagcaagaagaaatttctctccttgtagaaacaagcctagagagtactatggagcagaggaaatttttgttgtgcctaattcttggcttacttgcgacttcaggacctgccaagaccgtcaatgctgactcgccctttgatttttattatctcatcctcatgtggcctggagcatactgcactgacagcgagtatggttgttgcgtgcccaagtatggttacccgtcagaagatttcttcgtcaagagcttcatgacctttgactcgtcagagaacacagctgttgtcaggtgcaactccgacaatcctttcgacattaacaagctagactcaatcgagaacaacctgaaccactactggagcaacatcaagtgtcctcgcaccgacggcgtgaactcatggaagagcgagtggaacagctatggcgtctgctccggcctcaaggagttggactacttcaaggccggtctccagctcagaaagaacgcagatgttctctctgctctcgctgaacaaggcatcaagccggactaccaactgtacaacacggcgttcatcaagtgggcagtgaaccagaagctgggtgtgacaccaggagtgcagtgcagggacgggccatttgggaagaagcagttgtacgagatctacctctgcgtcgacaaggacgccaagagcttcatcgactgccctgtcctgcccaacctcagctgccctgccgaggtgctcttccatccgttccacacctggatgctcaacaccacatcggctgccaacatcgtgatgcccactgaaactgtgctggcctaattaagagcctttaatttgctagctaagctgccatgatctacttgatcaacctgtcctaagagcatgtagcatatgcttagcttgttgctttgggtgaataatcgcgcaacttttatacattgttgtgccctctgaataatatgtgcagtactatatatgaagtattgtaccgcatatgttatgtattacatgtgcaggtcttgtgcacacctgtgaggtgaatggatatattatgaat

SEQ ID NO: 15581 - DNA, 2049 bp, Oryza sativa
  ref <308>: DATABASE ACCESSION NUMBER: AK066099
  ref <309>: DATABASE ENTRY DATE: 2001-12-06
gaaacgccatctccaccgtcgcctcgcctcgcctccacctccacctccactaccaccaccgtctccggcgatggaggccgccgaccccaggtgattcggcggccggtctcctccccgccaccgccgccgccgccgccaatggcgtgcctcgcgccgcacttcaagtgggcgccctgcccccacgcgcaccaccaccactctacttcttctttaccgtcgtcgtcgtcttcgtccacctcggccccttcctcgtcgtcgaggtgctccttctcccgcgggggccccttccgcgtccactgcgcggtcaccgccaccacctccgccgcggcgcccgtcgtcgtagaagctcccggcggggggatgcggctcgcgtacgccgccgccccggactcctccgcgccggctctccagaaaaaaattcaatcggccctggcatcagaagtatttctaaatgaagaggctgttgtaacagctgctgcagcagaggcagttgcccttgctagagcagctgctgaagctgcacaggaagttgttcgtatggtacaaaataataaaaatgaacgtaacaccagaccaaaaaaagctgtggtcaactacttggcaaatgaaatacttcgcacggaaatgaaaccaaacattcttgataaatatagtgatggcattttgtcagaggagatagagtcttatggcatcttgagtgatgaagctgaactagacggtgatacacaggacatccctagtatagctgtgaagtctgctcgtcaaactgagggaagagctcggagaacgagggcagcaataaaggctgctaccatagtccgtacttccccaaaacctgcaacgtcctcaaagaagaagcggtcaaagggcgcctcttctggcacaaatccattaggttccttgtggaagatgacgggtcgcagacttcttacagcaaaggaagaggttgagttctcggaaggtattcaggacctcttaaagctagaagcaatccaagctgagcttgcagagtacaatggtggccagccaaccttcgctcagtgggctacagcagctggagttgatgagagaactttgcggaagcgtttagatcatggtatttattgcaagaatagaatggttacatccaatgtgcgacttgtaatatctattgccagagagtttgaaggtccaggaatggaactttatgatcttatccaggtcttcattacaggaagggatgcagggccttataaggggtgctgaaaaatttgatgcatcaaagggttttaggttctcgacatattctcactggtggatcaaacaagcaatgcgtaaatctgtctcagagcaatcacagatatttcgcttgccggctcacatggttgaagcaagctatcgtgtgaaggagtgcattaaacgtcttcgtcgaaagcttaaaagacgacccactaacgaagaaatagctgcagacactggtatgccgatcaaacgagtcgaggcagcagtgaaccttccaaaatattctgtatcccttgatagcaaaattggtagcacagacatgacttaccaggaagtcacagctgatccaaccgccgagacagccgaggagatgctgaacagattgtctatgaaacgggacgtacacaaggcactggacactcttaccacccgtgagaggcaagtggtgacacttaggtttgggctcgaagatggtaggataagaaccctgcaggagattggcaacaccatgggtgtgagcagggagaggatccggcaaatagagtcagccgcatttcggaaactgaggagcaagaagagggtgaatgcactgaaggattatctggtaccagtaggcaattggtgacacttttgtcgacatacaacattttcctttcaaaatccttttctttttctctcctttttgaggatcctttacttgtattttttttaccttggatcttcatgtacaacacgttgtcagaatagtgtagctcgtccccgacgaaggaatcaacagattttgcagagctattcatttataccgtcatctacagaaattgaaatacc

SEQ ID NO: 15582 - DNA, 1071 bp, Oryza sativa
  ref <308>: DATABASE ACCESSION NUMBER: AK066100
  ref <309>: DATABASE ENTRY DATE: 2001-12-06
ggtgtcaccaacccgcgcgcgccatggaaaccgccgcctcggcgtccacctcaacgccggagggggattccggccaacatgccgccgccgctccgccgcgcatgaccaccgtatccaagcactacttcggcggcgcctcatcggcccacaaccacgacctccgggtggacatcatcgagaatatagaagaggattacgggatgtttgtctggccatgcagtgtcattctagcagagtacgtgtggcagcagaggtcacgcttcactgcctccacagttgtcgagcttggtgccggaacctcactaccagggttagtagctgcaaaggttggagcagacgtcacactgacagacatcgcacataatacagaggtcctgaacaacatcagacaagtatgcggtctcaataatgtcaactgcactgtattaggacttacctggggagaatgggatgaacctacatttgacttgcatcctgatgttattcttggagccgatgtgctttacgactcagcaaagtttgatgatctcttcgcgacagtctcatttctcttggaaaattccccgggggcgatgttcataaccacatatcacaatcgcagtggtcatcatttgattgaatttttaatggtgaagtggggtttgaagtgtttaaagcttcgggatggcttctccttccttccgtcatgcaaggctgcttcactacgagggaacattcagcttgttgagattgcacttgacaaggaaaaaccgaactgctcttcagctgacgagaacaatctgtagcagttatgttccatgcggttcagccttatgggggctgaaggcaagaacatggcacaactttggggcatcctccgcacacaggttaacttttataacactaggtgatttccaggagcaacatcatgtaaaattgcccgtacaaaatattctcaagtttaaccatggattgtatttgttggacaagcttgttaaacgaagattcaccaaaccaatagttatgacagaatattacacatctctacacgggatgttccaacagaacttaatcgaacatgttttccttagc

SEQ ID NO: 15583 - DNA, 1978 bp, Oryza sativa
  ref <308>: DATABASE ACCESSION NUMBER: AK066101
  ref <309>: DATABASE ENTRY DATE: 2001-12-06
gtcgcggcgatcaaaaaaacccaacccctcctctcctcgccgccgccgcccatggccagcgaccgccgctactactacttcgaagaagacgatggcgatggcgaggaggaggtggagtggctggcgatggaggccgacgaggacgacgtcggcctgctcgaggaggacgaccttcacctgcggcttcccgacgaccgccccgcggattgctgggccatcacacaagagtcacttcctgctgcccagcaacaagacctgtctatggtaatgaacttgctcaacataaagcagcaccttgcacgcacactccttatccaccaccggtggaagatgcattgcatttatgatcaccttgacagaaaggggcgggaccgcatgctcagtgaggcatgcattattttgccgaagaatagcatgtcagcagctagctcaacaagtgttacctgcaatgtgtgttttgaggacttctcaatgactgatgtctcgaccatggactgtgggcattgcttctgcaatgactgttggacagagcacttctttgcatccattaatactggcaacaagcagattcggtgcatggaggttaagtgcaaggccatttgtgatgaggacattgtgcgccgcctcctcagtctgaagtaccctgctgcatctaagcgcttcgatctcctcctacttgagtcttaccttgaggacaatgactcagtgaagtggtgccccagtgccccacactgtggccgcgcaatccaggtaggcaccggcgagaggtactgcgaggtcgcttgcccctgtggtgtcagcttctgcttcaactgtgcagggcaggtgcactcgccttgcccatgtgccatatgggagaagtggaaagctaagggccatggagactcggatagcgtcaagtggattcttgccaacaccaagagctgccccaagtgctccaagcccatcgagaagaacggtggctgcaaccttgtccattgcaagtgcggccagtgtctatgctggctctgtggtgggcctaccgggagggagcacacttgggatagcatctccggccacagctgcaaccgctacaaggaggaaaacggcgacaaggtggacaccagcagacagcagatgcagcggtacacgcactactgggaccgttacaacatccacgccggctcgtacaaggtggagcagaaggatcttgggcctgccgtcgaggagcaggtgaagaagctggagtcgaacctaacaggtccgaagatgaactgggacggtagctggctcgccatggcgtaccaatccctgctcgcatcgcggcaggtgctgtcgcggtcgtacgccttcgcctactacatgtttggcggcggcgaggtgaagacgcgcccgtcggagcgggcgagcctcgccgtggcgcagaacctcttcgaggaccggcaggagcagctggagcgccacgttgagcatctctccaaggagctcgccacggacttgctggggctgccggaggaggagatcgtcctgaagaaggtggagattgccaacctcgccaagatcgtccaggcaatctgcgggcagttgtacaggtgcatccaggacgaactcctgccactgctcgtccagcccatgaacattgccgcgtaccagccggacggccctgacaaggccaaggagttcatcggggcttgacatacagacaaggctagcttccagtttggcagctgccgctaacctcactgtgcttatcaggtaagttatatatatatatgtgtgtgtgtgtgtgtgtgtgtgtgtgtgtgtgtgtgtgtgtgtgtgtcagtatgtagatttgacttacttacgcctgagcgaaggacgtaatgttcattcgaaattaaagtgctatacttgccttattttttggttgttggggcgtattttggtttcaaaatagtattctaagcattgaccattcttctcataagatagataattctttttttttccgtgaggc

SEQ ID NO: 15584 - DNA, 1778 bp, Oryza sativa
  ref <308>: DATABASE ACCESSION NUMBER: AK066102
  ref <309>: DATABASE ENTRY DATE: 2001-12-06
gaccggaagccaatccctgtttggtgttttacccccaattttgtcagattttttggagcgaaaccacgagctgtttgaagtgttcggcttcggaatctctttcttggagttctaggaatggggttttgatacaaagattgaagcctttttgttagcgttggtgcaaagattgtattgtattgttttttttttctgcgatgggtggaggcgtcacggagcggctcccggagggcagcagcgagccgctgctcccgacgaagcgggagggcggcggcggcggcggcgagttcgccggcgcggtgttcaacctgtcgacgaccatcgtcggggccggaatcatggcgctgccggccacgatgaaggtgctggggctcgccccggggctcgtcgcgatcttgctcgccgcgctcctcaccgacgcctccatcgagctgctcgtccggtccagccgcgccgccggcgcgccgtcgtacggcgccgtcatgggggacgcgttcgggtggtgggggaggcggctgctccaggtctgcgtcgtcgtcaacaacatcggcgtcatgatcgtctacatgatcatcatcggtgatgtgctatctggaacctcctctggtggtgagcaccattatggtgttttagaaggatggtttgggccacaatggtggaacgggcgtttctttgtcctcctggttacaactcttgttgtatttactccactggcatgtttgaagcgtgtcgattcactgagttacacatctgccatatccgttgctctggcagttgtttttgttattattactgcaggaattgctattgtcaagttgataaagggacaaattccaatgcctaagttgtttcctgatgttcccgacttggcatctatttgggaacttttcacagcagtgccagttcttgtcactgcttatgtttgccattataatgtccacccaattcataacgagctgaaggacccttctcagattaagccaatagtacacacatcattggttctatgctcaactgtctatatcacaacaagtttctttggatatctcctctttggtgaatctacgctgtctgatgtgctcgccaacttcgactccaatcttggtattccatacagtcagatgctaaatgatgctgttagagtgagctatgctgttcaccttatgcttgtgttccccatgatattccatgcactacggcttaatttggatgggcttctcttttcctcatcaagtcctctgtcttccgacaaccgaagattttctgtaatgacagcggtacttctcctagttattttcctatcagcgaatttcattccgagcatctgggatgccttccaatttactggtgcaactgctgctgtgtgtatcgccttcatttttccagccgcgatcactctaagggatccacacagtatagcaaagaagtgggacaaaatcctgtccatcttcatgattgttcttgcaattgtatcaaacgtagtagctgtgtatagcgatgcatattcaatgttccacaggaaaagttccccttccatagcctgatattccaaaatcctattggcgagtcagtggattctttatctgaaagatggcttgtacattagctagcaaataaaatcattatttaggcaagtatttacgggatttattttacggtttatttggcaaacaacccttgactcaattatgttgagttggatgtatctataggatgggtgtgtaaactttggtccgaagtgttttagtccaatgtacaattcaagatcaatttgaatc

SEQ ID NO: 15585 - DNA, 1159 bp, Oryza sativa
  ref <308>: DATABASE ACCESSION NUMBER: AK066103
  ref <309>: DATABASE ENTRY DATE: 2001-12-06
gacttactcacttcctcctccttctagtaaagggaggagcaggtacacgggggttgagatctgaggagggaggagaggaggttcgtgatgatggagagccaggcgctgcaggaccccgtcgccgagccccatggagctgagcctgccgccgccggagctcctcccgccgtggttcccggcaaggagttcacccgcacctgcaagggcctcgtcgtcgtcctcgtcggcggatatgtgctgctccagctcctcccctcctccctcgactacctcgccatcatccccgccaagactattccatttgtatggactgtcttcacagctggctacatcgaacaagttcttccaggggctatcggcagttcccttggtcttctcttctgtgggaaggatatcgaaccagtgtggggccgcaaagaattcttgaagtttatcatcttggtcaactccatctgcggtgtccttgcattctgctttgctgttgcactctactatgtcactggaaaggagagcttccttgttacaccactttctggtttccatggtgcccttgctggctttcttgttggcctgaaacaacttttaccaaaccttgagctccccatgtgctttttctggaaaataaaggctaagtggatgccattcttcgtgctatgcttctcaactatcatggccttcattgtacctgattccattaacttccttccaactctgctatcggggatgtatgtcagctggatttacctgagatacttccagaggaacccactgacagggcttaagggtgattcaagtgatgacttctccttccccagcttgttcccggatgccatgcggccagtcacagaccctgttgctaacctctttgatcggatgctgtgtgcaaggtctagaccttctgaactggccctcccagtctcagatcctgcaaaggcatcgagaagaagggagcgtggcgaaagggttcttgaggaaaggttggctgcagaccatgcagcagacacggaagccccagctctgggccattccacagcagaagattaatatagctcgtccactgtcaacacaccatactgcgataggagccacggccacctgcctatgtgctttgtaacaccgaaaatttgtgttctggagaatgcaattcagtttacaatgg

SEQ ID NO: 15586 - DNA, 1611 bp, Oryza sativa
  ref <308>: DATABASE ACCESSION NUMBER: AK066104
  ref <309>: DATABASE ENTRY DATE: 2001-12-06
gaaccaaccaaccagccccgcctcgagccaagcaaaaccctagcaaaggggaggggcagcgccggcgggggcgacggggcgtgggggcgacggtgggccatggacgcgatccggaagcagctcgaccagctcatgggcgccaaccgcaacggcgacgtgcgggaggtcagccgcaagtactacgaccgcgacgtctgccgcctcttcctcgccggcctctgcccccacgacctgttccagctcaccaagatggacatggggccatgcccgaagatgcactcgctgcagctgcgcaaggaatatgaagaagcgaaagccaaaggtatggacaattatgaccgtgaattggaagaaactatagaaagactaatatcggagtgtgaaaggaagattcagagagcccttaaacgtctagaggaggacgatgccaaggcagctatagcaatttccatcactgaagtcacacagagtaaagaagtgattgagttctccaaacaaatcaaggagaagatgaaggagattgatgcttttgatcttgagggaaacactgagggcaaaattcgggctactgaagaggttgacaagctcaaggaacagagggctgaagagcaggcaaagcatctacttgaagcttttaataaggaccgtgtctcactaatgacttcactccaaactgctaatcaatcaattccaccaccacctgttgctgctgctccagatgcacgcacacaagaaatgattgatgaaaaactcaaaaaggcagaagaactaggtgagaatggaatgatcgatgaagctcagaaacttttggatgaagcagaagctctaaagaagcttggtgctcggccacagcctgttccggactctgcaaagatgtcaactcacgttcagattactgatcaaaagttgcgcctgtgtgacatatgtggagcattcttgagcgtatatgacagtgaccggcgtttggcagatcattttggagggaaacttcatatgggttatatgctgatacgtgagaagttatccgaactgcaggaagagaaaaacaaaaggcgcaagatagaccgagctgagcatgagagaaggtccagggacaggagcctggaacgtgacagagcatctagcaaggatcgccatagaggagatcgaggcagcagccgtgatagggacagggattatgaccgcaggagaagccatgatcgataccatgacagagaaagtaggtcggacaaggacagagaatcagggagatcccatagttatgattcaaggggctaccgaaggtcacgctcccctagggaccgttccagagactatgatcgatacgggcgtgacgaccgtcggcatcgacgctagacacatggtcgagggttttagcatgaaccggatcgtttggtgtttcaattcagaggttcatgtgggaaagatgcttatttcctgagtatatccatttgcactaccaccaatgaacatggaactgatgtaatagctacgtgaagttaggattctagttgatgctgatcatgtacaaccaaaattgtgttaaagagttgtggtatgtctcagatcatccaaatttaaatttgaagatatcctctcctcttgaaaccc

SEQ ID NO: 15587 - DNA, 442 bp, Oryza sativa
  ref <308>: DATABASE ACCESSION NUMBER: AK066105
  ref <309>: DATABASE ENTRY DATE: 2001-12-06
gaccatagcagttactccagaggagaatgaagccatacttcgtcttgaagcaatgggctttgaccgcgcgcttgttctggacgtgttcttcgcttgcaacaaggacgagcagctggcggcaaactatctcctagatcacatgaacgagttcgacgacgaggggccaccataagacacgcggatggaatacttgtcaagctcaaacctggtatcattggagcaaagggtttgtgacccgtagtccgtagagcaaaaggcttagtaaaacctttttattttattttatttttttgtggattcgtctccttctgttccttcttttctttcattagtctgtaattcttttcagtttggcttttactttcttgcgtacatactctagattaccttttttacagacttgataacggaggtataaaaaggttcagagcccgtctgcatt

SEQ ID NO: 15588 - DNA, 4119 bp, Oryza sativa
  ref <308>: DATABASE ACCESSION NUMBER: AK066106
  ref <309>: DATABASE ENTRY DATE: 2001-12-06
gagtgatctttgaatgcacagcgagcaaatcccgctcgccggatgccgccgccgccgcctcactctcctcccctcccgccgcacctcctccgccacctcgacggccgcgcgctctccacccccctcctcgacccgctcatccgcgcggcctccgcctccgcctccgcgccgcaccacgccttctccctcttcctcctcctgctccgctccgcgctgcgcccttcccacctcaccttccccttcctcgcccgcgccgccgcgcgcctcgccaccccgcgcctcgcgcgcgcggtccacgcgcagccgctccgcagggggctcctcccccacgatctccacgtctccaactccctcgtccacatgtacgccgcctgcgcgctcccgggactcgcccgccgcctgttcgacgaaatcccccgcccgaaccacgtctcctggaacgccctcctcgacggctacgccaagtgccgcgacctccccgccgcgcgccgggtgttcgcgcggatgccccagcgggacgtggtgtcgtggagcgccatgatcgacgggtgcgtcaagtgcggggagcaccgggaggctcttgcggtgttcgagatgatggaggccaccgcggcgcgccatgatggggtcagggcgaacgatgtcaccatggtcagcgtgctgggggcttgcgcgcacctgggggaccttgtgcgggggaggaagatgcatcggtacctggaggagcacgggttcccgctgaacatccggcttgcgacctcccttgttgacatgtacgcgaaatgtggggcaatcgttgaggcgcttgaggttttccaggctgtgccggtggagaatactgatgttctgatatggaacgccgtgattggcggtctggcggtgcatgggatgagcagggagtcactgcagatgttccagaagatggagcatgctggggttgtgccggatgagatcacataccttagtctgttaagcgcttgtgtgcatggtggtttggtggacgaggcttggagcttctttcgctcgcttgaagctcaggggctgagaccacatgtcgagcactatgcttgcctggtagatgtgcttggtcgagcaggccgcttagaggaagcatatggtgttgttaagagtatgccaatgaagccgagtgtttctgtgcttggtgctctcttgaatgcctgtcatctccatggatgggtggagctgggggaggcagtcggcaggcagcttgtccatttgcagccagaccacgatggccggtacattggtctgtcgaatatctacgctgttgctaggcggtggcaagaggcaaaaaaagcgagaaaggtgatggaggagagaggcgtgaaaaaggttcctggatttagtgagattgatgttggcagagggatctgcagattcattgcccaagataagactcacccgggctcagcagagatttatgccttgctgaaacttattgcaatggatatgaaaatgaaggatgatgtcactgttccagattatacctgtatgtactgctaataagatggttgcacctgtagatttctctctacaaaaattcagagatgcaatttgaatagtgcaagagtatttgttgctctcagttctggctgcgtacactgaatttatgttgttttgaggaagttaactaccagacaggacaaatggatatttcaagtatgtggagttgtggactattagcagaagatgggcctaaactataagaaccataccagagatctgatatgtcactcatacaatacaaatatagttggatcctggatccactgattgtttgcacgatgctaaggtcaagcccttttcgtttcttctcatcacgcgtcagctctcttgacttgctgatgaggggatgctccggcgttccgaggtcagtgctatcgacgatcttctgcaccatctccagcacctcgctcatctttggccggtgcctggcgtggcgcacgaggcacttgtttgccaccgaggcgagcttggccgccgacttcaagctgtaactcccttcaagccttggatccattatgatttcaagcttctttgagtcagtggagtagggcttcacccactctatgaggttctgttcgcctctcggcctgttcctgtccagaggtcgccgaccggtaaggagttcgtagagcaccacgccgtagctccatatgtcgttcttgctgctgaggcgccctgtgtggatgtactctggagctgcatacccaatagttcccaccacctgttaaaagaggatttccagaagagacattagcaaacctacctagctgttcaaactatgaagacattgctagtggattgcagaatgttagaaaaacgtgtgatcatcactgatcaaatgtttggaattggagaacagccagaaagctactaagttgatgttaaccaatcagcaaaaaaaaggcacctgccctttctgaccggtccttgtgcactagcacacagactaaccgaaagtgcctatccatgtcctgtgttgggttggttttttcctatcactgtgttgtgtcaatttgttgtttttgcgggccactaactggttgatcagatcaagatgacaaaatggttctatgttggaacagtaacaggctaacagccattgtgtttgctgcttgtcttcaggaaaggaagaactacacccaaggtgttctaccacggattgtctaccgagcaacatcgaatgtttaacctctgaaatcagtcatatcattcaaaatgcctgcattttgcagttgagaacaggtgccctaaggaactctaaatgctgggcaaaaaaatgataggttttcttgtcacgtaccgcagtggagacatggctgccatcctgagataccagtctagccaatccgaagtctgacagcttcgcgttccagttctcgtcgatcagaatgttggaaggcttcagatcacgaaatattatctggaagatcatcgcatcgcatcgcatcgcatcaatgcagattcttcatggagatacttcaagccgcgcgcggtgtcgagcgccaccctgagccgcatcgcccacgacgccggcctcggcgacctcgacgacaggtgatctgccaggctcccgttgggcatgaactcgtagacgagcagcagctgcatccccctctcgtcgtcctcggcgcagtacccgatgagcttcaccaggcctttgcggccgagctgcttgatggcgacctcgacgctccggcgaggctcgaggacgctgcggatggtgccgcggtagacgcagccgaagccgccctcgccgagcaccagcgagcggctgaacccgcgggtggcgctcttgagctcctggaaggtgaagatgcggaggttgttgctcgcgcgctgcggcagcgacagctgccggtaccggccgaacgactcggcgctgatctccgacgacacgttcagggagcactccgaccccgaccgccgcgcgtcgcggtccgtcgacgtgcttctgttggaccgcgccgacagcgaacgcgtcgtcgccgccgccgccgaggccaccgccgacgaccggccacgccgctcatccctctcccagccggcgaacccgaagcactgcatcgccttcgacatgctccccggagaagacgacgacgacacctctcctgctctgcaccaacgtcgcgggcgccggaagaaaggcatcaactttctcatccaatgaacacttgccaaggaggtcctctttttgttgagtgggtgacagatctaagaaagataatattcttacaaggctaggagagctaccacaccaactataattaattaggttcagcagcaatcagtggagactaccaatttttttttaattactggtaacttacctagttgatgcatgactgaatggattggatcccagatgacacagtactcgccacaggagaaaaacttgagctatgatctggcttggttatcgcaagttgcggcaggtaacaacaacgattatgaccgctaataatcaaccagcaaagtcaaaactgctatctgttccatcttttcacctttgctttcaatgactttcccctcgtgtttttgtgttcatctctgctgacattctctttgacactggaaatttttggcattcctgcc

SEQ ID NO: 15589 - DNA, 1977 bp, Oryza sativa
  ref <308>: DATABASE ACCESSION NUMBER: AK066107
  ref <309>: DATABASE ENTRY DATE: 2001-12-06
gggggggctatggccgtcgggagccgtgaggctggtggcacactcgaccaatccccatcctgcgcggcggcggccgaggaggggaagctgtcggcgagttcacggcggcgaaatccgtcgctagagggaggggactgagcaggtggtcgaatcaggggagctctgcgagaaaatcaggaagaaggtcataccggctcaatcagacggcgagctctccgtccttcgccgccgccgtcgtcgtctccggctggctgtcatgttgcataccaaaattggaaatagcagccggtctcttacatcatatttgcaccccctcgccacgccacgccacgcgcgagcgccgccgccgcgactgatcacggctcggctagctctctctatctcgctgactaattaatcctctctccttctcctggttaactacaactctgaccaactaactcgcccgccatggcagaacaaccactaggaggaggcggcggcggcggcggcgatggcaacaacaatgggaagtggaaggggaaggagaaggtggtgcccgagtacggcaagaaccggcacggcatgcctgtcggctgctacttcgtccccaaggacctggagctcttcgccatcctcaggtgcaagctcgtccgcagccagctccccggcgccctcaacaacgtcttcgagcatatcaggatcctcgaattccaccctgccctcctccatgcttgaggaccttgccgtgtaccgcttgtacaagatcaaaaggaaggaggacgaagaaccggtgaacgctgccgccgcggcgtcgagcacggacgagccctccacgtcgtcggcactgtcacctcctacgccaccgcggccattgccggacatggccggaccatcatcagcaacgccgctactgccactgcaattgccggacatgaccggaccgtcgtcatcaacgccgctactgccactgcaattgctgggcttggccggatcgtcgtcggcgatgtcgctaccactgccactgcaattgccgggcctggccggatcgtcgtctgcgatgtcgctgcctgcacagcagatgccgggcatggccgggtcgtcgtcggcgatgccgctgccactatcattgccgggcctggctggagggatgatgtccatggcggaccaggcgaacatggcctcgacgtcgcaggcgtctacaccgtcgtcggagctcctgcaagactggtacgacgagttcgagatcacgtacggcgccgtggcgccgccgtctcctagcacgatcagctgggaggagccgcagagctcgccgacggggtggtggccgtcaccgaacggcgagcctgtgcagcacgacggctacctcgggatggcggcgaatccaacgtcgtacatgctggaacacccgttgcccaccgcggcgatcccgccggaaccgatgacgccgccgacgagctcaccggcgccaccaccagccgtcgacaaccaccaccggctctcgcctccgcatgacgccgccggcagcaactacaaccacccggagctcgccggctacaacggcggcgtccaggcgcagcacgagcatcagcatcaaccgcaggagccgcagccagcgttgcttgtggatggcgaggacggctacggcgccatagccgacggcgacggcgacacacagctgggcgtcgcggagcttgacaccgaacgaatagccgaaatggtaaaccatatcatggatggcgaattcgagttcaaattcgaggacaacaccgtccttaagtacaacgaagtctttccggacgacgacaaggtggtggcggcgccgatgatgatcgacggcggtggagacggcgatggcgcggatggaggtgatggaggcgacccattcgataattagggccctgtttcaaaaaccgctggaatttccattttccctggctataaattatttatctacaaattttactccatttttgtaagttaatgttcatatttact

SEQ ID NO: 15590 - DNA, 840 bp, Oryza sativa
  ref <308>: DATABASE ACCESSION NUMBER: AK066108
  ref <309>: DATABASE ENTRY DATE: 2001-12-06
gatttttcctcttcctctctactctcggtcttctctcatcgctcgcctgtatgtcctctccaccgctgcgcatctccacagccggcgacgccctccctctccgccgctccccctccccctccccccaccggcggcacccctccctctctgcccccttcctccttagccacggcccaaggcggcgagcagcgccctccttctgcaggcgacgccctccccccagccggcggcgccctttcctcagcgacatcattgtcttctccggcacagtggaggcaaccccttccgttagtgcctcggcgacaacatcctccttgcggcgcacggtggggcgctcgccaagccgccacgacctcggggcagcgggtgcttgcctctgatattgcacgtgcacccattagagttggagaagaccaacctcctccttcctgggaccttgtaccctctccaagagattgctcgtgaaccaactatagttggagaagaaattttctggggagcgaaataaaggaaatgcaatgtgttgctgactttgtggggaatgggaggaagtcctgatattttttttatatgtagggtaatacttatgatcttttcaagacattcttgaaagcaagcatgggtggctttctggtatggacatgcaggaagagcacttctattcagggtgaagacatccattggagcaagcattggtgttggatgtaattgttgccattgtgacatgtcaggtcttcaacaatgcctcaatgctgttctgattgtactcttttgatcaagccgatgtgcctatttgtgttttctattttcctttgaaatggacatatgctgcttttgatt

SEQ ID NO: 15591 - DNA, 2109 bp, Oryza sativa
  ref <308>: DATABASE ACCESSION NUMBER: AK066109
  ref <309>: DATABASE ENTRY DATE: 2001-12-06
gagatttgggtcctccctcctccgcctcctccgccgccgccccctgtatcccaccggctcgccggagagtccgcctcgccgccgcggcctcacgggcgcgtatccagcctcgcggagagcgtgcggaaccgcgacccgtactagggcagcgcgagagagaagctgctgcgcctgcgctgcaaaggtctacagttggagctcttgctgctgcttggaagacttcggacaagaacctaagatcatggcaagccttgctgattctttcttagcggatcttgatgaactttcagacaatgaagcctatcctgaggaagaaaatgctgaggcagtgggcacggaagagattggtgatgatgatatgcctgacctcgagtctcttaattatgatgaccttgatagtgtttcaaagcttcagaaaacacaacgttacaatgacattatgcaaaaagttgaaaatgcacttcagaaaggtacagatttttccaatcaaaggtcgatcctggaggaagatccagaataccagctgattgttgattgcaatgctctatcagtagatattgagaatgagatcattataatccataatttcatacgtgacaagtataggctgaagtttcctgaactagaatcccttgttcatcatccgatcgattatgctcgtgttgtccagaagattggaaatgagatggatttaacgcttgtagatctggaagggcttttaccttctgcaattataatggtaatttcagtgacagcatcaacgacaagtgggaagccgctttccgaggagaacttggtaaaaactattgaagcatgtgagagagcccttactcttgatgctgcaaagaagaaggtacttgaatttgtagagagcagaatgggttacattgcaccaaacctgtctgccattgttggcagcgctgttgcctcgaagttgatgggaactgctggtggtttgggagcacttgcaaaaatgcctgcttgtaacgttcagttacttggtgctaagaggaaaaatcttgctgggttttctactgccacatctcagtttcgtgttggctatcttgaacaaaccgatgtattccagagtaccccaccagctctgaggactcgtgcttgcagacttatagctgcaaagtcaactctagcagcaaggattgattcgatcagaggtgatccaacaggaaaagctgggcgtaacttgttagaagaaatccgtaagaagattgagaagtggcaagaaccgcctcctgcaaagcttccaaaaccacttcctgttccagactttgagcctaaaaagaagagagggggtcggcggcttcgaaaaatgaaagaaagatatgcacaaactgatatgatgaagcttgctaaccgaatgcagtttggtgtaccagaagagagctcattgggtgatggtttaggggaaggttatggcatgcttggacaggcaggaagtggaaagctacgcgtgtcaactgcaccaagcaaactttctgcaaaaattaccaagaaattcaaggagaagagctatggtagcagtggtgcaacatcggggctgacttctagtttggcgtttacaccagttcaggggatagagttgtcaaatccacaggcccacggcaacctgcttggaagtggaactcagagcacctatttttcagagaccgggacgttctcgaagatcaaaaggacctgagctgataagcaaaagtttcttcttcccatcagcccacagacccgtcataatcctcaggatgcaccgatgaatccattttgtaatgtactccaccttatacccgaattcagcagactttcgtggtgctgtttgcaatctctagaagttcgctaacttccatacggttcaagttaattcgacatgctgcgtttgatctgatgccgtctttgcgttcaacacaatttactgtttttggtaggtgattatcttatctgtcatctcatctttaaagtgtaatccctcttgtttcttacaaggtgctagttttgcgtctagaatttctgaaacaaagataagcatcagttggtgttcccaacttcccaatgttcccatcagtccgctatcaaggcagcgtacacgcaagtggattttac

SEQ ID NO: 15592 - DNA, 2890 bp, Oryza sativa
  ref <308>: DATABASE ACCESSION NUMBER: AK066110
  ref <309>: DATABASE ENTRY DATE: 2001-12-06
cgcaccaatctcaccacatcaatccacatggcgtcgcgtcgcacgctccccgattccccccacccaaattccttcctccgatcaccaccggaaccaaccaaacccaaatcgccaaaacaacatacgatcgcaactaggctgtgctgtggccaaaaaaaatctaaaaagcactcgtgcagcagcagagaatcagagagaaggaagaggaaaaaaaaaccgcagaaaaagaattcgtaaatgaatcatcgccgcggtcgtcgtcgccgtcatcatcatcatcatcatcctcgccacgaggggaacaggaagcgcaggagggatcaagcaggagctgtggattccgcttccgtgcacgggttcaatggtggagtgagctgaattggggagatgtgattttaccggttcagccatggctcaaatccaaagcagctcactggtgaactgcacgctgcttgcggtgctatgtgggaaggttacagacaaacagcagaagccacctggtctggtgcccgaggtgaagcgaccacggctttcatatccattcccagagctgatctcgtctgggagattggaggtgcatacgctgatcaatcccacagttgatcaattccggaaagcgcaacaggctgtgcagcccaacttgatgtacctccagggtcagcagcttgagaatgaggaagaaattggtacacttgtctggggcgatgctgatgtatctgatccacagatatttagttcactcattagtccaccttttccgaccatagtttatttggaagttcctgctggggaaaagcttgctcaatctcttcagttaaaggggattccatatgtattatattggagaaattcattttcatcgtatgcagcatctcattttcgccaagccttgatatcagttgttcagagctcctgcagccatacatgggatgcatttcagcttgcacaagcttcttttcgactgtactgtgcaagaaataatgatgcgcaaagtgttaagcttgggcctcgtttactaggggatgctccaaagataaatatcttccttcctgagaatgaaatggttgaggaagaaggtagctctgaacattttccagccataaagatatatgatgaagatgtgaacatgaagcttcttatttgtggagcaccatgcatcttggatgctagtttgttgggctcactggaggatggtttgaatgctctgctcaataatgaaattcgagggtgtagactccagaacagagtcagtgctgctcctccacctcttcatgctgaaactcttccacatggggtggttacaatgcgttgtgatatcacaacatgcagttcttcacacgtgtcattgcttgtttctggcagtccgcaaacatgttttgatgacaagcttttggagaaccatattaaaaaggaaattgttgagaagggccagttagttcgtgctgtcttagttagggaggacgacaaaccatcttcagttgagcctttgacttcgatatctgtggcttctggagcttctacttttgaagtctggatgaccctacctaagtgggcaggacaggttttgaaatatcttgctccggaaatctcttacaaaagcctggttccacttggaattgcttgtgtaaatggaactccagtttcttcgtttgatagacaagatgtggatcggcttcttttcttttgcaaaaatgaagctattgtaaatggtctatattctcatctgccaagatggtcagcatcccttgttaaggacagactgaagggaactccagagtcaaaatcaagtacttttagtgcaaatggagttggagagtaccagaaacatccaatgaaagggacttccctagtagtcagaccaaagctgaaatctgcaaaaatgaggcctattccacactcttcgaagcggcagatgcacccttttatgggtatccctccgtcctttattcatgatgctagtcaagttaagcctagcttgccagcacctccggtaaggcataatgcattacctgttgctccaacaactcaaagaaaattatcatctgggacatcacgtgttgaaccagctgttccgttaaatcctctgccaatgaagaaacatgggtgtgatcggttgcctattggaatttgctctgaagaagacttcttaaaagatgtcatgcaatttctacttcagagggggcacacccggcttgttcctcaaggaggactagccgaatttcctgatgcagtactaaatgcaaaacgccttgatttatataacttgtataaagaggtggtatccagaggcggattttatgtaggcaatggcataaattggaaaggtcaagtcttttcaaagatgagcaaccatactgttacaaacaaaatgacgggtgttggaaacacgttaaagagacattacgagacatacttgttggaatacgaactttcacatgatgatgtcggtggggaatgctgcttactctgccacagtagtgctccaggtgattgggttaactgtgggttgtgcggtgaatgggcgcactttgggtgtgatagacggcaagggttaggcacattcaaggactatgcgaagacagatgggttggaatatatctgcccccactgcagcctcgcgaactataagaagaagccaccgcctcccgagagtgctaatggcttcagaatagcatctgcacaacggaatatttaatttttgttactcttttttagcctactgtcccacttttgggtaagacagggctggtagatagcatgttttaaacaatgtagtgtttagctgtattatgtcattaacatcatttatttagtgaaaggttttatattgattgtaatcagtgaagtgacaactcagaaaggctctaattaattgctgggttcaatcgtg

SEQ ID NO: 15593 - DNA, 1549 bp, Oryza sativa
  ref <308>: DATABASE ACCESSION NUMBER: AK066111
  ref <309>: DATABASE ENTRY DATE: 2001-12-06
gattcctaaaacggagccgaggacgcgaggcgagagccgtatatccgcttacgtcacctcgctgcttggccttgtttcgccaagccgcccccagacccagacaagtcgcagccatggcgatcccccgcatctcgccgcgcaaaaccctgcccctcttcgccgccctggccctggccttggcctgggccttcgccgccccggcgttcgccgacggcgacgacgtcgtcgccctcacggagtccaccttcgagaaggaggtcggccaggaccgcggcgccctcgtcgagttctacgcgccctggtgtggtcactgcaagaagcttgcccctgagtatgaaaagcttggtgcaagtttcaagaaagccaaatctgtctttattgcaaaggttgattgcgatgagcacaagagtgtgtgcagcaagtatggagtttctgggtacccaacaattcaatggttccccaaaggatccctggagcccaaaaagtatgaaggacaacgcagtgcagaggcccttgctgaatttgttaacactgaaggaggcactaatgtaaagctggcaaccattccttcaagtgttgtagtgcttggcccagacaactttgactcaattgttcttgatgaaaacaaagacattcttgtggagttctatgcgccatggtgtggccactgcaagcatcttgctccgatatatgagaagctggcttctgtttataagttggacgatggagttgtaattgctaaccttgatgctgacaaacacaaagacttggccgaaaaatatggagtttctggctatcctacattgaagttcttcccaaagggaaacaaagctggtgaagattacgatggcggcagggagttggatgactttgtcaagttcattaatgagaagtgtggtaccagccgtgatactaagggccaacttacttcagaggcggggcgcatagcaagtttggatgccctcgcaaaggagttccttggtgctgccaatgacaagcggaaggaaatcctctccaatatggaagaggaggttgtgaagctcagtggttctgctgcaaagcatggaaaggtctacattgccattgcaaagaaaatcctggacaaaggtcacgactataccaagaaggaaacagagaggcttgaacgcatgttggagaagtccatcagcccatcaaaggccgatgaattcatcatcaagaagaacgtcctttcaaccttctcttcctaaggcgatgtcaaactccattcttatctttgggatataggtataagggaaaatgacagaaagattaggaatgtattcatgagaggccgttggcggtagaactaattttgtgggttttcccttaagcatacatgtatcctattgcctggtgcggatgttttaattctttgctcatggttacatggattcagtttgtagtaaaaaaataggggtttactgtcaggtggagagaaagatgttaaccttgatacatgttacgacattgaatttcagtctgataataaagtaccctcatgggtctgaatcgctcaaagctgaatgcc

SEQ ID NO: 15594 - DNA, 3312 bp, Oryza sativa
  ref <308>: DATABASE ACCESSION NUMBER: AK066112
  ref <309>: DATABASE ENTRY DATE: 2001-12-06
gagtagcagtagcagcggagggagcggcacacgatacgcgccgcgcggatcccctcccttccctcctcttcttcctccgccttcgccgccgccgccgccgccgccgattactcgcttccgcctccgcctcaaccccgttcgtccccaaccaaccaaccgcagtccaatccaagcgaatactaagctcacttgaattcggttggtgcctcgtcgtcattctgccaccacttgagagttccttcatacacacaccactcgcagtctcagcagcagcagcagcagcgcagtccgtagcaaagctgctgttatcttcctacatgcggatgcagcccagctagctaagctaggttagctgctgctgttggtcttggaggcaaactagtgtaatatgtgccgtaccgcctgcctttcttcatcaaccaaacccctgccaccactcaacccggccaacctcttcgagtcaggctgatgatgggaaccgctcatcacaaccaaaccgccggctctgccctcggagtcggagtcggagatgccaacgacgccgtgcctggggctgggggtgggggctacagcgacccggatggcggaccaatctccggtgtgcagcggccaccgcaggtctgctgggagcgcttcatccagaagaagactatcaaagtcttgctagttgatagcgatgactccaccaggcaggtggtcagtgccctgcttcgtcactgcatgtatgaagtcatccctgctgaaaatggccagcaagcatggacatatctagaagatatgcaaaacagcattgatcttgttttgacagaggttgttatgcctggtgtatctggaatttctctattgagtaggatcatgaaccacaatatttgcaagaatattccagtgattatgatgtcttcaaatgatgctatgggtacagtttttaagtgtttgtcaaagggcgctgttgacttcttagtcaagcccatacgtaagaatgaacttaagaacctatggcagcatgtgtggagacggtgccacagctccagtggcagtggaagtgaaagtggcattcagacacaaaagtgtgccaaatcaaaaagtggggatgaatccaataataacaatggcagcaatgacgatgatgacgacgatggtgtaatcatgggacttaatgcaagagatggcagtgataacggcagtggcactcaagcgcagagctcatggacaaagcgcgctgttgagattgacagtccacaggctatgtctccagatcaattagctgatccacctgatagcacttgtgcacaagtgatccacctgaagtcagatatatgcagcaatagatggttaccatgtacaagcaacaaaaattccaagaaacaaaaagaaactaatgatgacttcaaggggaaggacttggaaataggttctcctagaaatttaaacacagcttatcaatcctctccgaatgagagatccatcaaaccaacagatagacggaatgaatatccactgcaaaacaattcaaaggaggcagcgatggaaaatctggaggagtcaagtgttcgagctgctgacttaattggttcgatggccaaaaacatggatgcacaacaggcagcaagagccgcaaatgcccctaattgctcctccaaagtgccagaagggaaagataagaaccgtgataatattatgccatcacttgaattaagtttgaaaaggtcaagatcgactggggatggtgcaaacgcaatccaagaggaacaacggaatgttttgagacgatcagatctctcggcatttacgaggtaccatacacctgtggcttccaatcaaggtgggacaggattcatgggaagctgttcgctgcatgataatagctcagaggctatgaaaacggattctgcttacaacatgaagtcaaactcagatgctgcaccaataaaacaaggttctaatggtagtagcaataacaatgacatgggttccactacaaagaacgttgtgacaaagcctagtacaaataaggagagagtaatgtcaccctcagctgttaaggctaatggacacacatcagcatttcatcctgcacagcactggacgtctccagctaatacaacaggaaaagaaaagactgatgaagtggctaacaatgcagcaaagagggctcagcctggtgaagtacagagcaacctcgtacaacaccctcgcccaatacttcattatgttcatttcgatgtgtcacgtgagaatggtggatccggggcccctcaatgtggttcatccaatgtatttgatcctcctgtcgaaggtcatgctgccaactatggtgtcaatggaagcaactcaggcagtaacaatggaagcaatgggcagaatgggagtacgactgctgtagatgctgaacggccaaatatggagatcgctaatggcaccatcaacaaaagtggacctggaggtggcaatggaagtggaagcggcagtggcaatgacatgtatctgaaacgcttcactcaacgagagcatagagtggctgcagtgatcaagtttagacagaaaaggaaagagcgcaacttcggaaaaaaggtgcggtaccagagcagaaagaggctggccgagcagcggccaagggtccgcggacagttcgtgcggcaagctgtgcaagaccaacaacagcagggtggtgggcgcgaagcggcagcggacagatgacctacctacctacctacgcgatggctttggactccaaacagctaattaacagttagtagacaacagataatgattcttcttccttggccgatcgatcaacaacatcccatgcatccggcatcccaccaccattgattccatcatatttagagtctggaataaataaggaactcctatcctatttatcccctatctatatatgaagatatgataatggtgatctgcgttactactagtagaagaatatggtgtggctgactccacttcaggtggacctataatactactccagtagtatgtgcctgtggagtcaagctcgaacgtactactccatatttaagcatgtcatgtactgctactatgagacgagagtgctctgccctgtagggacagcactattgtcaatgtcatgtgtttgttgggtcactggtcttcttagatttgcgtccatgtctggcagcagcactccactgtagttggctcacgcatgttgttgaaatgagccacatgccttgccttgagatagaacttgctgtcactgtttctccttaatctaaatatactggagtggagtattttattatctatgatctgtaatcaggtgattgacaaggc

SEQ ID NO: 15595 - DNA, 1392 bp, Oryza sativa
  ref <308>: DATABASE ACCESSION NUMBER: AK066113
  ref <309>: DATABASE ENTRY DATE: 2001-12-06
gatcatcacatcatccactgctctgcttctcctcttcttttcttggcttgtgctctgttttaatttctttgcaatgatggggaggcagagctcgtcggcggcgaggagggtggtggtggtggtgtgcgcggcgatggtggtggcggcggcggcggcgcagaagtacaatgcggtgtacaacttcggggactcgatcacggacaccggcaacctgtgcaccaacggccgcgtcgtcgtcgacttcctcgcgagtaagttcgggctgccgttcctgccgccgtcgaagtcgacgagcgccgacttcaagaagggagcgaacatggcgatcaccggagccaccgccatggacgccaacttcttccgctccctcggcctctccgacaagatctggaacaacggccccatcagctttcaaatccagtggttccagcaaatctcctcctccgtctgcggccagaattgcaagagctacctggcgaactcgctgttcgtgttcggggagttcggcggcaacgactacaatgcgatgctgttcggagggtacagcgcggaccaggcgagcacgtacacgtcgcagatcgtggacaccatctccaacggcgtcgagaagctcatcgccatgggcgccgtcgacgtcgtcgtccccggcgtgctccccatcggctgcttccccatctacctcaccatctacggcacctcctccagctccgactacgacagcctcggctgcctcaagaagttcaacgacctctccaccaaccacaacaatcagctcaagaccaagatctccgcgctccaatccaagtacaagtccgcccgcatcatgtacgccgacttctactccggcgtctacgacatggtccgcaaccccggcaactacggatttagcacggtgttcgagacgtgctgcgggtcaggcggcggcaagttcaactacaacaacaacgcgaggtgtgggatgtcaggcgcatcagcgtgctccaacccggcgtcgcatcttagctgggacggcatccacctcaccgaggcagcttacaagcagatcactgacggctggctcaacggcccgtactgtagcccggccatcctccacagctaaggcaaaatgactggaaagaacgagccattagttaatttattactttattattaaggctggtgtttattaattaagcgggaattaattaaaggggaattgtttgggttcttgatttttatttgggtggcatatatggtgggtggtgtgacggtgaaatggtttacttgcgttgccaaaaaagcaaagaaagcgatggcatctgtagaataaatgttggttactgttgtaatttgataattgtttctcttccagaatcaaatgaatcatcaatggtattatactcagttattttt

SEQ ID NO: 15596 - DNA, 2875 bp, Oryza sativa
  ref <308>: DATABASE ACCESSION NUMBER: AK066114
  ref <309>: DATABASE ENTRY DATE: 2001-12-06
ggcttgccccttctccatcccctatctgaccatcagcgacggagcaacgatagtgctctgccatgggcgtacgacgacgacggggctggctacggctactgctccactacgcggagagccctatgaggaccaggggaggctgcgctcttggattggtgtctctcccacatcacgtcttgctttggggggagggagggggcatctttgcctccctcagctacttctcgctaaggttgcgggctccaattggcgtctctcccacacatcgcatctttgccttcgtcagctaatgctcgctaagaaatgacatggagccatccagattcgttcgcatctgcccgcggaagcgtccacatgatgggtcctccatatcatctgctgccaataagcacttagagctcacgggtggtgtgtcatgtgccatagatgagccgtcatcatcccacggtgccactgggttctcaatgctcacgggtagttcatcatgcactatagggagttgtggagctggccacattcagtcttctcgacccaacagagatcatttttgcccaatagtgccagcacgtgttgctcgagtgaaccgggaaaaaagacaggccgctaggaaaatgcgtcttattttgcgacaagaacatgtgccgcgttcactgtcgatgagattcacatattccataccaaaggagcacatgcaaattcttaaagatggattacactatgctaaggaatgtgacacaggaatcacaccattggcaagtccgagtgcgggtcacgcgcttctcgcagttcactacagcaaatgaacctgacaagattctgcgacttgatttagtcctgcttgatgagcagggtacatgatggatgcgcagatcccaggacgtcatgtttctcaattcaagcctttgctgaaggaggatgctgtgtattacatcaagtacttcgaagttgctgaggcgcgcccccagtacaggcctattgatcggatggtcatggcaaaattcactgcccacacaaccgttagagaagacactgaggcaccatccacattcccatctcatgcttacaaggttctttcttttgatgaactcagaggtcgtgcttacaggaaagatattctttcagatgctataggtataatgacagccattggaccagtgcaaactgtttcttgtggaggtgttatgaaagcggtgcttaatgtccacataaccaatggaagcgaaactgctgtcgttgcattgtggggtgcccatgctacacagttccacgctgaaaacttacagcagcaaccagaccatggacctgttgttatattgtttgttggattaactgttaaattccgagacgaccagctagccctacaaggtagcactgtttgtaggtggtatcccaatgcaccaatctaggaaacaatttctctcataagcagcctccatggtaacccacaggtggtaagggcaatagagccgaactttggtcagaaagaagctgtgcatgtaaaagtttttgatatctgtgaccttaatccccacgaagccttggtaatatagtgtacctccccacatctaatgattacattgcataatttccatccatgtgttatcagtgccatcctttacttcctctgtttctcgcatgtgaactagggcaacagctatattgtcaagatagccatcaaggatttagtccctgctgaagcctggtggtacatagcatgcaacaccagtaagagaggagcaggtagagaagggaacacatataaatgctcgaggtgcatcactaatgcaattgaaacaaggtacagagtggctatcataggtgtcgacccattagacgaaccatgacgccaaaacagctgagtttaccttctttggagaaattggctaccagttgattggcatcccttttcttaacctggttgcatctgtccaaggagcacgagatatagttccatcgcaatcaaagcagtttttggaaaacaatatgtcattagaactagtgtgtcacgtggctcattgcaaagaaatcggatatcttaccaagtggattcccttatgctagcctcactagatgcagcccacacaagtactctgcccagccatgatgcttctgtggcatcttctcaacatggctcatcaccagctgatgcaattgaaccgcacacgataattggctcttctctccaatctatgacaccttctacaccactggtgcttccagatccaaaggccacaactgatagccgtgatgatcagcatgggacaacaccgcctacttcagaggtcctggctatggcacaaccagacaaaaaacataaatcttctgtaattgatgaggatcttgctcaggaaggttcatctcctcgtgaacatgattgtcagaaagcatcagttgtgcgtgcgctgttcgtagacaaactgcccccgcagcccccaaaatgacttgagggctccatataatatcaccccaccaaagcggtcttttgcacctggcatgccaaggcgtatactcctgtccctgatcaagcaagactaatgctcacatattttgcccaatgtattttgcagtgggaatataaataggggatgtgttcttttgtgcaagccattagaccaaatgacattacttctacgtcttacaggcttgcgagccctagtggctagcagaacgataaatgaattcgtataaatagtatgtggtgtctgtacgatatgcacgttctaatcaaatatcgccagaacttatactcttataattggtgctatatctattcgctgcacactgtttcccaaagtcctcttatgtttgtgccggaaaaacacaatttcctactgtttcttatatatgcagcggctgtagtcaaccatgtgttacc

SEQ ID NO: 15597 - DNA, 714 bp, Oryza sativa
  ref <308>: DATABASE ACCESSION NUMBER: AK066115
  ref <309>: DATABASE ENTRY DATE: 2001-12-06
gaccgttcctccgccgcgccgtcattgccaccggcctctgccgcaagcgccgctcccgtcggccgaccacctccctcgtcgttgccatcggcctccgcgcaagcgccgttcccgccagccgaccacctccctcgctgctaccttcccatcgctgcatgcgccgcacccgccggccgaccgcctccctcgtcgctgccttcccatcgccacacagccgctcccgccggccgaccgtctccctcgccgccgccttcccatctccgccgcataggctccacagcgccttcgctggccgaccgcccccctcgccgccttcccttctccaccacgcgcggctccacaacgcctccgacgcgtgcgccgctcccgccggcagaccgcctccctcgctgccgccttcccttctccgccacgcgggctccacagcacctccgccaccgcacgggttcagccggcggagatgagaggagaagaagaagaagaagaagaacaagaagaagaagagagagagagagagagaggggggtggagaagaagggtgaaaaaactgacacgtgggacccacagttacagtggagaactgtaatagagaggctgttggagtgaaaggcagatttgactatccaaatttttgtcaaggtggctaaatgcatatttggagagtgagatttggagatgttgttggagatgctataagagtttgtaattttgctg

SEQ ID NO: 15598 - DNA, 779 bp, Oryza sativa
  ref <308>: DATABASE ACCESSION NUMBER: AK066116
  ref <309>: DATABASE ENTRY DATE: 2001-12-06
gattccttatcctcttgttcctcttcctccctccagatgcaccctcatactcactccccacaggcggcggcggcagctccgacgacggttctcgggcgacggcgcgcggtggctccagcagcggcttgtggcggcgacggtgacaaaacgcgagcgcacgtcggttctcaagcggcagcgcgcggcggcgacggtgacggaaggcaagtgcgcggtagcgcacggtccctctgcctccctcctctatccctcctcccttctctctccattgccgccagcctcccttctttctccaccgccgccagcctcccttcactctccattgctgagtggggaagggggcggcggcgcaaggaaggaggtgcggcagtggcgcggggaaggaagcggcggtggttctcgacaacgagatgcggatctggcgccggcgagcctcgggagagtggatccgccgccgcctgtcctcgggagaggcacggggggaggggccagtggcggcgctcggcggcaccggcgcgtgggaggggcggtggggagcagagccggcgccggcgagcggatccgctgccggccatccacgccctcccttgggagcaacgaatccatcctcacctcttaatctttgtgatgtaatatttttgtgctcgatctgtgatgcctcacctcttaatctttgtgatgtaaaatttttgtgctcgatctgtgatgtggaatttgtgttgtgatgtgaaatttttgtgtgaatttgtggatttaggatctgtgatggtattttttgg

SEQ ID NO: 15599 - DNA, 955 bp, Oryza sativa
  ref <308>: DATABASE ACCESSION NUMBER: AK066117
  ref <309>: DATABASE ENTRY DATE: 2001-12-06
gatacatgagttgcaaacctgagagccagaaagcttgaaccacttacatggtaggagatggagcaggcagacgagtcgtcggtgaacaaagagagctcagagcagcagcagcttaccagcgagcaagatgatgacggcgcgacatggctgagcctcactcttgccacacagggatcaccagaagaagcaacagccgaagcagaagaaacagaagcagcaaactgctcggagtctgaggctcccaagccttcttctgcaccacacaaggtgttctcatgtaacttctgcatgaggaagttcttcagctcgcaggctctgggcggccatcagaacgctcacaagcgagagcggagcgccgcaaaacgctcctaccatgcgcagaggatgatgatggggctgcctcttgaggcacatgctgcctttgtgcactccctgagagtaaaccagagctcagtgattcagaaggcaagccagcaagcacagatcaggacagcaccaaggtttcatgaaggcagcatcagctggccaccgattgcttatgaggaggtgccgaattcgacatggccagggagcttcagattgagatcacagccttcagaccaaccatcagaacagagtaagatagacttaaatctcaggctttgataggttgatgtacaactctgaccagtacataagtccctcctcaagcttgtccttctgaataaatgagtttgaagtaatcaataggttcagctcaccatcagatcaaaatcatatggtggtactgaacttcgaaggtattgttgttcatttggaattcttggcagaattattgaaaaaaaaattcagagacaagttactgcactaattttatagctagaaacttattagcatgatcatagttgattcaactgtgaagaaagacatgcattccgcagcaattcttacacgaagaatatatcccgtctttatc

SEQ ID NO: 15600 - DNA, 2968 bp, Oryza sativa
  ref <308>: DATABASE ACCESSION NUMBER: AK066118
  ref <309>: DATABASE ENTRY DATE: 2001-12-06
gcttcctcgccttcctcgagttgagctctcgctccgccgccggccgccgcctcgagctgggaggcggccatgggcgccgccggcctcccggcaccgggatgcctgcagaaatttggacatatcgttgatgccgaaagatttgtattaaacatgtccaaccgtggaatccataaggcactcagttttcagtgctttgcttctgatgggcgtggctttggagctggttctactaatagacggaaaattaaaagcaagaagaggcaaaaggatgttgcacaggaaccaagcaaggtaatatctggaggttccaagaacagggaccaatgggcactggacttagggactcgaagggaaagtaaatatgctaaaactgtcatggataagcaatttctagaaaaagtggaagctgttcgaagatctgcacttgagaaaaagaaagctgatgagaacaaaaattatcaagctattgattatgatgccccaattgaatcagataagagtacaattggttttggtacgagggttggaattggcatagctgtcatggtcttgctcctcctcctctttccccttcctctcgccgccccaaatcacccgcccaccaaaaccctcgccgcggcctccgccgcagcgggattccggccaccaccagcagccgccgcggccaccggggcgccctcctcctcctgccccccggcaccggcgaccgaccatccccttgccccctttccccgtcgggttgtgaggcgagatgagggagctgcgcgtcgccgtcctcatcatcgcggtctcgctgccgtccttctccgcgtccgaccgccaaggagatgccttatatgatatgaaacaaaaactgaatgttactggcaatcagctttcggattggaaccaaaatcaagtcaacccttgtacatggaattctgtaatttgtgacaataacaacaatgttattcaagtaacattggctgctcgtggatttgctggagttttgtcaccaagaattggagaactgaaatatttgactgtcctgtccttggctggtaataggatttccggtggcataccagagcaatttggtaatctttctagtttgacaagcttagatttagaagacaaccttttggtgggagaaataccagcttctcttggccagctttctaagctccagttgttgatacttagtgataataatttcaatggatcaattcctgacagtctagcaaaaatctcaagcttgactgacatccggctggcgtacaataatctgtctggtcagatacctggtccgttattccaagtagcacgttacaacttttctggtaatcacttaaattgtggaaccaacttcccccactcttgctcaaccaacatgtcctaccagagtggatcccatagctcaaaaattggcatagtacttggaacagttggaggagtaataggacttctcattgtagctgctctctttctgttctgtaaagggaggaggaaaagccatctgtgggaagtttttgtggatgtagcaggtgaggatgatcgacgaattgcatttggccagctcaagagatttgcatggcgagaactacaaatcgcgacggataatttcagtgaaagaaatgttctcgggcagggaggttttggtaaagtttacaaaggtgttcttccagatggtactaagattgctgtaaaacgattgactgattatgaaagtcctggtggtgaggccgccttcttgcgtgaggtggagctgattagtgttgcagttcaccgcaatcttctaaaattgattggcttctgcacaacacaaacagagcgcctcctggtatatccattcatgcagaatttgagtgttgcctaccgattgcgagattttaagcctggagaacctgtcttaaactggccagaaagaaaacgggtggccattggtacagcacgtggactagaatatctgcatgaacactgcaacccaaagatcatacaccgtgatgtcaaagcggcgaatgtcttgcttgatgaggactttgaacctgttgttggtgattttggactagcgaagctagtggatgtgcagaagacatctgtcactactcaagtccgtggaacaatgggtcacatagcacctgaatatctatccacagggaagtcatcagagagaactgatgtttttggctacgggatcatgcttcttgagcttgtgactggccagcgtgccattgacttctcacgcttggaggaagaggacgatgttctattgctcgatcatgtaaagaagctacaaagagaagggcagctaggatccattgtggaccgcaacctgaaccagaattatgacgacgaggaagttgagatgatgatacagatagcattgctgtgcacacagtcatcgcccgaggatcggccatccatgtcagaggcggttcggatgctagaaggcgaggggctggcggagcggtgggaggagtggcagcaggtggaggtgacaaggaggcaggagtacgagcggatgcagcggcggttcgactggggagaggactctgtctacaaccaggaagcaatagagttgtctggaggtagatgacaagggccgtgacaacagacatcaaacaaacggcgtaagccgaatctgtactttttctgtaatggatgtagcgttgttctttgtagagtagatagaattgtcctggaacaacagcgtaagcgatagctggtaaatgatacaatcggatggataatgatatgatagaaaaataaagttgtatgtgtttggttgggcatggctgaaccttagcagttgtgtgctccccatgcactgttatcaaatcggccgattagtcgtaaagtcggtcaaattagttgactaagagccatgactctgaccaaattagtcgtaaagtcggttgtaaattagtcgtgattattgtagcaaatcaccaattcaccgtgctaattggcttattgtgtttagtacttt

SEQ ID NO: 15601 - DNA, 1930 bp, Oryza sativa
  ref <308>: DATABASE ACCESSION NUMBER: AK066119
  ref <309>: DATABASE ENTRY DATE: 2001-12-06
gagaggctgtaggtagctagagaggaaaaatccacgctagctatgccttctccttcctcagctcattggctgagcttggtcggaagcgtctggctccagaccatcaacggcccgaacgccgacttcccggtgtactcgtcgcagctcaaggaggtgaagggcatctcccaggtgcagctcaacttcctcgccttcgcctccgacgccgggaagctcttcggctggttcgccggcgtcgccgccctgtacctgcccctgtggctcgtcgccgtcgtcggcgcgtcgttcgggcttgtcgggtatggcgtccagttcctcttcttggagaggcccgggctcgcgtactggcacctgttcctgctcacctccctcgccggcaacggcatctgctggatcaacacggtgtgctacctcctctgcatcaagaacttcccgtcggacagccgcgtcgcggtgagcctcgcgacgagctacctcggcctgagcgccaagctctacaccaccatggccgagaagatgccccggggcgccacggcgaggtactccaaggagaaggtgtacctcctcctcaatgccgtcgtgccgatgctcgtcaccctcgtggcggcgccgtcgctccgggtggtggagctcaccagccaccgccggaccgacccggcgttcctcgccatgttcgcgattaccctcgccaccggagcctgcgccgtcgtcggcagcatcggctccaagtccatcgggctctcgaccagcgagcacatgatcagcctctacatcctgctcgccctcccggtgctcatcccggcggcgctcaaggtgcgggagagcatggacaagctacgggaggcgaagcgggagaacagagtgcacgacgtcgccgccgccaccgacgtgccggagacggccgtgtcggtgctcgaggtggccgaggcggcggagaacaaggaggaggacgacgccgccgccggcgagagcggcggccaagacgaggtcggcggcatccggctgctgcggcggctcgacttctggctctacttcctgagctacatgttcagtggcacgctggggttggtcttcctcaacaacctggggcagatcgccgagtcccgcgggctcagcgacccgtccactctcgtctccctgtcgtcctccttcggattcttcggccgcctccttcccgccttcttggattactacaccgcaaagagtggctactcgctgtcaaggacggcgtccatggcggcgctgatggcgccgatggcgggggcgttcttcctgctgctggacccgagggacatgttcctgtacaccagcacggcggtggtcgggacctgcaccggcgccatcacgtcggtggcggtgtcggcgacgggggagctgttcgggaggaagaacttcggggtgaaccacaacgtgctcgtcgccaacatccccgtcggctcgctctgcttcggctacctcgccgcgttcctctaccagcgggaggcccgcggcgccagccgctgcgccggcgccgcctgctaccggggcaccttcctcgtctggggcgccacgtgcgccgtcgggacggcgctctgcaccgtgctgtacgcgaggtcgcgcggcttcgccgggaggctaccgccgccggcgaggtcgacgacgatgccatgcgccggccagcggccagcgactaacttaggagatgataacaagggaccagaaccagaagtttctagtacagcagtttaacaaattaattaggtgccacgtaattaattaagtggagaaaaaaatctacagctagtgatgtggagtaggatttgatgatttgcctttttttttcctctgggaaaaatattttgtttcattagtttctttttctaatctttttgagtaatcccatggtggattgagaagctcaacttgtgtgtacgtatatacgtatatggcc

SEQ ID NO: 15602 - DNA, 1853 bp, Oryza sativa
  ref <308>: DATABASE ACCESSION NUMBER: AK066120
  ref <309>: DATABASE ENTRY DATE: 2001-12-06
tattgggataaggcaacagcaaaggaacatttacttcttcctcccgagttcccccaaactccttccttcttccgatctcccaccgtcgcctgggcgcctggcggtttgctccactccataggcggccatcgtcttctcaaccagaaagcttctggctgtacagcttggcgggatacaagacgacggtctgccgtcggcgatccgcagtcgccggagctgaaggtggaagcggccaacacggcagtccgtgcagccgcttgagaattttttgtcatggcagtgaaaagatgcgcagaagtgccgatatctgctaggccgggaaagatgatgcggattgctattaagtcttggtcaaggttcttgcccccttacatccctgacgatgtgatcttcgacattctgttacggctgccatccaaatctcttatccgatttaagtccgtgtgtaaggcttggcacgccataatatccaacccctgtttcatcagtgctcacctcgagtgctctaagcagaagccatcgatatttatggtccctggtgtttacgagaagcagaataatggcgagaatacttccttcctgatgggcctctatcagtatcagggtggtaatataatggaacaaatccatgtacaagactttccacaaggcattggtacatggagtcgtccgatccactgcaatggcatgctcctcatttccaccatgaaccacgaaatgattgtctgcaacccatcaactagagagattgtctccctgccaaaagggagttataaccttcatgcgggcccaagggctggatttgggtttgaccctcacagcaacaagtataaggtggctagatttttctaccagagggacgatgacacatcagaattggtctgcaagtttgaagtgcttactctaggcactaatttgtggaggcaaactgaggatccgccatatccaattagtgggttaactcctgttcatgtgaaaggcgccatctactggatggttaatacgccactttgccctgatccacccaatgcatttcttaggttctgtttgactaacgagaagtttagtctgcttcagtatcctccatgtaatctaaagcctacccgtttcatagaagtggagggtgaactatgctgtgcttgcttttgcagtcaggtgagcgcgttgaagatctggacctgcaattatgcacagaaccctgaatggactcagcgctgcactgtacagattccacctgatatagttgtgaataatcctgtagcaaggcctcctatagtttttcttcatggaaaaaagctgctactgacatggaatcaggtctaccagtatgacattcaaacctgtagaatggaaaagatagcttcaggggttgaagacttcacgtgctatgatccaaggaacaataagtactgggcatatctggagaaagaagtaacggatatgcatctatttaattatgctgagagtctagttccgattagagaattttgagaagtcacttcattttttgttaagatgtggagccttgcatttcaggcccaaagagtcctcatgaccgtgtccctttgaaggaaatgaaatcagattggcatgcttgcctggacagcaatttcaagcaatatgcagttacacaaacacatcaaatcccagcgttataattggtgctggcctagtcgcaaagaaagcctgtgaattgggccttgaggtttgcatgttcgttcatatatgtaactagtgtattgtgtcgtgtgtttgtgcgactataacctccctctctgtaaatatgtataataattaacttaatttgttaataacatttaataatttaaattagtatttcctccttttataag

SEQ ID NO: 15603 - DNA, 3370 bp, Oryza sativa
  ref <308>: DATABASE ACCESSION NUMBER: AK066121
  ref <309>: DATABASE ENTRY DATE: 2001-12-06
gacactgcattgccttccacttggagagttgagttcagttgagagggagagagaaagagagaggaggatgccatggaggttggtgccatgtggtcgggggcagctgttcttggtggttcttggtcttcttcttcttcttcttggtgaggtccatcatggctcaggggctagaacagcttccctccctaggctcctcccagctgaagtgcgtactcttcgtcgtatcgcgcagaagatggggatcttgcgttggaacttctccgttgatccatgcaactccggcggtaacggtggctttgggggcactgtgaattgtgactgctccttctacaaccatacattctgccatgttactaacataacactggaagggcaaaacttcactggtgagctcccaccggacttcgccgaattccccaatctcctccaactagatctaagcagaagcttattgcatggtggagtgcctgaccagtgggcccgaatgaagctacagggactgtcattaatgggaaacaatttgtcagggccttttcccattgctcttacaaagatcacaaccctgactaacctgagtatagaaggaaacaatttttatggcccaatcccgtccgacattggacatctcatgcaaatggagaagttaatattatcggccaatgagttctccggaccccttcctgctgctcttgctaggttaacaaatttaaccgacctaaggatttctggtaacaatttttctggaagagtgcctgttttcttggggaagttgaaaaagctcggaaaattgcaaattgaaggatctttattggaagggcctattccctcagaattttccaaattgataaacctttatgatctgaggattagtgatctgagaggtagaggatcagttttcccggacttaagggaattggtgtccatgaaaacaatcatactacggaattgctccatcaatggaagcataccatcttacattgggaacatggataatcttaagcatctggatctgtcttttaataaactgactggagaaataccagcttcatttgctaacatgggacatgtagatcacatatacctaacaggaaattcactcactgggagtatacctgattggatattgaagagaaacaagattgcggacatatcttttaacaacttcacgatggggagttcaggtcctacccaatgcgttccagggagtgtcaatatggtggagagctattcacctgaaatgagcagtttgactaatgttgagtcatgcttaaagaggaattttccatgcggttcttctaatggaaaatacaggtattcattgaacataaattgtggtgacaaagaagtaactattaacggaacaaaatatgaaactgatgtggaaccaaaaggagcttcattgctgtaccaaagcccaggatcaaactgggcatttagcagcactgggaacttcatggataataatatcaatgatgatagctacattgcgacaagcgcatcaaaattgacggtgcccaactcggagttgtatgcaaaagcacgcctttcacctctttcactgacatattacgggctctgcatgcataacgggagttacaccgttaagcttcattttgctgaaattgttttcacaaatgacagcacatactgcagccttggcaaaagaagattcaatgtgtttatacagggaagaatggttctagaggactttgacattgaacagtcagctggaggagctgcgaaggcagttatcaagactttcacggcaaacgtcacaaatcatacactggaaattcatttctattgggcaggaagggggacaacaggcattccaaaaagaggatattatggtcctctgatatctgcaatatcagtagtaccaaactttgaagttcctttggctgttgaaccaccgcaaattggaggtagcaaaaagctttcaaggatatctaaagcattcctggttgccatgccaattttagcaatgtgcgcagcactttttgtcggcatttattggattaaatggaggagaaagaactcaatgcataaagatctcagagcctttgacctccaaactggatcctttaccttgagacaaatcaaagtggcaacaaggaattttgatgcggccaacaagatcggcgaaggtggttttggttcagtttacaaggtcagccatcatcactgactccatgcttaaactcggcagtctgataaggcaatggtctgttgtctgatggcaccattattgctgtcaaacagctatcatcaaggtctaaacaagggaatcgagaatttgtgaatgagataggcatgatatctgcactccagcacccaaaccttgtcaagctttatggctgttgtacagaaggaaaccagctcttgcttgtttatgaatacatggaaaacaactgcctagcgcgtgctcttttcgtcgaacaatacaggctgagcttggattggccgacgagacgtaagatttgcctgggaatagcaaggggtttagcatatctacatgaggagtctgcaataaggattgtgcacagagatatcaaggctagcaatatactgcttgacaaagacttgagtgccaagatctccgattttgggctagcaaagcttaacgatgatgatcacacacacataagtacaagaatagctgggactatcggatacatggctcctgagtatgcaatgcgtggttatttgacagacaaagctgatgtttacagttttggggttgttgctttggaaattgttagtggaaaaagtaacacaagctacaggccaaaggaagattttgtttatcttctcgattgggcttgtgttctacatgagcgaggaaatctcctggagctggtagatccagagttaggctccgattactcaacggaagaggcgctcctcatgctgaatgttgccctcctgtgcaccaatgcagcaccaacactgagaccaaagatgaccaaagttttgagcctgcttgaggggcacataccacttcaaccatttctgtcagacctcagccttgctgcaaacagcctgagctcaagcggtcagcgcaggaacttctggcaaacactaagtgatcagagccaaagcatgactgcagcacaagcatcatccagcaacaccaatgagtcatcatctttagatattgctggtagcctgagaccttaggtgagtttaaatgtcagaactcagaagtgtttcatgagctctgtacatgtaagaaccattaggagtaggtcattttgtctcttttagaagtacagtgtaaataccagactagtgtcagatcctactattaagatggacactctgcttaaatctttaggatagtgaattttatatatggccagggctttcc

SEQ ID NO: 15604 - DNA, 2623 bp, Oryza sativa
  ref <308>: DATABASE ACCESSION NUMBER: AK066122
  ref <309>: DATABASE ENTRY DATE: 2001-12-06
gttttccgtcctcttctcctccaaccgcccaccatctcatctctcgcacgcacgcacgcacccgccattgctgattgcacctccccccaaccccacctccccgatggacgccgtcgcgttcccgccgccgcccgccccgttcctcgacgacgacctcgatttcggcgacttcgccttcgccgatccccagcccgccgccgccgccgccttcgacgccttcggcgcctacgacgacgactggggtgacttcgtcgacagccgcctcggatcctgggagaagccgcggggcccgctccccctctccctgttcggcgccgacgaggacgaggaggaggaggagggaccggccgagctgccgccgacggctgcggatcagcggggagcgtcgcacgcgtcctccaatggatcgaagccggctgatctcaaggacctcatcgccggcctctatggatctcacccgcaaccctcctccaccgacgccgcggaggtgggtacacaggaggggtcagcggtagcggcggcggaggaggaggaggaggatggtgacggattcgaagatgatggctgggaattcaaggccgcggcgccttcttcttcgtcggatgctgtacaggatggcggcagacaagcccatggggatcttactcaggatgtaccaaagtcaatgagcagcgaccaggagggctggtcattatttactagtgttagcgaaaatttgaacaatgttcaaactacagatcatgttggaactcgtgagtccgctggacaaagtgtgaaggcctttagttattttccacccaataatgcagccatactcgacctgtacaaagaaagtgaaccgattgatgctgtccacattatgcaatgttcttcagaaagtgtgcaaagctcttctgatatgttctctaatactgaaatgaactcttcatttggaacagatgaaaaccattcaattaaatcagcaagtgataggattttgattgatttctaccataagctgagagaagaatcattgacggtaatatcccagtacaagaaggatcttaaggaaagccagaagaattctatgctttctgatgaaaagaatgaagtgatgacagaaactgaaagggagattcaggaaatttgcaaggaattacaagattcttcacttgcgaaaggtttttgcaaagatgaacatccttcaaaggatgtttgcatttctgagctgcttaacagtgccaaagaggatcatttgaaggattttgataaagaataccatttaacagaaataatagcaatggcactggaagacatgagttcagctgttaaactctataagcacagcgtgtcaatccttcgtaccttggaaatagcatccaaagaggagcaatgtgattatgtcagtgcatggtacagtatgcttctgtcctgtgcccaagaattgcagcatggtgcgatgatttggcaggaatcttgtcatgcaaatgttggcgaaacagtaatttctcaaggtgctcattactttattgctcttggggagatctacagagttgcacagatcttacatatatccatgctatctttcaagccttgggttcttgcagatcctggaatgttgagtaaaatgttggtttgttggaacagctgcgttaattcatggactagtggtttaggaatggctcttacaatggttgtcgacagcaagaacttacatgcacctgttgctaaagttcttctcgagtctatcatcaatattaatgacattgaggtgcccaatcttcaaagcttccttcccagtgacaagatggcatgtaaacttaccctcttgcccactagtcttgtacctggaatggaggtcatcatttgggatgccgatcactactttgttaaagttgcaaatctgtgggctaatcagatatcttctgaccctccccagttttcagtctctcgtgttgcttaaattagcaaggaaatcaacaattgtccatcaagcaacctgtcaatgacgtgggaacgggattgccccttttaagagaaaacttgactacttatgataggaccatcggaagctaaagattctcctgcacaactgcttctggaaggttaacagtattggtcaatgatcattcttttgtgcaagtagcattttgcaccattttttacgtagtgcttggcaacagcactagtatgggaagccaaaatgttcctttagctacacattctgtttagactggactgaagtacagcacattgaagtgtacaaactgcgaaatccaatgggtgcatgcaatgcagtaatagacgtgtatagattgtaagcttaaataatcggtatagaggagggagagatgaggctgtattgagctgattacaagctatataaatcagctgtttgttgtgaccttttcagcaacgtcaggtttgttcagacatcatagcccatttcagcaaatgagatctgcaaatgatgtggaatgtgtatgattctagctgaccccagttgctttgtaataagttagtaaacctggaagtcgccgaccacaacaggttatctgtttttgctgttttaacatagttattttctgtttaagttcttgtgtggaaaacatgcctgaatagcaaggaagattacattgcaacc

SEQ ID NO: 15605 - DNA, 2498 bp, Oryza sativa
  ref <308>: DATABASE ACCESSION NUMBER: AK066123
  ref <309>: DATABASE ENTRY DATE: 2001-12-06
gtagcgtctttgaggccatcggcagcgaaagcgacttggtcgagattataggtctggttgtagagcatgttgcgctgttcttcgtaccttgaaacaggcaacgtacattcatcagagttgcatagtggagtagtagcaaatactctactagtagtagaatagtgagtaagagtagagtagagtacatgcgcttgtgcttgagaagcctgatggcgcgggccttaatggcgtcctgggagggtccagggcgtgtcttcctgatctgctccttgtaacggccgagctcttcgtccagcttcttgatcttgtcgtccacgctctcccccctcttgttgatcttcaatcgcatacacatagagaggaaatgttcaaactaagagagatggcgtgcgagcaaatggcctagacgaggagaatactcgttcggtagcgtcctggatggatgggggcgggtccttgctcttcttggctccaaagatcttcttcatttccggcgcgtgtgtgcggcggcggcggcggcggcggcggcagcggcagcgaggagagagagtgttgggagtgagatgagatggagaaggggaatgggggacgggagtttgggctccatgctgaattctgctgtggattgggccagggaaggccctatccggcataccattaatcggatttgatttcattccctttctcctccttagtcatactccctcccttccatatttgacttattttttcttagttaattttttagcttgatcaaatttatagaaaaactaaacactatctatgacatcaaattatttttattaaatgtagcataaaatacattttgatagtatgtttgttttctgttaaaaatattgctattgtcaaagcaataagctcttctagtgggaaggcaaagtaccctcccttgagaattctgctagtgtgcaggttccgagctcgtactcggtttgcgtgtggggttggagacaagtggtttatacagatgccgctcgaaaacataatacacatactcatgtgatattgctatggataatgaactttacaaggagatgattgggttgttctaagtgagagaggatgaactcttcttcattgtctaagtgagagaggatgaacccttgttcattgtaatgtggctagaaactaacttgcttgagtccgatccctttctatgtggcacggatgctccttttatacgtcaaggggagtccgtagtcccatgcatgcataaaaaaaagggccccaacccataggggttgatatgcttggtcttattgctgtccctccaagcagggtgaccggatgtgaagggtccacctatcagcccacgacgttggtaaaaagaggggtccatcaggtgaatacggagcaaatgcgcgtcacacatcttttactccggggtgacgtgggcaagcaaggcgaagcatgcacggccatatcccccacatcgccagtgatatgttcatagaaactgtattacccgacaattaatgcagaatgacaggctaagggagtacacgtaggaccggatatcaaatctccttaacgaagcaaattcgttcagagagacctcctggcgctatccttggggccatggcccatatgcagcggccgtaggggttccgaggtaatgaaagcttgtcttaaggctactgttgtcctcgggtcacctttgtccgtcaactcccactttgctcccgtggtgccccgagccatcgatggagtgtgaggattctcgctccgacaatgatgttttcctataaatttaattattattttttaaaatgtttaacttataagagcatggttaatggtttcgtcggcagctggcgcaatagggtggccatgtcactttaagcatttgagaaggtcattgcagatagtgaactggcgtagaggttggctataagagttaatgcttgcatgtactagtagcaaatgggagagaaggagctgctggcttagtcgcatgcagcaggctgagaagaagctttttatctcggttctgctgcttcaagcgagcgtctcaccaatcgctcgtcctattctctattaggatttctctctcttccacctcagatttgggtgacgtggtcagttatttcgccggctaactgtgcttcactatacttgctctaaataagtcaaagcctaaaaaatattaattattccctccctcacaagaggaatgtactagggactaggagagagcagcagcatcagcaattaaggagaccggtagctgtatcagtcgtgaattattttttttactagctatcaaagaacagtcgtacgtgaatgtattaaccatatatgtgatggattgacacacacacatagtactctctccgttacaaaatgatgatcatataatttttttaaggttatttttaaatgatcattatatttatatttatttattaaatatatttgttatttgtgtattgaagtaagttgatattgatgtatgtatttatacacaaaaaaattgt

SEQ ID NO: 15606 - DNA, 1284 bp, Oryza sativa
  ref <308>: DATABASE ACCESSION NUMBER: AK066124
  ref <309>: DATABASE ENTRY DATE: 2001-12-06
ggtccagtccagtctcctctcctctcttctcctctcccgccgccgccgccgccgcacccgccgatctccatcctgcgagcagcggcggcgctccacctttccctccccaaatttcaaaactcgattcgaaatctgccacgctttattcccgccatctcattctcacctacccaattgtctcctcctcctcaaatttaggttgaaaaagatattcccggcgcctccccacaatcagctagctctacaaatacctcccgcatgagctccatttgcgccatgagatccctcctcgccgcctccaccttcctccgctccggcgcttcccctctgctgcggcccctttcccgtcctctcccttcccgcctgaatctttcccgattcggtccggtgaggccggtctctgcggcggcggcggcggcggacaagtctcgaggcggaggcggctccgcgatggaggcccagccgtcgtatcccggtgagattcacgtcatcgtgggccccatgttcgccgggaagaccactgcccttctccgacgcgtgcaggtcgaggccggcactggcagcaggaacgtggcactcatcaagtctgacaaggacaataggtatggattggattctgtcgtaactcatgatggcacaaagatgccatgctgggctctacctgagctttcaagtttccaagataaattaggaacagaggcttacgataaggttgatgtcataggtattgatgaagcacagttttttgacgatcttcatgatttctgctgcaaagctgctgaccgtgatggaaaaattgttgtagtcgcagggctagatggtgactacaaaaggaacaaatttgggtcagttctggacattatacccttggctgactcggtcaccaagctcaccgcacgctgtgagttgtgcggtcgccgtgcattcttcacgctgaggaagacacgggaaactaagaccgagctcattggaggagctgatgtgtacatgcctgtatgtaggcaacactacctggatggtcagattgtcattgaggccacaaggattgtgctggatcttgaaaaatccaaggttatccatgctttcaagtgagtgaatagctcattgtatcctttttacttgcaaggcttaccatgtgtaacactatcatcatcaaccatgcaatccatctagttatcgtagaagatgatggaaagaccacaatattcagagactctccattaaacgattgtaaatatgtatcagtccagattctgttgggaatgaattttatcttggtttgtg

SEQ ID NO: 15607 - DNA, 1208 bp, Oryza sativa
  ref <308>: DATABASE ACCESSION NUMBER: AK066125
  ref <309>: DATABASE ENTRY DATE: 2001-12-06
gtcccattccagtgaccaatccacactgatcccagtagctctcattgtcctcacgcttcgactcgcttgctagatctttgggttcttgtgtgttgtgatcgcgcgatgaggacggtggcgcttggcattgtggcgatggcctgcctggtggccattgcgcatggaggcaacttcttccaggacgcggaggtgtcgtgggggcagggccgcggcaagatcgtcgatggtggccgtgggctcgacctcacgcttgacaggagctccggctctgggttccagtccaagagcgagtacctcttcggcaagatcgacatgcagatcaagctcgtccccggcaactccgccggcaccgtcaccaccttctacttgtcgtcgcagggttcgacccacgatgagatcgacttcgagttcctggggaacgtgaccggcgagccgtacacgctgcacaccaacgtgttcacgcaggggcaggggcagcgcgagcagcagttccgcctctggttcgaccccacccagtccttccacacctactccatcatctggaacccacagcacgtcatattcgcggtggacgggacaccgatcagggacttcaagaaccacgaggcccgtggcgtggcgttccccaagagccagccgatgcgggtgtacgcgagcctgtggaacgcggacgactgggcgacgcagggcggccgcgtcaaggcggactggagcaaggcccccttcgtcgcctccttccgcgacttcaacgccgacgcctgcgtctggtcgaacggcgcgcagcgctgccccgtcggcacaatggagaccgtcgcagcgccggccggcggcaggaggggcggcgccggcgggtggtggaaccaggagctcagcgacatgagctaccgccgcatgaggtgggtgcagaggaagttcatgatctacaactactgcactgacgccaagcggttcccccagggcacccccgccgagtgcaagctccgttgagatcgacacgagaagatgatcataacgtacgctacgcatgcatgatccgtcatcgatgaaaaaaatgatgagaagagcacgtcagatggcgaataatgaatgtgttttgttgccacggagatgtaaatgtagtatgcatatcgcattctttgatatctttttgtaacacggggtcgatgtacgtaccaagtttgataaattttagtgagctgcttttagcc

SEQ ID NO: 15608 - DNA, 1383 bp, Oryza sativa
  ref <308>: DATABASE ACCESSION NUMBER: AK066126
  ref <309>: DATABASE ENTRY DATE: 2001-12-06
gacttttgcccctcccaccaccaccaccaccaccaccaccaccacgcacctctcccctccccgccgccgccgatggcctcccatctcctcctccgccttcccgcccctcccccgcttctcctacacttcccgcagcggcgagtgaccctgccacagagccgggtgtcccccacggcgccgctgctcggggcccgcctcgtcttctccccagcctccgccgtccgtccggcccgggcgagggggtcctcgatcggcggcgcgggggaggacgactcagacggcgaggtggacggggccccgcgcctcgtcggggaggactcggcggcgttccggctgggcgaccagcgggtggcgtcgtgggtctacttcggcgggatactcgccgtggtgctgtgggggctcaacgtgctgtggatcgacccggccaccggggtcgggaccaggttcctcgaggccgtcgccgccgtctccgacaaccacgaggtcactatgctgctccttaccatcatttttgctgtcgtccatagtggtatggcaagcttacgtgaaactggtgagaaaataataggggagagagcttaccgtgtaatgtttgctggaatctcactgcctttagcagttagtactgttgtctactttataaatcatcggtatgatggcattcagctatggcaagttcagggtatttcaggcatccatgagcttgtttggctctcatctttcatctcattcttctttttgtatccatctactttcaatcttttagaagtggcagctgttgacaagccaaaattccacatgtgggaaactggaataatgcgcatcactagacatccacagatggttggacaggtaatttggtgcttagcccacacgttatggattggcaattcagttgctgttgcggcatccgttggattaattggtcaccatctgtttggtgtttggaatggtgataggaggctggcatcacgctatggtgaagcctttgaagttctgaaaaagagaacaagtgttattccttttgctgcagttatcgatggaagacagaaactacccaaagattattacagggagttcatccggttaccatatctcgcaatcactgcattaactttgggagcatactttgttcatcccttaatgcaggcgtccagctaccaactcccttggtgattggtgtacataacaatgtccacaaagagaacacgatacagaaatagtgactttgtactttgatagacctgatagcctggccttgcattcgttattttaatactggcctgctcacacttgttgtaaaagaagactaacgaaagagtaccaggttgatgtagatgggagtattcaagacaaatggattgcacgttgccatgcttcctg

SEQ ID NO: 15609 - DNA, 2025 bp, Oryza sativa
  ref <308>: DATABASE ACCESSION NUMBER: AK066127
  ref <309>: DATABASE ENTRY DATE: 2001-12-06
gatcagataataatagcaataaaacaaaaaaaaaagaagaagaagagtcgcttgaatttgcagcgtcgccgccgcccgcgcgagatggcccccgccgccgaagtctcctcgtcgtcggcggagaccaccggctcctccgccggtagcgcgccctcgaccgccgccgccgccgccacctccacctcccattcgtcgtaccggcgcacggctcccccgctcctgctcctagcctcgctcgccgcgctcctcatcatctccaccggcgatgacaccgcggccttcgattccgccgccgtggggcggtccatcaaagatgttagtctggaaaatccagaggtgacttttgttccttcatccctgggtggacagttttgcgagcgagttcgcttgtctggaataccgaagttacatattggaagctatgcaaatcaaatacgagtcaaaatgaatgtttcccaatcaatgcctgaaaagttccattggaaaatagaaatttgctttcatgggaatgcttctatgggattatgccaatgtgagacaggtgaatggcaaaatttgcaaaatggcatgtggaatgctgtaaagtctccatatggaaacaaatatgttgatgttaaagtggctgataagacatctactaggttcagtatttccattcaagaagagtttcagaaatggcgtctagcttgcctcggtattggatttattctgctattcctatcacccattgttagcaaatgggcgcctttttactatagcagttctatggctcttggggtcctgcttgttgttctgattgtccttttccaggggatgaaattgttaccaatgggcaggaaaagtttattttacctcacaatttatggatctgtggtaggggttggctcctatgctgtacattatttctccacattggttgcttctattctggaaaattttggtttgagtgaagagatgcacaaccctgtatcaatcttcctgctggtagcaattgtcttgactggcgctggttttggttattggatggtcagaagattcatcctttcaaaagatggtagtgttgatgctgggatagcacagtttgtgaagtgggctatgcgtgttgttgctatatgctttgttatgcagagcacacttgatcctcttctagcgttattcgcgctggccgctagttggtggatttgttctgtgttcacagcatatagagctccaaagtcaatgacactgaagcaaaagcaatcaaaggcttctactcagccaatgtataataaaggatcacctaaccctcgccaaatccaattcttaagcccatccaagagggatattggaagaaccacatcaaacagttcagccacacagtatggctggagcaatttagccaatggaggactggtgtctccaacacttacaaagagggtggtacccgataatcaagatgaagaccactactccaccttccacaatatccaaccaaggaaatattcaaaggaagaatgggatgacttcacccagaaatccaccagaaaggcacttatggagtgcacggcaaccccagagtttgctagatgggttgctgataatgctcaccggctacgagtagagcagcaagatgacgcctcggaggacgagctcatcgagagttcctcaaattcatccgaagaaacagcacaggaagctgataccgggctgttcaggtggtattgatcttggcatgctaagaggctatgccgaattgctgatgctgtgcacgctctgtagaagtaggaggcagtaagaaagctagttagcagtagggttagcatttctattatttccactattgttcccacggttcatgcttcttggtgactgtagttagttagcgatctcaagttaactaatggtagatttagcttagttcgtaacgggccatggatcggtagttagctagttgcctagagttgatcgacttaccagagggctcgaacttgtgtaaatgcagtctattcgatccgtcataattgataaatcaatcctgttggaacg

SEQ ID NO: 15610 - DNA, 910 bp, Oryza sativa
  ref <308>: DATABASE ACCESSION NUMBER: AK066128
  ref <309>: DATABASE ENTRY DATE: 2001-12-06
gaccctagccgcacatccccgcctcttcccgccgccgtccgccgcgcgcacgccgccgccgccatggggaggagacctgcaaggtgctatcgccagatcaagaacaagccgtaccccaagtcaaggtactgccgtggtgtccctgaccccaagatcaggatctacgatgtcgggatgaagaagaagggtgtggatgagttctcccactgtgtgcatctcgtctcttgggagaaggagaatgtcaccagtgaggctcttgaggctgcgcgtatcgcgtgcaacaagtacatgaccaagtctgcaggaaaggatgccttccacctcagggttcgggttcacccgttccatgtgctccgtatcaacaagatgctttcgtgtgccggggcagataggctccagactggaatgaggggtgcttttgggaagccacagggaacctgtgctagggtggatattggccaggtcctcctttctgtgcggtgcaagcccaacaatgctgtccatgccagcgaagccctccgtcgtgccaagttcaagttccctggtcgccaaaagatcattgagagtagaaagtggggtttcaccaagttcagccgcgatgaatacgtcaggcttaagagcgagggtagaatcatgcctgatggtgtcaatgctaagctacttggttgccatggtcgcctctctgctcgtgcccccgggaaggccttcctctcagccgcttagatatatctatccttatcatctgtgggaaacgaaatatcggacctttttgtttgtttgtagactcgatcatatatcactttgttgaaccctgaatcaccaagtgtctggtgctatattgcctggtctgaagctatcttgtgttgaacatctttatctgaaatatatatcagatgactttcgtgtcgct

SEQ ID NO: 15611 - DNA, 1670 bp, Oryza sativa
  ref <308>: DATABASE ACCESSION NUMBER: AK066129
  ref <309>: DATABASE ENTRY DATE: 2001-12-06
gagaatagaaggggaggaggagagacgagaggagtggttgtggccatggccatggcggccgccgtccaccgcttccttggcgtatttcccgccccgtcgacgcccacgcctccgcctcgacaactatcgcctcgcccccatcacattcctccttccctcgtccgatgttgttcctcgtcccccgtatgcgccgccacagttgcagttgcacaaccccaagagttcgtcgtcgtcaccttctataagttcgtctccatcgacgacccccgcgccgaggtgtccaggcacctccacttcctccagggccgcgacatacatggccgcatttacatgaacgagcagggaatcaatgcccagtacagtggtccacataaagatgcggtagcatatgcagactggcttagaaaagaccatcgatttcgtgatctacttgtccaaacttcaccatcgttatgtggccatgcttttcctcgcttgaaactgcgcatgcgtgctacaccattgactccatcagagtggagggaaagacttgaagctagaaaatgccttgatgtgtcatcgagtgaagcagctggagatagctctggaaggaggcttttgctcctcgatgtcaggaatgattatgaatgggatattggacattttcaaggagctcagcgacctaatgtggactgcttcaggagcacatcctttgggctctcagagtcagagcaggagatggattcttcagatcctctaaatggtatagacaaagaaaatacagatatattaatgtactgcactggtggcataagatgtgatgtgtattcaacaattcttaggaagaagggcttccggaacctgtatacattgaagggaggagtgtccaattatctgaaggaggaggggtctgcaggatgggtggggaatttgttcgtgtttgatggacggctctccctgccaccggcaacgtacaagcctggagcaggtgatgatgatgatgaggaggaggaggaggggagaaacagaagcagttcagagctggggagatgctatgcatgtgggtcagaggtggttgagttgaggcaccggaactgcgcaaacatcgactgcaaccggctttacctgtgctgcgggcgatgcgtggaggagctgagaggatgctgcggtgagggctgcaccgccgcgcctcgcctgcgaccgctgctgccatcacaccagagataccacaagtggcatctctaccgccatttggacctgggggcaccatcatctccatcctagcttactagtatagtactccatgctgccatgcatttggatggattggattggattttcctgttgtttcctgcacgcttaactgtgcgtgtagtctcatctgtcatgccccaagtctcaaatctgcctgccttctttcagcttcagttggtaccaaagctgactcacctccacgacgaccttctcttaattttcctcttggccagcctcctctttactttcggtggattcctatgtatagtccctttattgattatgtatattttgattagggacacgtctacacggcgaccacttcatcccaagtgtaaaccctccttttcagcttctaaaaatagcaaaagaagcactttgcatggatgtaccccgactgaccgataccattggaaataagggtatgaaaacagtat

SEQ ID NO: 15612 - DNA, 1294 bp, Oryza sativa
  ref <308>: DATABASE ACCESSION NUMBER: AK066130
  ref <309>: DATABASE ENTRY DATE: 2001-12-06
gctttccccttctcatggagtcgtgtagcttccgcaccgccgcctcgccatcgccattcccctcgcttccctcctcctcccgacaagcgccgccatgctccagcctccgattccccagaccaagaaacgggaggatggtgggggtgcggaggagggcgtccggattcgaggccttccctcccctacctggtaaggtgttcgtcgaggaggcaattggagctgaatatggggaaggttttgagacatttaggatggatggaccactcaaggtcgatgtggattatctgaacgaaaaattgcaagaatgcttccttcaaaggataagacatgctatgaagccagatgaagcatgtgggcttattttctcatgggacaacgtaattgctgatacagactcactaaagttggatgcctggagacagcttgctttggaagaagggaaggatatcccaaatgctggtcatgtccaaaagagtattcttcatggtgctgccgaccatgtgcttagaaaggttttatgttgggcaaaagatgaaagtcaaatggaaagactgaaggcacggcttatagagttatactacgaaaatctcttcaaacttgatacaccagtaaatggattgcgggaatggttggatgctgtccagacagcaggcatcccttgtgctgtcgcatcgtccctggataggagatgcatgattgaagctttggatcgaatggaactaagcaaatacttcaaggcaattgtgactgacgaggatgatatggagtcaatagcacataggttcctctcagctgctatgaagctggatcggaagccctcaaagtgtgtggtgtttgaggatgacccgagaggcgtaaccgctgctcacaactgtaccatgatggcagttgcactcattggtgctcatcctgcgtatgagctggtacaggctgatctcgccatcgcaaaatacagtgagctctcggttatcaatctcagaaggttgtttgcacataaggggttaagtttcatggacttgcagaagcagatcatcgagaggtcacctcccaagaggaagctgacagtagacaccatcttctaatgaattctttacctcccaatactgaaaaagagagaaaagaaaatagcaccatgcatcctccctactgtgctgtgtatatagcattccatgttggttagattacatagaaagctgatgttagatgatctgttgttgcatacctccattctggatgtactagatgtaaactgatgtttaaccattttaatcatgataaatactaccagtctacc

SEQ ID NO: 15613 - DNA, 3143 bp, Oryza sativa
  ref <308>: DATABASE ACCESSION NUMBER: AK066131
  ref <309>: DATABASE ENTRY DATE: 2001-12-06
ttggagagagagagaggagaagagcagcaagagaagaagagaggacaagtgagagaaaaaaaaggcttcttttctctccaatctctctctctctctctctcttctcctcctcctcgcccacctcaggcagccgcattaatggattccgcggccgcggcctcctcctcctcctcctcccacctccgccacctctccacctcgccggacctaatgtgacggcggcgcggatccctcaacggcggcggctgggtccaagaggtttaggggagtaaagggaaatggatgtggagaagcctacttcaaagggacatggcttctttagcctgtttgattggggcaagaagtccaagaagcggctggtcagtggaaatgggagcgattctccggctccaagggtttctgaaaatttcagggaatctgatggtggcacaccaagcactcgaccaaattcgttccttgaagatgcaccgagtttgaaggaaagcagtgagcacagttgctcatcttcagtggttgacgatgaagctcttgtgaggaggggccccactgttgtagcaaggcttatgggtctggattccatgcccgcagcaagctcatctggatcctatacgatgccattaactgtgcagcagtccccccagaacagtactatccatgatgagttcattggcagaagctatgttggcagtcctcataagatgcccggtagtcctcataagatgcctggtagtcctattgaccggtttaggatggaagcattgccaccaagatttgccaaaaggacactgtcggttgcgcaaaacaagttgtcccccatgaagaatcctaatcatatatctagcagaaatgctgctgatataatggaggcggcgtctaggattataggggctggagttgaggttattagcccttacagagttcgtgatgttggatatgcaaatactgttcgtgtatacagccaaagagagattgcgatagtccaacaaaggccaccaagaatgaatgaagcactgaagaagcatgatggcttgacatcttataggctaccaactggaaagcctttggatggaagtctgaaaagttcagggaacacctctgcttctgtggtctcacagtcaaatggaggtgctccagttggcccaaaggtcaaggccagcagtcgatcatcaccagattctagagcaactaatgttcaaggaagggaagatataagcaagattagcagaaaacttgcaactcgggatcctgagcggagaatggttgagagaaatgggattaaccaagggaagaataacaatcaagtgggcatggcaagttcgtccaatgtgcttgtgcaaaataacagaaagcaaaatgctatggttaagcacaaggtgaattccaagccaccaacacccaaccggcaaagaagcaacacacattcaataaatggcactatgagaaaggttgggactgccggcacaccgtctgaaaacaatactcaaggtaacagaaacgtggaattgcggtcaactggccatgcaaatagaaggcaaaattctacagccaaatcaatccccaagccaggaagattaccagatgggaggatacattcagtgaaaacccgtccaagtgataaagatattgctgacagaagccaaaggcgtgttcggcacaatattgtaatagatgagcaatcacctttttccatgaacaagaagaaaattagcactgatattgtttcattcacattcaccgcaccagttgataaaccattatctggttatcgcctacccaatcatttagtggaaaaacagtttatgaaaaacgcgagctcagtaccaaattcaagcgagacatcgagtgctaaatttgattcaattgatggtgattatttgggtctccttttagagcagaagttgagagaacttacttctggggttaggtcaccctactgtaagccagccaaagatgttcggatatatgccccatcatcagttctggaagattcacaatcagcatgtgaaacatcgagcattgcatctactgattatgatagggagtccgtccaatcctataaggatggaaaaggcagtttcacccagacagatcttgcatcaaagagtggtcagtcatctcaatctgtgaagtatgataatgatgccatggatcaaatggagatagagcgccttcacctcagtcccctttcaacatgggatgcttctgtttcaactgaaaccggtagctcaacagagagctggagaagcgcaaatggaaccaaagtatttagctcaacggaaggtgcaacaacgtctaattctgcatgcttcagtaaattcctggaagctgacgctttctcggagtattctgacacagcctcatcaatcactgtgactacgacggatatccccccatcagatagcagcagttcaagccgaatggattgcagacaggagattgatttcataagagaaatattaaacaccagtcctcttaatggtcaaatttgctcgggcttggagcgattcattaactcagatatcctggatctacaactactggaagacttaaatggcgatattcggctggcggtgggtgtagcagagggcaaaacactccgaatgaatcggaggctgctcttcgaatgtgtaaacgagatactgagtgtgagatgtgcatactatttcaatgccggctacggctcatggttcttggggatggcaattctgaagaagctcacagctgaagaaatctatgcggagatgactgatctgaaggttgctgaggagtggatggtggatgaactcgtgtacaaagaaatgagtagtcctctggggagctgggtagatttcaagttggagtcatacgaatctggcattgacattacaacagagttgcttggttccttgatcgatgaaatggttgctgatctacttctagtgtctgacacttctttgtagcaggtgttcttttcccactaatgataccagtttgacagccacaaacaaggtttttgttccatatgttggtctcacaaattgtaaattggtagtagttcggtcatgcaactgtgcatgttttgtcacgaaagattgataatgttgctactaacctgcccattgtttatctgatgattgaccgtcgatgtctgtcatgatgaaccg

SEQ ID NO: 15614 - DNA, 3032 bp, Oryza sativa
  ref <308>: DATABASE ACCESSION NUMBER: AK066132
  ref <309>: DATABASE ENTRY DATE: 2001-12-06
gagcaaggtctgagatttcttctctcccccctcgcgtgctctcgccctccccgcgttgccccgtcgctcgctgctgttgaattctctctatgtttttttttttgctgatttctctctttgggcggttaaccgtggggggcagcatggtttcttgctcgctccgtgatgctgtgcgggattttagttttttgtttttctgattcgattgatgctgctggtgatgggtggtaacggaatccgtcctgggtagcaggatattttcttctttttttagagcgcccatgctctgattgaagtgatagagaagaaatttttgtaccgtgccatgtgtagtgcggcttgttttctgttctcttggtgcaaagttgcaaacttggttagttgattttggtcgtcaggcctgtccgagccttggattaggttgttgggggcagtatttaattaaatagtagtcaccatggttgcaggcttgcagccttttgctgctgctcatcttcatttacggctagcgcctacctagttctgtgccatatttgggcgctgccactatgaccatggcaaaaaaaagattagttttttattgcaccccttttcgaaggcctgggtaggactttcggtatgtgggaaatcaatgcttggtttgatgaatctgcaaatgactttgaagtggctctttctgtttctttttttttttaaaaaaatcgttcttctgtagtttgtaagatctcgaatgctctgtaaccacataattaagaactcaaatatgatactagtatgcattagattactcatcttagatggcttattttctcgtcaacaaaactggatttttcttagatatttctcactgatcaattccattctcattttatttgcaacacagagattcagagctaagtgccctgtggttcccaattactgtttcaatcaccccctcttgaagggtcacagttttgtctaatgtatttatgtgtttttcaggtttcttacctctggaatttgggggattctcaacgcccaagctagattacataacatgaatgcaggattcagcccacagatcttggcgcagaagcttttgaagctcaataattcacgacaaagtatagagactttgtcacattggtgtgtctttcattatcgacactgccgacaagttgttgaaacatgggaatctgattttcactcagctcctcgtgagaggagggtatctttgctgtaccttgcaaatgatatcgtgcagaacagcaaaaaggactctggtagatatgtaaatgagttctggagggttatccctgctgccttaaacgatgtgtttgtcaacggcgatgattttggaaggaatgtcgtacagagactggttgacatatgggaagaacgtaacatatttggatcccatgggcaaagtctcaaggaagactattctagaaggttcaaggagttcaaatccaagtcgagaaattctagtggggagctgctggaaaaggttatctcttgctacaagcatatgttgaatgctcatgtagacgacgatactctcatgcggaaatgtcaaaatgctcttagctttgttgacaatctcagcaacgaatatgagaacaactctattttagactgtagtaatggatctggctttgtggaggagctgcaagaacaacataacatcctgagagactccattgaacaattcaaaacatcagaattactcagaggcaatcttatttcttgcttaaaggaagcactccatgaacaggagttcaaaatggaacgggccagaagccagattaaggaagttcaatcccgatacaagaaagctgatgacctctgccagaagcttggaatacatgtagaaaggcaggaacaaccgaaccatgggcctaagaactcaggttctgaaatgcatggtagctttggcccagattcagctaatgccagttcttttgagaagggacaatcaagtgcggtgatgtattcccaggagaacggcggtgagcatgagatccccaatggcgttttctcttcacgggccaccaaggataacattgagcagaaactagaagagcactctacgaataagagacagaaactacagaatgatgtgtatgtttcacggcctcaatcgccacctccgccactgccatctgatgcatttgaacagccgccgccaccacctgagcatcccccgccaccagagtctacatcgcccctccaccgccaacttctgatccacctccagtccccccgccaccaccgacaacaggttcattcatgccaattccttctgctccgtttgcgggactgccagtacctgccggccctatgacagcagtaccctacaactcttacccagtatttcctcctatgaactatcccatggtcaacatcccacctcccttccctagtgctccaaataccccccctggtttccaaggtttggctggtcccttctatggccctccttaccccgcaccaccaccgccaccgccaccaccgatgaacaggaaatagactagtttcttgcctgcagattagtactgccagccagctttggaggatagccatagactttgcttcactgaagaatatgatcgtgatgattcatcgccatgtgttgtggagcttggaatatactgttcctagtgttgtacattagtcagctggccagatagtagcggatttaacagttaattagcattagttgttcaggtcatggtcatgaagcaaaaaggaaaccatgtgtgactgctagaaagaaattctggagttatgagttatgacagctgaaggcaaatgccatagcatgacatcttttgttactcttctttttcttccttagaaaatgtttgtcacattttgcttgtgttgtttactagattattatgtccatagttgttgcaatgttgagagcaggtaattctgttgttttggtatgagatgcaaattttaatcctctcattttctggcaagcattgcatagtggccacttgccactttcttggtgcctttctatgatatgcttctctaattcatcc

SEQ ID NO: 15615 - DNA, 757 bp, Oryza sativa
  ref <308>: DATABASE ACCESSION NUMBER: AK066133
  ref <309>: DATABASE ENTRY DATE: 2001-12-06
gcgacggtgcccgcgggggtgtgccgcgtgcacggcgggttctgctcgctgcgggagacgttctgcctggcgcaggcggacggcgggaaggcggtggagcggctggtggcgtgcctggaccacctggacgggagggtggtggaggcggcgctggcggcgctgtcgacgctggtgtgcgacggcgtggacgcgagggaaggggtggtggtgctgggggaagccgacgggctgcgcccggtggtggacatcatggtggagagccgcacgaggcgctgcagcggcgggcggtgtgggcggtggagcgcatcctgcgggtggaggagatcgccggggaggtggccgccgaccagacggtggcgtcggcgctcgtcgaggcgtaccgcaacggcgacccgcgcacccggcagacggcggagcgcgcgctccgccacctcgaccggatccccaacttctccgccgccttccaatccaaacgctcatagcctctccacagatctgccattgccaatgtgcaactgcaactctgcaaggctctcccttcgctgattatcccattcccctctttcatttcacttgctctttttcccattcccctctcacttcacttgctcttttgctggatcggattgctgatttttttttcttttttttggtttgtttacagcagcatgatgcttgtatagcataatcgtcttaattctttcaaagcaaaatggatgaaacaaaattggttgcacctcgagtgcatttttctgtg

SEQ ID NO: 15616 - DNA, 1474 bp, Oryza sativa
  ref <308>: DATABASE ACCESSION NUMBER: AK066134
  ref <309>: DATABASE ENTRY DATE: 2001-12-06
ggcgcgcatcgcctcgtcggaggaggaggagggagatcggagatgggggcgggggagggaggggaggagcagtcgctggcgctgacgccgacatgggtggtggccggagtctgcttcatcatcgtcgccatctcgctcgccgccgagcgcctcctccaccgcctcggcaaggtgctaaaattcaatgggcaagaagcactgttttctgctcttcagagagtcaaagaagagttgatgcttctgggtttcatttccttcctgcttagcgtcttccaaaaatttatcaatcacatttgcatcccggagagtgctgcacatctcatgcttccatgcattactagagagacgtccgagaccacagaagatgcttccaaactttgcaagcgaaagggtgaagttcctatgctatctgaagaggctttgcatcagctgcacatctttatctttgtccttggtattgtccatgttgtattttgtgttacaacattgttacttggtggagccaagatgaaaaaatgggagaaatgggagaaagaaattcaacaaggaagaaccaaggagcgaccaaagaggccaggctggatgaaattcattgttgtaagatgtgccatctcattcttgaagcagttttatgattctgttggtaaacctgattatcaagtacttagatcagcttttgttcagaggcactacccaaaccgtcctgattttgatttccacaagtacatggttcgtgctcttgagcatgattttaaagaagtagttggaatcagctggtacctatggcttttcgttattgtcttcctgctactgaatataaatgggtggcacacatacttctggctgtctttcttgcccttaattctcctactcattgttggcacaaagctggagctcataagcactaggctggcacaagaggcagcagactgcccagatgaagcaacaggaaacccctggacaaagccatgcaaggagcacttctggttcagcaagcctaggattgtcctccatttgatccacttcatcctgttccagaactcctttgagatgggttttttcttctgggttctggcaacatatgggtttgattcatgcatcatggagaacaagatttatgccctccccagacttgctattggaatcatcgtccaggtgctctgcagctacagcacgccgccgccgcaaggcccacggccgtagatattatcgtatacggaagcccgagccgccggcggccggtgcccacggcggccggcgtggcgagccggcggcatggagacgtgttgctagctgagtaggtagctaccttgcgcgacaccgttagaccaatcgctacgtgccacgtgtatggagtttgctgatgagctgtacaaaatggagttaattattaaaattgtacatgcatgcaaacttatggaattggacacatatcatatttttggcatacatgtactcttctgtgttatagtac

SEQ ID NO: 15617 - DNA, 2529 bp, Oryza sativa
  ref <308>: DATABASE ACCESSION NUMBER: AK066135
  ref <309>: DATABASE ENTRY DATE: 2001-12-06
gcccttctacacatcgcgcagccccacccctctcctcgcgccgcccccgatctttgccgggcgcccgcctccgcgccgctacatcaccatcgcccggagttgccagggtcgtcgtcctccgatctccttcgcccgagccgatctctccaccgatttgctccgctcgtgccgatctctcccgtccgcgtcggcagtgacggccgcctcgccgatctcctccgtgccaccgtcggtactccctcaccaatctgctccgcccgcgccgatctctcccatccgcgtcgccagcgagggccaccccaccaatctcctccgtgccacctctggaacacccgcgcccgcgtcgccgacgacctagaattaagtagtagttgctagctctggttggcagcacatacacatttcatcgagcacgtcttgagcgttctagaattcttgagtgctctatattgtggttagatcaacaaggtatccatctggcatgcagttttctcatttgttgaccatccaagtgattggaccaatcttgtattttgcaatttgtggtgttaaaaaaattattattcagtttacttactaaaagcaatctatctcttctgtcatgcagatgagaggcctcctgtgatttacctgtaggatcatgtgagaatacaccaatctgcaggaaaaaaaagtttagattgtcgaagcaaagctgaccggacaccatgccaattgctattgtttactgcacaatcaaggagatttttggctgattctactaaatttctgtttggtaaaggtaatttccttccatcatgattaccccttacaaatagtgcaaatgtctcctgcatggatcaatcttcgctaaatggtctataaacatttctactgcaccatgcaaagggttaaattgtagccatccagtgaagaatttctttctttgaacctacagtaccttggacatacaagcagatttctctttgtgctgatgtcatgtgccgaatacttcgtaacaagggagttgtgtgggctgttaggattcacgtctcagtcattcagtttctattctagatagcaaaatttgctatagggcatccaaaaaacgtgtaatttcacaatatgtctgtgattaaattaaactgattctccaataaattacaagaactacatccacgcagcttattaatttgcataggattacaaatgattccgagcgccacagtcagtcctacaagatcagcgtcggcagtcctctctgccctgattaaggagtgcatgaacaaggtttcctaaacggtgtttttcctcgctcatcctgaaagccctgatcctgaaggttcattccttctattactgacatcataactgaagcttgcaacagtttatgtgtcatattaatgccattggtattcaatccatttcctgataatatagaattgctcttattttccttgtaaaattatgtgcaagcagtaagattttaaattggttattgtcttcatgatcattggatctttttttttccaatgaagtgtatcaaactagagcaaactgttactctgaacatgtcaaattggtcatttatctgaatttataaaatagcgttaacttcctttttcgttcacaaatttcttgctttgcaatcaatataaattcagacaaatttacaagctgttaatatatcaatgaccactacatatcctatagcaactaattaaagcttctaataatggagatatttactaaaaataagatggtgttacttatttcagattcagcacatgatttatattttagattttgtatataactcagtttaaagttcagaatgtaaataggcacaatatttagttgaatcatttggaaataaaacatgcttatgctgaactgctggtatccctatagactgaacagctagaaaaacatgcgtacactgaactgctgataagacagtttaagttcaaacatttattaagtatactgaatcattgggaattcctgtagattgcttccccatttgaattttactgacattacccatgactgtatcaatgttaaattttggttgcatcaataaatcttctacttgttaccagcatccttatcgcacctacttaatttgtttgatataacaaaatgaacaaggatgtgaactacagttggtacactgaattgctaagagaaatgcttgtaacaacatgtatattgttgataatattaaggtgctttcagtgaatttcacatttgctatttacagctcaggtactttcagtgaacaggaagcttactcataaggaatcaaaccaatcgtgaagatagcgggtactctgagaattgacagagatgagagtctggctaaatagtcagccatgtgaaatgccttaatgaactctctatttcgatagatgagatatgtgaaatgccttaatgaactctgtatttcgatagatgagatagctcatttaggcagtacatacatgacgtgggttcttcgatccattcaactctgtagtgctgatccatttatagatatttctcccttgc

SEQ ID NO: 15618 - DNA, 3983 bp, Oryza sativa
  ref <308>: DATABASE ACCESSION NUMBER: AK066136
  ref <309>: DATABASE ENTRY DATE: 2001-12-06
ggccgatgtgtcagtccctgatcatccgccccgcgaatcgacctcccactcccagcatctcgctccccctccagcttgccgcagcccgcagcgcgagccctcccccgatcccctttgacctaccgcggcgccgcccacctgcgccggcattccgatcggctaccacccgccgccaccaccaccaccacaagtgccggcggcggcgggagcatacaaggccatgaacccatgatggttaaactcctcccttggcctcttcgattcatcccctcgcctcgcgcaccgatgggggaaggggcagccgccaccgtacacgttctgctggctacgcgagagtcgtcacaggaatatattaggagtacgatcataatgaagaataccaacagcaccaaaccaaagatatagatggatgttttcaggtgctgagtgcttccagcagcataggcacacaaaagcgcaaacatgcctaccgcagtgcaaactgagagagcataacttcgtatggctggcctgtacaggttcggattcacaaggagtataattagggcaatcgatgacatgaagctcattgaattgcagtagaagaaagccttataacggcgtggatagttgtaaaagaggacagggtcacctgcatggtgcccaaactcatcatccatcagccaaaatccgcctggtggggtcaacccagcttggtaagtaagtgtcacacacaagacagcaaaaaggagcaacctcttgcgtctcttgtcctcaagtttccggtccttctccctgccttcctttcgtatgtcttcatcttcgagcgtgacaaacagaacatgaataaccacatagattaggacagctccagccaaggcaatgacataaatggatgtggttacatctcggcagctcccagaagagtatgcaccaatgaggccaaacagatccaatatcatggcaaactggagtacgcggagcttgagtataggcttatactggaccaagatgatgatgaccaaggacgctgcgaaggctattgagttgcagtaaaagaataccctgtaacgttctggttgcatggataggagtattgaatcgccagcctcatgtccgttccagttgtcctgccaaacaccaccaggagggaccagtcctgcttggtatgcgacggttgctacaagggttgaaagcagtacaacaagagattgagccttatccataaaatctgcatttcttgtgttcttctgtgctccagcattgcttgtcttcgtctcttcaccaccattggttgtggttggctgtgctctagcattgctttgagacagactctgcaccaccattgcttgagacagactctgcaccaccattgcttgagagagactctgcaccaccattgcttgtgtttatctgtgctctacaattgcctgtgctcgtctgttcttcaacattgtttgacctggtgattcatgagccattgagcatgcaaatttaagatggaattacagatggcaataatatttggaagcagaaaaagcattcaatacctgtcatttgaatatgtctgacaggatataatcgccttgaggacaataatgcatgcaagaacggcaagaaccagactgcccacatagatggtagtgtcacattctcggctgcttccggtggcataggcccccgcaagaccgacaaaagcgataaagatgtatgctttgagcacaaaggtccgtactgggctggttttgttctgattcttgcccttgagtagtgggatgacgagctgcttgtctaagagcagcataatgatgagcagggacatgacaaatgcaatagcattaaaggtgaagaatgccttcaggcggatagaatggtgttcccgcatgactgggtcacctgcaatgtggccctccttgctgctgtcccagtagccaccaggcgcgctcaacccagccagcacaccccggctggtcccagcagcataggcccccacgaggccaagcagatccagcatcatggccacccgcagtgggatcatggagatccatagctcttccttctcgtgtacgacggcaaggatgaggatgaggatgatgaccacaatggacaaagcaaatgcagccgcattgcagtagaagaaaacaaggtaccgcggatagtacgtatctcggatgatggactcaccggcgaggtgcccggcctcggtattctgccagacaccccccggcgggttgaaccccgcagcatatgtcaccgtggccaccataatggccagcagcaagagctggggagcaatgacagaaaggaggtgcctcaaggcgtcaatgactctatgccaagcaggtgcttcaccatgcatacattagcttaatggaggctggccatgggcagacctttcttccaatccttcttctcatgaatctgtctacgatcggtggaggcacttgcgtattttatatggtcgtctgatacggacttatctatactttatttgacctgaaagacttgggagttttggtgttcttctgcaaagatatactactttctggagtctactagatatccaactcccaagtcaagatctgattaaactgttggcacgtttctcttgctactgttttgcaggttgaaagcttctattgtagcaacggctactccgctactggctgctcttttttactgcgaggcaagtcacacaattcctattaacccaactgtgaactatcatgtttccattccggtgctctatttcagtatatatgctagttgtaatgtttatgatagaaaggacacatatggaagtgtttcttaatttgaacttcgagaatgccatcaaaattcatgtttgataaaatgcccactgtcttaaacttcagctttacaattaatggtgaaacatgagccatgcatgtgaatagagtttgatatacagtccacgtgtagttgctttctgtagctgtgtccttttttacagctgagatgtgctacccaacattggattccacgagtttacagtttgtaatagtccaggttccaacactgtaaagaattgagatggacctagtcatcatatccgatgcatatagcagtacattgccttgagtccttgtcattggcgagagtagaattctttagattacacgataatcatgcaagctggatctgtcatgtaaatttaattaagctcgatagatatgtgaagaattagctggaacaagtaccttaacaaaaggtagcaagaatagaaaatagaaaaattgtccggagaatatttgtgtaactataaaatagttctggatagaaattaataaagagactcactaagaaattattttttggatatatattactccttccgttcctaaatatttgacaccgttgacttttttaaacatgtttgaccatttgtcttattcaaaaaataattattaattattttcctatcatttggttcattgttaaatatacttttatgtatacacatagttttacatatttcacaaaagtttttgaataagacgaacggttaaacatattgaaaaagtcaacgacgtcaaatatttagggatggagggagtataatattagaactcgtgattacctgaactaccttttcaactgtctgactgataagaaaggagttgtttgtgaagttgtcgttttcatacggagtattctgaaatatgtgtgatccctaacagtaacaacgtgttattactagatcacagtgacatagaaatctaattgctcttaaacgaggtaacagcatagtactagctagtaaaattttattccttgtcgtgcgagcctgccagtaggtgtaaatttttattgcttgttgtattactgcacacaggattcacacccgcctgagttctcccccaggccccatccatcctcagatgatacctgaactaattaaattttatacataagcagtagtcgttcttaatctatcttatgtagtatgaaaacctgaactttggtccaatgcccactcaaac

SEQ ID NO: 15619 - DNA, 3951 bp, Oryza sativa
  ref <308>: DATABASE ACCESSION NUMBER: AK066137
  ref <309>: DATABASE ENTRY DATE: 2001-12-06
gatccgctgcctgcctccatagctagcccactcgagcccttcaacttctcgcccaagttttgaagggatccagcgccgccgccgccgcgatggagcacgccgtcgttgagggggagtccttctcgcccgactgctccaccctcctcatgccggcgctctcgatcggcaacgtggggcagctcgccgtcgacctgctggtgtcttcgtcgcgcgcgaggcgggtggcgtacctcgacgagccgtccgtgctgccctgcgccggcaacgacgccttcggccccgacgccgtcggtgatctcgcgctcgcgctggaagcttatgaatctccatcccataggctggccttcatacagcaacggtccccaattattacagggatggtggtttcatttgcaaaaaatgttgctaattttataagcagcattgaaaaagaccatgttgttatcctttcaagtttagattcaggcaagagaaggataattgatgcatccagtgatatgcaagtatattacctttcaagttgcaacgaggacggttctgatccgaaatgtgagaacttaggctggaagaagcttgaggaatacgatccatctcagcaaaggtggaagtgtcttgctagcctagttgaaggtggtcatctttcagaagatatgactggtgatcctgaggagatgacgataaatgattactactcgagcttgccatttgcagcactattctctgcctgcaaggctaaaggcttgaaagttacttgtgtactatgctactgctcagaaggggacaatatgccagaatctttccagttggctgaggcagcatgcaaacttgttgctcaaggccctgaacagttccatggaaatgggtccaatggatggactattccattgtcctggaaatcagtatatggaccaccacctgacctctctattttctagacttgaagacctatctagtgaggttgctatcatgagcactatttaggattgaggatgttgaacttttagcatgagggttgaggggttgtgcaagaagtctccaggaaggtgatgagtatcaaatggtttaggtaaagcgacaaaagtgtaattccagttttcttgctgaactcgtggcttgattgtacttattttttttaagatcctgttatccggctatattgtaagggtatgattgtacttgaacctacaattgattagctggaacgtttatgtgactgataactgtgttaacaaaacgttagatatatgtcaattcagttggtggcgttctgtaggctgtagcttgccatgtgcaataagcagattgtggaattccaagctccaaggggtgtttccatccgggagcaactgccgttttgcattttggttcgattgattttgatgtggtggaagaatcagtgttgtgctagtgcgcaccgctttatgggaaagtagctaccaaaaagatacaccgttggcaaggcaatcgcgaaggtgatgcccatttgcctgcccattttggatcgcctcaggcaactaagctgagggagttgggccgggtgcagttttgtggatgtgctgatcgtcaagccgccgagccagatgaaagattgcgaactccatgcccacaggaaatttgcaagtccataaagattccgagcaaaaactattgtggagtgaagaagaagaggacggaaaataagatgaccgggcgccggagactttgaccggcggtggtcagaaggtggccttcttgagcgaggtgacggtgacagatgagccgagcgtggaggtgccgacctcgacgtcgaaggagtcgtatcggaggaagagctcgacgaggaggaggcgcgcgacgagcacgacgaagtccttgccggcgcactgcttgtcgtgcagggtgggcgccgccgtctcgggcccgttggaccacacgacgtggcggagcagccgcgcgccgtcctcgccgaggaacctgtccggcacgtactcctccggccgcgcgaacacccgcgggtccttggtcgccatgggctggtacccgaacagcatctccccttccctcacctcgtacccgtagtcgtggctctccaccaccatgtcccgcttcgccctcccgtactgcatcgccaccggcggctcgatccgcagcgcctcgtacaccgccgacttcaccagcggcatctccgccagcgccttcatcgtcacctccccgccgttgtcccgcacggcgccgcgcacctcggtggcgagccgcccgtgcacacgcgccccggcgcggcccagccacttcaccagcgtcgggaacaggatcttcatcccgccgaacgagttgaagcagagcgcgaagaggatgttgtgcacggcctcctcccgtgcaatgccgaggcgctccccctcgtcgacgacggccttggccgcgtcccggaagaagtcggcgaggcggtcgtagtccttcttcaccagcgccggcgggaggcggagcgagtggaggagcgtgtcctcgacgagggtggggaggccgaggctgagcagcgggctgagctggaacagcacccacttggtgatcagcttgggcccgtcgcgccccagcgccgacttggccgggtcgcggccgaggagcccctggcagaggaagccgaacgcggcggcgtcgttgtggacgccgaagtcggccttgccgacgcgggcgaggtcgttctccatgaggccgaacaggtcgccgtacacctcgcggaacttggggatcacctgctgccgccggtgggagaggaggtagaagaggagggtcttgagcggcgcgtggttgggctcggaggggtcaaggtaggagaggacgcggtacccgccggtgaggtcggtggacggcatgaaggtgccggtgaagaggtcggtcttgtcgacgagcgacgtgtcgaacaggacggggaaggaggcggcgtcgagcagcgccaccacccgcgggtcgcgcgccacgaacggcccgggcggcatgttgaggcgcaccaccgtggagcggtgcgcgcggacgcgcgccgcgaagaagccgtcgcggccgcccgggccgtagaagtactcgtacctgtcccggatcgcgcccaccaccggcgggccgtagtcccccggcaccttccgcagcggcagccgccgcttcggcgacaccacctcctgccggtccgtcgccgacgccgacgccgacgcccgcgtctgccgcctgatcacgacgcgcgccggcgacggcgacgcgaacgagatgcaagccgccgccgtggccatcccccccttgatccgatgaactacacctagctactactccccgagctagctactagctccaactgcaagtccacagccacggccgtgcaggtgcaggtgcaggtgtgcagatggtgtcaattcgtcgaacagtatgagcacaattaatctcggatcgagcgtcgttgggggttttaaaagtggaggagacgcgacgcagacacagtcacgcagccggagtactagcagctagcagctggtccgggtgatggatcgcgcggcggcgggatggccggcggtggctttccggtggcccggcgatgggcgcgcacgtggggaagatgggtgcagactccggagcgtgtagcacgcacgcactgggcgtaaaaggtggtgagcccaatcaccaccttactggttgacctgccgaagaccgctccgctggccggtgtcttagggctcctccgaatagtaggaatgaaaaaataaaggaataggaaaagcacaggattctgacaggaatacaattgtaaaacagagaattgcaaaacacaggaatggctgtttgatattggaccacaggaaaaacgtagaaatcagatgagagagatagacttagaggaaatgttccaagaggttatacctcttgctaactttcctccaaaatgtgcatatgattacccattccataggaattttaaaggattggatatgatcc

SEQ ID NO: 15620 - DNA, 1974 bp, Oryza sativa
  ref <308>: DATABASE ACCESSION NUMBER: AK066138
  ref <309>: DATABASE ENTRY DATE: 2001-12-06
gacgtccaatttctttctccaagaaagaacgccgaacaagcgccgacgaaaaacggttcctcgttatttctctccaacgcgcgcgcacgggctatttctacccccgccgccgagtagttaggcgtccaaagtttcgggagttcatcgtgaacggtgatcgatccaaagaacaacaactcggagcaaagctagctaacgaagttagttccaaacaaagctagcttatcgcgattagctagctagaagagagttagctaggcgccacgcagctaggcgtgccactgccacgacggcccgtgcccggtagctacggcgtgccgttcgtctcggcggtgcgcgaccgcctcgatttctactacttgcaggggcaggacaagtacttcgagtcgcgcgccgagaggtacggctccaccgtcgtccgcatcaacgtcccgcctggcccattcatggcgcgcgacccccgcgtggtggcgctcctcgacgccaagagcttccccgtcctcttcgacgtcgccaaggtcgagaagcgggacgtgttcaccggcacgttcatgccgtccacctccctcaccggcggctaccgcgtctgcgcctacctcgacccgtccgagcccaaccacgccaagatcaagcagctgctcctctccctcctggtctctcgcaaggacgccttcgtcccggtcttccgctccaacttcggcgcgctcctcgacaccgtcgagtcgcagctcgcgagcggcggcggcaagtccgacttcaccgccctcaacgatgccacctccttcgagttcatcggcgaggcgtacttcggcgtgcgtccctccgcgtcgagctccctcggcaccggcgggccgaccaaggccgccctgtggctcctatggcagctcgccccgctcaccacgctcggcctgcccatgatcatcgaggatccgctcctccacacgctgccgctgccacccttcctcatcagctccgactacaaggcgctgtacgcgtacttcgccgccgcggcgtcgcaggcgctcgacgccgccgagggccttggcctgtcgcgggaggaggcctgccacaacctgctgttcgcgacggtgttcaacagctacggcggcttcaagctgctgctcccgcagatcctggcgcgcgtcgcgcaggccggcgagaagctccacgagaggctcgccgcggagatacggagcgcggtggccgacgccggcggcaacgtgacgctggccgctctggagaagatggagctgaccaggtcggtggtgtgggaggcgctgcggctggacccgccggtcaggttccagtacgggcgcgccaaggccgacctggagatcgagagccacgacgcgtcgttcgcgatcaagaagggggagatgctgttcggctaccagccgtgcgccaccagggacccgcgggtgttcggcgccacggcgagggagttcgtcggcgaccggttcgtcggcgaggaggggaggaagctgctgcaatacgtgtactggtcgaatgggcgagagacggagaaccctagcgttgacaacaagcagtgccccggcaagaacctggtggtgctcgtcggaaggctgttgctcgtcgagctcttcctccggtacgacaccttcaccgccgaggccggcaaaaaggtggtcatcaccggggtcaccaaagcttcaacctccgccgtcaatcgtactgcttaagccggccatcacttcaggcgtgggtcgtcgatcatccactcaaccagctccgtcctacgcatatgcaataagaaatactcgtacctgaattcttgcatggctaaacactactaataagtgtatgtattctgtttatttgttcgattccatatttgtaattttgttgttattgtttgctgttgaattacgattgtgtattttacagggctgacagtgtctttaaacacctctaatatgtatcggatcaatctgccctagtcatgtctaatttgtg

SEQ ID NO: 15621 - DNA, 1314 bp, Oryza sativa
  ref <308>: DATABASE ACCESSION NUMBER: AK066139
  ref <309>: DATABASE ENTRY DATE: 2001-12-06
gggcgaaaaaaacctgttcatcatcagctcgagtgttcaacgacctttgccctccatcccaaaatctcaccggcaccagcaaaggcagccatggatccagccaccaccgagctgcggttcgacacgccgctcctccgcatctacaacgacggccgcgtggagcgcctcttcggcacggaaaccacaccggcgggcttcgacggcgccaccggggtcacctccaaggacgtcgtcatcgacgacgccaccggcgtctctgcccgcctctacatccccgacctccccgcctccggccccggtcatcaccgcaagaagctacccatcgtcgtctacttccacggcggcggcatggtcctcgactcggccgcctccccgacgtaccacaggtacctcaactccctcgtctccaaggccggcgccctcgccgtgtccgtcaactaccggcttgccccggagcacccgcttccggcggcgtacgacgacgcctgggccgcactcagctggaccgcgtcagctgccgacccatggctgtcggagcacggtgacgtcggccgtgtcttcttggccggtgacagcggcggcgccaacgtcgtccacaacgtagcaatcatggccggcgccggccaatctagcctacccccaggagcaacagtggaaggtgtgatcatactgcatcccatgttttccggcgaggagccgatcgacggcgagaacgcggagacgagggagctgacggagaagctctggcccctgatatgtgcagacgcagaggctgggctcgatgacccgaggctgaaccccatggcagaaggagctccgagcttgcagaagctgggatgccggaagctgctcgtctgctcggccgagagcgacattgtgctggcgagggcggcggcgtactaccaggcagtgatggcgagcgggtggcccggcatggctgagtggctggagtccaagggagaggagcacgtgttcttcctcaacaagccggattgcgaggagtctgtggcgctcatggacagggtagtcgccttcctcgcgggtaattgatgaaagggatcggatgaaatcaaaactgttcttgcttatcgcaagcacataaatttgatcgtgaataatgggagattggggggagaaagggatgggattttcctcttgttctctgcaaccactagttcaagaaagatgcgctaaatcggatcaagttcaggctttgttagctgtggttgttaagctctaagatgaaattcatgaggtgtttaatagaaggtgaaactgaaagcgtgtactgggtatgatgatttattgtgaggt

SEQ ID NO: 15622 - DNA, 3173 bp, Oryza sativa
  ref <308>: DATABASE ACCESSION NUMBER: AK066140
  ref <309>: DATABASE ENTRY DATE: 2001-12-06
gacactgtcttgctcgctcattgtctctctctgcatttgggggtgtgtcagaagagagatggaggaattcctgaccagaatggttgatcagctaagtaccatggccgtgtcggggttggcttccatgttgggtgcgcagcagcgagtggactcgctggtcgacgaatgggagacgctcgagagcttcctcaaggccacggcatggatctgcggcaagacgcgacggcgaggcggtggcttaattctctcagggacgttgcttacgacgcggaggacctcatcgagagcgcggtgctgcagcagcagggtgacaggtactctgccgtgaactcggttctccatccgattagtcgttacaggtctgcccagaaggtggaggagatcaggtccaggatccgtgacatggtagaccgccggaccagctatgctgccatggcacgtgagcttggacattgagctggagagaccagcatcagccccatcagtcgtcatttcgtctcctgttccaggtggcggagttcatcttaccacataggcaacaataccatctttggtcttgaacaagacactgatatgatcatggaaaggctgctccaacctactgaacatcgagaggtgattgtgatagttggcatgggagggataggcaagacaacccttgcatctcttgttttcaacaaggctcgtggagttgaagaaaggaacacttggtctggccaagctccacccaaagcaacagatccaggaagcagcagcaaaagaagtcattttgacgtctgtgcttgggttccagttggtcaggatcctgatactctccacctcttcagtaccatatctattcagattggagctaatttggatctatcacgtgatgtggctgaaataaaacatcatatgttcacctttctgcttgataagaggtacctgattgttctggacgacgtctggagagaagaaacatggcatgaattggttgacgctttccccatgtcgacaaatgggagcaaaatcctgatgacaactcgctccaaggtaatagccatttctgccgaccctgcttcatatccacatgagctgaatcccttgagtgatgaggtgagctttcacctcttcctatccaaagttttcccaaatagcaaccttaatcaagcaatgtcgtatccaccactgatggaggatttggggcgccaactcagcaagaaatgtggtggtttacctcttgcacttgtggttctaggaggcctactatcagccaaggaaaagaaacacgatgtatggagcagcatactgaatagcatgaactggaacgacaatgaagctgagaaacagtgcctgaaaatattggccttaagctacgacgacttgccctatcgtatgaaactgtgttttctttatctaggagctttcagagaagaatctgaaatcagtatctctaaattgacaaagctatggattggagacgatcttatacctcagcaaagtggaagaagaagaaaagaggacacggccactgactatttaaatgagctcattcaaaggtgtctcgtgcaacctgttcttctgaaacataagcagcgatcaacgagggtgcgtgtccatgctctattgcgtgagctagcaatatcagaaggaagagaaaacagattcctttattgtgaatatagcaaccaagcagtgtcggaaatggagatggaaaccctatcgtcgtttggttctccatccgggacccaataaacgttataatctgcatgatttcgagaagatgagagctctgttaatcgtcccacgaacaacgggaactcaaaccatttgtgttggccatcaagttatcagaccattctttccgctaatttttagatggtgtagaatcaactggcaaacagtttggagcatgccttatataagagttattgaagtcgaaggattgatgatgccaacggatgctctgagatccatccagagtagcctaattcatttaaggtacttgtgcctaagaaacacccagttggttgcgttcccgttcaatgagagcaagttcccatctctacaaacactagatataagagagacatcagtcaagaagctacctgataccatttgggctcttaagacacttcgtcatctgtacctgaacggaatggaacctccaagtataagatgcctcaccaatctacaaacgttttgtggggtcttagtttccaatgatcagattgccatggaatttttaacattaaaagatctgaggaaattacaaattgaactcaaagcatggaatggataccctctactggtaaaatctctgaagctgctgctggctctcacctcattcaagttgtcttccacagaaatctcttcagaagtgattaacaaaatagcacaccattcaccgctgcgcaagctgcatctccaaggcatgctacatcctcctgtcctgactctaagcgaatatttttcagattacatcacgagcatcacattgtcagcctcgagaattggcactgatcaattaaaaacacttggcagtctgacatgtctatgggaactcaagctaaaagatgatgcactcttgccatgtccacagcacagctttcctcagctgggatatttaaagatcagtagcctaaccaacctggaggcattccgaatcgagcgcggtgctttttccaacctcgtccgcttttcagtacactattgcagtaagtttcgtagcatcatcgatgtcctggagcatactacgagcctgcaggtcctgaagctcaagggaatggaacttctaccggatattactgattcttgtagaaacaaaaatgtttctgttatcactatggcttattagctagagtgctaatttggtaaaatttctgcgtccataattgggacaagatcagcgttgatttggtactctctggatgtcaaagcatatcgttttggtcgtgtttcaagttgaactttatagattttaaacatctatatctatatgcattgagtatcaatatatgtaatttgtattgattttatcgaagaaccaactttttccataagtttgtttgacatgtgggctcaactggcaatggtgtaagactgtaagtgttacatttgtgtttgatggttgatctgacctatcagacaaacagagcttgcagttctctaataaaatcaaaagttgatgttgc

SEQ ID NO: 15623 - DNA, 1591 bp, Oryza sativa
  ref <308>: DATABASE ACCESSION NUMBER: AK066141
  ref <309>: DATABASE ENTRY DATE: 2001-12-06
gctactgacttaatttagctccgcctccattcacgcattcacactagcatagcatataagatagcacttgtagagaggagatactagtacacatagagaagaggagaggagattgatcggtgagggaggatgatggcgtcttgtcggagaggagggggaggggatgtggataggataaaggggccgtggagtccggaggaggacgaggcgctgcagcggctggtggggcggcacggggcgcgcaactggtcgctgataagcaagtccatcccggggaggtcggggaagtcgtgccggctgcggtggtgcaaccagctgtcgccgcaggtggagcaccggcccttcactcccgaggaggacgacaccatcctccgcgcccacgcccgcttcggcaacaagtgggccaccatcgccaggctcctcgccggccgcaccgacaacgccatcaagaaccactggaactccaccctcaagcgcaagcaccactcttctctcctcgccgacgacctccgccctctcaagcggacaaccagcgacggccacccgacgctctcctccgccgccgcccccgggagcccctccggctccgacctcagcgactccagccaccatagcctcccctcccagatgccctcctcacccccacacctcctcctccctcagcacgtctaccgcccggtcgcgagggccggcggggtcgtcgtccctcctcctcctcccccgccgcctccggcgacctcgctctccctctctctctcccttcccggcctggatcacccacaccccgatccctccaccccgtcggagcctgcggtacagttgcagccgcctccaccgtctcagatgccgccaccaacaccatcttgtgtacgccaagagccgcctcagatgccgttccagctgcagcccccaccgccgccgcgcccatcggcgccgttcagcgcggagttcttggccatgatgcaggagatgatccggatcgaggtccggaattacatgtccggctccgccgccgtggatcctcggtcgtcgcccgacaacggcgtgcgcgccgccagccgcatcatgggcatggccaagatcgagtaatcaaccagccgcagcagcatacggaatgatcgagtaatcaagctcagattgatgcactgcaagcaagaaagcagagcaagaagcagaggcgccggcgcggcaagtgaagagacgacgaccatcaacgtttggatcctccttttctattctgctatagtcttcttcttccccaataattccttgtctagttttaatttttttttctcttcaatttttactcctccaatccaagttgaagttgtcactagtagagttctccagagagagaggagatgaagcaacaacaaggagctgtgtctgcctgtctggaggaactaataccaaaccaaaataagcagagtgtgtgctgctgtgccacaatcagcaccaccaccgtggcaccacccactagcttagcttagctagctagttcaaagttctttttgtatatacttataagaggaaaaagaaaaaagagagctgatcagtgaaaattcagaatgcatcagtgaagagaattgcc

SEQ ID NO: 15624 - DNA, 2789 bp, Oryza sativa
  ref <308>: DATABASE ACCESSION NUMBER: AK066142
  ref <309>: DATABASE ENTRY DATE: 2001-12-06
ggatcgcacccgtaccgaatccgcgcccctgaaagttttgcatgccgctgtcgaagtcggcttccgcgtaggtgtggtcgtcgtgtcggcggcggcggcggcggcgggaggaggaacgaggaggacacatggagcacgggagcatcatcgcgtcggccgtgggggtgggcgtcggggtgggggtcggcatcggcctcgtctcgtcgcggctgaccgggttggcgactggcggcggcgccacggcggcggaggtggaggcggagctgcggtgtctggtggtggacggccgcgacgtcggcgtctccttcgacgacttcccgtactacctcagcgagcagtcgaagctggccctcaccagcacggcgttcgtgcatctgagcccaacgatcctgcccaatcacatccgcgtcctctccgcgtccagccgcaccatactgctctgcggcccatcagaggcgtaccttcagtcgctcgcgaaggctctcgcaaaccagttcagtgctcgcctgctgctgctcgatgtcatcgacttcgcgtgcaagctccatcataagtacggcggtccaagcaatacacagacccgtgagagatccatgacagaggcagccttcgatagagtgtctagtttggttggagctttcaatctgtttcgcaagaaggaagaaccaactggaacaggaccattgagccgtgaaacaggcatccttgatctcaggactagcacttgttgtcctcataacacaccttcagtacgggttcagttatccttggtacctcccgagaaggaccatgatcccgaatcttctaaataccttgcatcagttaaaccatgctggagtttgaatgagaaggttctcatacaatccctttacaagattatagtttctgcttctgaaatcagtccagtcattctttacataagggatgttgatgacttgcttggaagttcagaaaaagcatactgtatgtttcagaaaatgttgaaaaaactatctggacgggtaatcgtgattggttcacaattcctcgatgatgatgaggatagagaagatattgaagaatctgtgtgtgctcttttcccttgtattctggagacaaagcctcccaaagacaaggtccttcttgagaaatggaagacccagatggaggaagattcgaataataacaataatcaagtcgttcaaaactacatcgcggaagtgctcgcagaaaacaatcttgagtgtgaagatttgagctcgatcaatgcagatgatgattgtaaaatcattgtggcttacttagaagaaattataaccccatctgtctcttaccatctgatgaataacaagaaccctaaatacagaaacgggaatcttgtcatatcttcggagagcttatcccatggattacgcatattccaagagagcaacgaccttgggaaagatacagtggaagcaaaggatgagacagagatggtcgttccagacaatgagtatgaaaagaagatccgaccaacggttataccagccaatgaaataggagtgacatttgatgacattggagcactggctgatatcaaagaatgccttcacgagcttgtcatgcttcctcttcaacgacctgatttcttcaaaggtggtctcttgaagccatgcaagggcgttctgctgtttgggccacctggtacggggaaaacaatgctcgccaaggccctagcaaacgcagcaggagctagcttcttgaacatctctatggctagtatgacatcaaaatggtacggggagtctgagaagtgcatccaagccttattcagccttgctgctaaacttgcaccagcaatcattttcatcgatgaggtagacagcatgctagggaaacgagataaccatagcgaaaatgaggcatcccgcagagtaaaaaatgagttcatggctcactgggatggactcttgtctaagtccaacgaaaggatattagtccttgctgcaacgaacaggccctttgaccttgatgatgcggtgataaggagatttgagcacagaatcatggtcggcctcccaacgttggagagtagagagctgattctgaagacattgttgtcgaaagagacggttgaaaatattgatttcaaggagcttgccaaaatgactgaaggatacaccagcagtgacttgaagaatatttgcgtgacggcagcttatcatcctgtcagagagctacttcagaaagaaaagaacaaggtcaagaaggaaactgcaccagaaacgaagcaagaaccaaaagaaaagaccaaaattcaagaaaacgggacaaaaagttcggatagtaagactgaaaaggacaagcttgacaacaaggaaagtaagaaagacaagcctgctgacaagaaagataaatcagacaaaggcgatgctggagagactaccctgagaccgctaaacatggaggacttgagaaaggcaaaggatgaagtcgccgctagcttcgctagcgaaggcgttgtgatgaatcagatcaaggaatggaatgagctctacggcaaaggcgggtcgaggaagcgggagcaactgacatacttcttgtagtgaagaattcattacttgtatatacatttgtagtgtttgtggttggcatctggcccccggatgactggatgtactgaagcagagaagaacatagggaaaaaagaggcatttaggagtagtagtcgtcagacccgataatttgattgtcattccctagttgatttattgaataataatgctgaaccttcttgattcgggaatacaattggtcgattactgatt

SEQ ID NO: 15625 - DNA, 2392 bp, Oryza sativa
  ref <308>: DATABASE ACCESSION NUMBER: AK066143
  ref <309>: DATABASE ENTRY DATE: 2001-12-06
gacgcggcggcgtagagattccccgccgcgccggatcccgaacccgttcaccgcccagcgatggcctcgcacctccgctccccgctggtgcttctgctgctgctcgccctccaccggctgtgtgccccgtggctggtggtcgccgacgacggcgcctcggtggcgaggtcggccttctccatggacggcgacgtggcgtgggtggtgcaggtaagcgacctccacatcagcgcctaccaccccgaccgcgccgacgacctcgcgagcatcctcggccccgccctgcgcgccatccgcccccacctgctcctcgtcaccggcgacatcacagatgcaaagaataggagaaaaactacgtcaagacaagatgagagggaatggattacatacaaaaaagctattgatgcaattgttggaataggtggtattgataagagcaggatatttgatattagaggtaatcatgatacatatggagttccctataggggaggaaaattggatttcttctcaacttacagtgtgaactcacagcttgaccgattaagcaccatcagtagcattttgcttcaggtactgtagggacgcaggaattatctcttccttggcatagatgatacaatgagtattggcattcgatatccagctaatttatttggccatcctactgataagaggatagacgctgttaattcagaacttcaatactggtccaatcattccaatgttccaataacaaaagtagtttttggacattaccctatgtcattcactacttcatctcaaaaaggacaacgttatgaaagtatatttgcaaagcagtcaatttcagcatacctatgtggccatctgcacgcgaaaattagtaagcagctttggcggtttcatgaaatgagtgcaacaacacaagagcagaaatcaagctattgggaatgggaacttggagactggaaagagtcaagactgatgaggattttagcaattgatggaggtgcaatctctttcatagaccacacactaaaacaggcatttcaaacttccatcttgatcacatacccaacagattcaagaagtatgaatacattggaatcaatgaattggtcaacgagaaatgatataaatgttcttgttttctctaatcaggtgatccgcaatgtgagtgcaagagtttttgactctcataatgagtttaagatagttgaagaaataccactgcagcttgttgccacaccatctgttcacaaacctttgttccatgcggaatggaatgctgaaaactacaaaagtccatcccctactcgctactggctgcaagtttttgctcaggattctcagggtgggaagacatcaagcgagcgacgaccattttcagttgagggtaaagtgcaaattcaatcacgtccatgtctgaactacttgatttttgaagtccaatgggaagacatgtatcaagttcttctgtggagtaattttgccttcataattgtactattgtttgctcccaaattgctgtatcattttatgaagaaaagtttgacataccaaagatggaccgtgtcagttatgctatcccctatccagccgaggaaagcttacttttggttggtctggtttctaatggagggtgcaaggagtagacccatctggttttctttgctcatatatgttatttggcttattgaaatgccatggttttggggtcatgcgacatctgagaaaggagaaattgctcaaatgtacttatccggatggagcatcccatctcttggtgaagacttgacctggaacaaatcgagcaacccagatgtgctggttattacactgcctttcctatacctggtggttgtcccagttgtagttgtaatatatagtttgtttgcagagaaggctgttgcttgtttgcggcacagcagaagaacagaaaacacggtcaacccaacaaattcaaaccctgagtcaggatatctactgccaagtgcttcagtgtctttagcgaacctctcagacaagaaaattctctcaatggtaatgaaattctgtggcggctggacaaggagggtgctcctattgttgtgctgtatcattgcggtgatacatttgaagctttcctcaaggctaatgtcagcttatggagccaaaccagtagccttttctcctccagtaacgtggatgccgttgttattattaagtgctactgcctattgtacaatgcccaacacatattagtgctgtcagctatttttgaagcacgagtatattagataagggcgtgaaaggtactgtccttttgttgtacttgaacgtggtgtgaatcgtttatcaccaacaaaaagctttgtacaattactcgatgtttcagttaataaagtgtcaatttcatttcatggacggc

SEQ ID NO: 15626 - DNA, 1394 bp, Oryza sativa
  ref <308>: DATABASE ACCESSION NUMBER: AK066144
  ref <309>: DATABASE ENTRY DATE: 2001-12-06
ggccgcgatctgacggtcgcgcactcgcactcgcaccgcaccaacatggactacggcgccgccgcctctcacgccgccgccgcggggccgccgccggcggcggatccccaccacccgcactaccctcacccctacgccggctacccttacccctacgcggcgtacaacccggccgcccccgcctcggagcccgccaccgccgcctcatcctcctactactaccccaccgcggtctccgccgccgcctctgccggccagtacgacccctacgcggcgtaccagtactacgctgaccccgccgcggccgggccaggcagcggcggcgccgggggcctgccggggtactacttcggcgccggtgaggcgtttcaggccccggcatcgtcggcgtcgcagggtgctccggcggctaccgcggcggctggcaaggaggccgggaagcactttgggttcgatcctcagcgctacgcgcaggcagcagccgccagatcttcgaattgagtggcaccagcaattgcagccccaggcatgcaccctgctcagtggaatgcccatttcgggcatcctgtgccgaaaattgtttcaagaaagcatataaagaaaaagccaaaggttgtgcaaccattgacttgtgaagtttgcaagattcagtgcgatactccagaagttctaaggatccataagacgggaaagaagcacaagaaaaacttagagaggctacaagactctatcacacctaaaccagtaaagcctccaagtactccaaacactgttgctcttgcagcaaatatggcacctgatcctgtcactactagtgtcactaccagtgtgattcctgctgcacaaacgaagaagaagaagagtgctgcagcaaccccagaggaactggaggtgaagaggaggcgtgtacttgacgctggagcagctcaaggagaagtgaaaatatgtaccgtgtgcaatgtggtcgtcaacagccagaaagtttatgagtttcacataattggtcagaagcataaggccatggtacagaaacagcaagcgcagccacctatagcctgaggtggaaagcaactatgcttgctcatttttctccggttctattttgttgcaacagagaacagaatgcacaagctcctgtactcctaatgaatgtaacttagctaaactgcttgaagattatttgggctctttgtgcctgccgcagataagtagtcggagtttggagcgaaggttgtcttgtgcctgtcttccagttgtttattgaccaatccaagattgcagaatgttgccctcgctatgtgaatttagccctgttgtttaatgacaaaacgtcaattcgaaattgtatatttcaccgtcggatgatactccctttgttcaagaatgtgtttagc

SEQ ID NO: 15627 - DNA, 1073 bp, Oryza sativa
  ref <308>: DATABASE ACCESSION NUMBER: AK066145
  ref <309>: DATABASE ENTRY DATE: 2001-12-06
gtcctgtgccccctcctcgtctttcgtctcttctctccttccttcctccccttctcttcctctcctcccaccgagtcgccgccctctcgctttcaacccccacacggaagcaagaattgttcatcaaaacccgatctttggcgtggccccgtggatttcttgcgatctgtttggtgctatggatttctgatccggggtttcttggatcttggggagtaggaggtggggggcggcgatctggccgggagatggccggcgggaaggagccgatcgaggtcaagttccggctttttgatggtacggacatcggcccgagcaagtacgacccctccaccaccgtctccgcgctcaaggagttcatcctcgctcggtggccgcaagataaggaaataactccaaaaactgtcaatgacctgaagctcattaatgccggacggatattggagaataaccggacacttgctgagtcccgtgttccagtaggagaggttccaggaggtgtaattacaatgcatgtggtagtacgccctccacaacccgacaaaaacagtgagaagcagcttgcgaattcccccaagcagaacagatgtgggtgtaccatactgtgatacgccgcctgcctgatgatgatgtacaatgtctcgctctaggattttgtatctgctttcctgtgttcgcagctcttgtgaattcattttgacatccaattttagagccattcaaatcctagaaatatacatactttaacacccgtcaaatatgcttgggagctggaactgaaggtttctggaggatgcgtcatggtgatcttaatgttgtaacgagtgtgcagaagacagggattggatgctttctgttgtataaattgtaatgtgaaaacgaaaaaaattctctcctttttcttttttctcttgccacattgacattttatcgattctttttagcactggtgtttgtcatgtaaaaccagaatattgtactcatatatgtaagctgaaaaaaggggtgttttattctgttacgtggacggaaaaaggaaagaaaaaaaatagaatctgtcctatagttatccc

SEQ ID NO: 15628 - DNA, 2883 bp, Oryza sativa
  ref <308>: DATABASE ACCESSION NUMBER: AK066146
  ref <309>: DATABASE ENTRY DATE: 2001-12-06
gagttgagaaatctgcagctgaagcagcaatggaagcactctacttggtggcgtcgttggccaccacactcctcacctccaccttcctctcgctcctcctcctccaccgcctcccgctccccggccacctctcccccgacgacgcccgccgcgtcgcctccacctccggccccgtgcatctcctgacgattcccaagagcgtagggtacgagcagaacccgctcagcatctactactgctatgattcagcagagcaaggagaagatgagaagctcaagatgtgcattgctgaggtcacaaacaccccatggggggagagggtaatgttcaccttccaaccaggctctgatctcgtcgcgaaaccgttacatgtcagccccttcatggatatgcttggcaattggagtattcgtgctgagtcccctggggatagtctctatgtggttattttagttcagcatccaacactcggcaactatttcaccgcagcattgcacgccaagttagtcgagaagacgagtagttctcttaggctagcaacattcttctggctgatgccccataaagttgctgcagggatatactgggaggtaagtgtcctgtacttgttcttaccattccaataccacacttgcaaaagcattttaagttttgtatagatggtatcttgaaactctagcagttagcgtctgaggactacaaactagaataactcgatggctactttttccttttaattcttgttaatttggttttagaataaattgaattgatagtacaaactgaattaacatatgagcaaattatgattattaagagtttacatttgactaaccaagttttaagttgaaaatgcaagaaaagcttcgaggcttaattcatggtctccatgattagcttttgtttgaattatgtttaaaactcttatgtcagtattcactaggaatcagatcaacattgattccttttatgcctgatttctttttaataaaaccaaaaggggtacattggaaaccgcaataacagattccatgacatcattctcacaaacctaacacaacattaaacagttgaaaaatgaaatccacacaataatcacgataacatccgacatacgcaaggaagttgacatggtacaatcagattggtacaaatattcagaatagcctaacttggacaagtacaaaagataataatgtgcttgttagacagagatgtcaggatctgacttaacctcaacaatcaccatcagtgcatatttcaataaatattcaccaaatgtccctttcattgctagacacatcttcccacatcgtccagcttcattccatgaaattatcttgttataatgcatttttcgtatgttagtcagcaaggcaccatgtttttgttggcagtgtcaagctcattttgtactttagtcccttgttgtggcaacccttgctatcgatatactggataccatggactgacactttttgtaaaagctttattaactattccaacatatccttatctccgctcatcttactgcaatctatcagagtcccacttcgcataagctcttagtctgataagagaatctttgatgcgatgcaagtttagtctttctgtcaaaaactgcagtcacttgagtgaaaaataagtttgtaccatgtccatagtccataccctttattgacatcttaactttggtagttctgttcaattagatgcttctatgcttatcaccttttcacagtcatgaaattcataggagcataaccaggcccaaattacatgagacataagtaaagcttgttacttctcttcaggccatgtcataaattcacatcttgaggtagcatgtcttcgtactgaccattcaagacatggaaagcatctcatttctgctactttatcaaagccaaaaaaaaaatgaatcttctattatatttagcgttttgatttttgttgagaaagaatattctgagctagcaaactaggatctggagcttatcttgaaaacttgtaataggatacttgcaacttgtaatgtgtctgcatcaactcatcaagttattctaagcaactaagcaattcatggcatggtgatttctgtcagaatcacggttgctaagagcatataataaattcagataattctagtgactacaaagtagtaggacccagcttgattcacacctaaactggcattttcctctcaaacatgccgtttcatttccttcctggtcttaataactggtatgctctgctactccttctctaggccatcagactttggctgaagaacgtcaaattcctggaccatccaagatacttgaacttgaattacagagatgaagctcagaagcgcgatctcgagatccgttcatcgtgcagctttcttcagaaacagaagctgaacgaccaaagaaccggtcgcgccgatgaaactgctgaaatcacagatcatcatgatcacaatggtgaggagagcgttgtgaagaggtggtgtgtgtggacagatgcacaatggccatggtcatgattcaaagagcaccaagttgtctttcagaaaagaaagggaaagaactggaggagatagcatgtggattcagtattacactcttgtttaattattccttccatgagtgaataatagaacttcaccaaccattcgatcgatgtggattcagtactatactgcaagttgttgcaagtgtcaactaactttagtttatttctttcatgtgtgacagtgagaaagctgaatgttttctaattaattaatcacatgtttttgttccctgaagaaaacatgttcttcagtatcgtgaccagtttttgacccgatcggatactaatgttctaaattcgagtgtgtaatgccctgttgatgcc

SEQ ID NO: 15629 - DNA, 3362 bp, Oryza sativa
  ref <308>: DATABASE ACCESSION NUMBER: AK066147
  ref <309>: DATABASE ENTRY DATE: 2001-12-06
tggtgtgccaccaatctagtctggcccgcagccgatcgagccggcccaaattctgctcttcatcgcctacacgagccacgcctacgcatcgcatcgtcccctccgcgatcgcaggcgctcgcagcgccatgccgaggaggagctcgagctccatccacctcccccgcaatctctttcaccgaatcactgatcaagccgccaccaacagcaaaagagaccgcctccgcccccctctacctccgcgcaagagccgcacaacacttcgcctcctccaccgccgtcgccatccgcaaaccaggcgaaaccctaacctcaccgcctccgccaattcgcgagaactcgccgcacctgagacccggccttcgtccgaaattgagatgcccggcaggctattctcaaagggaagccacaaaggcccaaattgttgctatatattgagggatccacaaatgtctgaagttgtcttccgggataacacctgaaagctcattccatgataagtcaagggattccaagatattcaaattgccaattctttctggaatactgcctgaaagatcattccttgacaagtttagataccggaggccctgaaggtatgttagctcttttgggatttcaccgtaaagtgaattgcttgataaatcaattcctgtcattaacatagctgttccttgaaaagtttcttcatgtcccttccataatatgttaaatctgtctctagactgatcaagagggaacggataatcgtatcctcttgaaggggcacttttccaattaaaagtccctattgtggggaaggtttttgcttgtttcatggatgataagttggcaaaagttgttgggatgaatccagttaacccattgctggccaaatcaagaagttgaagctgagaaagttgggataattctgtgggaatctctccactgaaattatttgatcggaggagaagaattcttaggacaggaagactagttcctatccaagagggaatcttgccaaagaacttgttgctccacatatcaagcgtaacaagtgctctgcagttgcgaatggtggctgggaaaactacagagaaactattgttagcaagatgcagagattggagaggaagttcagggcttcttgatgctggcaattcacccgagaagccgttgccagagacgtccataaacagcaaagcttgcaactcccaccaacaccttgggagctcaccattgaatcggttatttgatagatccaaaaactgaagagatgacaatgtacaaaaggtcgaatcaaggttgccggatatgctgttaccgttgattgacagatatgtgaggttggtgcactgtccccagtcagacgatagccgaccggtgagcttgctcccggatatgtccaagtattccaagctggggtgtatgccgaaggcatctgagatgtcgccggtgaagtggttcccgtccagccgcacccggtataggcttgtgcagttcttcagacatggcggtagcgtgccgctgaagttgttgtggttcgccgtgaagcgctccagcgcgaagccgtcgcagatgtggcgcggcagctcaccggagaagctgttgttggtgaagctcacgtgctgcaaggctatgcccttgccgaggtccggcgggatggtgccactcatgtagttgttgaacacggagaggtactgaaggttcctgagggacgagatggtggcagggagctcgccttgcagacggttggtgttgacgtccaacctttgcaacgctgtcatgttgccaatctcaggtgggattacaccggtgagatcgttgaagaacaacgccaaagccgtaagctgcttgaggttgccgattgatctagggatcggtccggtcagcaagttgtttgacaaatccagctcttccagattctccaaatcgccgagttctgccgggatggatccgcaaaggttgttgctgaacaggtaaaggattttcagtttcctcgccatgccgacctcttttggaatcctgccagtgaagaagttgtactgtacttggaacgatatgagctcgggccagctcgtgaacaacaccgaagggatctcaccggtgagcccgttcatttcaagtccgaactcccgcattgcgcacatcccggcgaatgccgggggcaagccaccggagaggtggttcacggatatctctagaaaagtgagattcttaagatttcccagctccggcggcagagttgaaacaagcccagcgttctttatcttgagccgctgcagcatctggagctggccaagaaccggcgggatcgccccgccgagctggttgtcaccaagttcgagaatcctcaactgtgacatcgacccaaggaactctgggacgccgccggtgagattgttggcggcaatcagcaggtcctggagcttcgttaacctcctgagcgacgccggaatccggccagagaattcattgttggacaagttcaggtacatcagattcgggagcttctccggcagtgtgtccggcatcagcccgaacagagtattctgcgacaagtcgaggtaggtgatgttgccgctcttgaggatgaagtccgggaagctaccattgatggagttgtcgtagagcgacatgaatgtcacggtgggcatcggcgagaacttggcgaagtcctggtcggtcaggtagtttgctcccaggtcgaagtgggcaatcttggggagtcggctgagctggtgcgggatggcgccaacgaggttgttgttgtagaggcagaggtcgacgaggccggagaggtggccgatctgcggcgggatggagccgttgaacccgttgtcgccgaggtcgagcgaggcaagggagcgcagttgcgagatgccggccgggatgtcgccggcgaagctgttcccgttgaggtcgagctcggtgagcgccgggaacgcggcgaagtcgagctcgagcgtgtggaggccgccgccgagtcccagtccccggaggcgcagcttcgtgacgcggccgccgccggcggcgtcgcagcccacgccgcgccaggtgcagaccggcgaagcccgcgtccagccggacagcgcgaccgggtcagcgaggctcgacttccatgccagtagcgcgtcggtctgctgggacgatgctgcggcattgactgatcctgggatggaagcgatcgccacgaggagggggaggaggaagaaagggtggacgacgggggccatgcggagtaaaacaccaacgcagtgatcctgcattgccgtcgtctccggctatgccttttcgggtccctctttcaaatatgaatatatgatggtgccaatagctaactatatataaatataagtgatttatttttttttagataatgg

SEQ ID NO: 15630 - DNA, 1939 bp, Oryza sativa
  ref <308>: DATABASE ACCESSION NUMBER: AK066148
  ref <309>: DATABASE ENTRY DATE: 2001-12-06
gactcttttttttttctcgcccggtcgcggcggccataccgcaacaagttctcctccgccgtcgcttccacggcctccccccatcccaaacgcggtcgatcgccggcgaatccccaccggacgccgaggcgactgccccgccgctcgccaccctccatccccggcgtccccgaagtaacccaccgcctccttcttcttccctccatctctcctgcacccgagtgagggcgaccgcgatctctcagatccaccgaatccggagaccccgctcgcgatcgagtcaaacgcctccgaacccttaatcctcgccgccgccgccgccgccgacgacgacgacgaggacctccccactaggatgagcgggaggaagaatgccggcaaggcctcgccgtttctgctcctcctcatctcggtgggctgcttcttcgcgacctacaacttcctgacgatggtgggccacggccggagccgggacgccgggccgcggaagattctcggcggcgtcggcggcgtcggcggcggcggctcggacccgtcgaagaggttccacgtcgcgctcacggcgacggacgcgctctacagccagtggcagtcgcgggtgatgtactactggtacagggagatgagggatcggcctggctccgacatgggcggcttcacgcggatcctgcactccgggaagcccgacggattgatggatgagatacctaccttggtggttgatcccctccccgaaggcgcggatcgaggttacattgtcctaaacaggccttgggcatttgttcaatggctgaagaaatcaaacatcaaagaagactatgtacttatggctgagccagatcacatctttgtgaggcccattgccaaacttagctcatggcgacgaacctgctgcgtttcccttcttctacatcaaaccaactgaaaatgaaataatactgaggaagttctttcctgaagaaaatggaccagtctcaaaaattgatcctattggtaattccccagtgattatcaagaaggcccagcttgagaagattgctccaacttggatgaatatttcgttgaaaatgaaagaggatgtggagacagacaaagcttttggatgggtcttggaaatgtatgcatatgctgtcgctagtgcattgcatggtgtgcactacagccttcgtaaggattttatgattcagcctccttgggacgcgaaatcggacaacacattcatcatccattacacttatgggtgtgattatacattaaagggtgagctaacttatgggaaaataggggaatggcggtttgacaaaagatcttatcttcgttcaccaccgccaagaaatcttacattacctcctccaggagttcccgaaagtgtggccacccttgtgaaaatggtcaatgaagccactgcaaacattccagggtgggacgaagaaaggtgattaaatggttttgcctcgctgatactcaattcagctgatagtgtttacattagaagccatcgaaggatctccgtggtcaataaaacaagtgaatcaacgcatgttcttcttaggcggcagacacgattggctaattcctacaaattaacctagaattagtttttggcaagtaaaacacggtagttatttggtcaagtgaggtggtccatttttggtgttgtaaagctgaaacgtgagcttttggtaatactcctagatcattcgattgtattgtaaagcagaaatattagtcaagtttgttgcacgggaatgttactcgataattgaggcttgggatccttcgcgcttgtgccattacatgaaatctttcaaaaagtagtgtttgtcatgagaggattgagagagatggtttgagagggaagcatggaattcacatgacgatcaggtgttcctagttaagttgcatacttacagtccaagtccgaagtccattgatgagc

SEQ ID NO: 15631 - DNA, 3858 bp, Oryza sativa
  ref <308>: DATABASE ACCESSION NUMBER: AK066149
  ref <309>: DATABASE ENTRY DATE: 2001-12-06
ggctccccccgactccctgaccgcttgcttcctcccccctttctcccgcccctctccaccaaaccctaaggccgtctccctccctccgcctccccgttcgccatctccccgtggcgtcctccgcggctccttcgggcgcggcggcgtcggcgacggagtgccctcgctttctagagcggtgcggcctcaacgccgacgagttcgacgacgatgccgaggcggaacccacggttggcttgttcggtagatcgattaggggtctcgcggaggttaatttcactgctgttgctggtggtttgagtgtatttttgtttgtttgttttcagggagagaggaggggaaggccatcgtcatggctggatctggtctctccttgctcagcggtagcggcaacgtcctcccctttgtcctggcctccccatcctcctcccaaaaaatcccccactgctggcttcatcgatgacggcgatgatgtacagtagctcccgtgtcacccactccgctagatatggaggcacctcgtcctcttcttcgtctcagcgccagacagtcccctcgtcctcggcaccgtcatcgacaccaaaggaacaatgatgaggcctctgggtggagacgaggatctcggtggtgatgcggccggaggcaatacaacattcgcactgttaacatgacattgaagtgtggttgattaggcgaagaaagatatattttggttggaggattgcagggatgtaagcggtttgaataacatttgggactaacctgacaaagaggttccagtgtttcctctgcgaaagttgttgcgaaaagcagctggacaagacaattatgagattccatttacatggtttttcttcatggtcatgaagcaacttgctcgttggacctgttgcatagcttacatggctcctcccattatgtcttgcttccaataaagacttcatttctttgattgttgggggtgcgcttcagacatgtggtcatgctgccggcaaccgcattggctcctattcagctaagacgcggttcttgatttgttggcgaaaacccaaattctggggaatcattgagctgacctggagttcttgttcagtgttttgctgaatctggatatggcgagcttttagcaggaaacaaacgccaggaatgatcaagggccttttgctgatcacgttgggcatcagaaccacatggaaaacctcacagatcatccagaaaaaactctcagaatgcaaaggatctaggattttctccattgagtttgttgccctgattgcattttgcccctttagttcagagttgttcattctctcgtgagtatgcttgagaaaccagtctgttgttcattctctcgtgagtatgcttgagaatcccgtctatttttttatgtgttctgctagaacctgagttgtgtggctgccttctcatctcaacccatagaagctatttctgattttttttggcctgcttgttttgggggctgacatgcatagcattagtaacaccttcttaacataagctccacctactattttactatcctcttttatgtttaagatggttgctagttcaataacacatctgcatccatagcgattccatcatgttgcttcgtttgtccatgcagggaaaggagaccgcacaaagcatccgttaatttatccattcagtatgagataccaaggaaacccactaaaatgatagttggcaacaacctagcaagaagaacctaaggtggttctttttatttaaacatattatgtctgcttttgatttgggtttaatagtttttgttggtgaccatagtattgcgttttcttaaaataagctctcacgttagtaggtggctatgagctaccatgaggtggtcactgttctttgctccttattaaatgcaagtgttgcttgtgcaggtgatggaaaaaagcaacaagtacttagggtttgtcattctctccagcaggtgatatgctattcaatttattatttcctgtgattttacggtgccactaccttcgttctgttctcggaagcaatatagctaattgcctataatagattacataataaaagtttagcgcatctgccaggtagcattttcatacaatgttagatacttacatgctatgcatctattcaagattccttttcttctgtcatgacctattactggcagtacttatttttgggcactcatatggatcttttctaatggttctctgttaaagctacgcattgttcacacatgaagattaagtgaaaaagatgacacacccatcttacctttatttgctggatatgctatattaaaacccaattgtatgtccttagcgtcttaggtcattgtattgcacaacaccgtttgtagatgagctcaatatatatatacgtatatatatatatatatatacgtatatacatatgtacatgtacatgtatatacatatgtatacatgtacatgtatataagaaatcatggttaaaacaatgaccaaagcttggtgtcttttccccttgattttggttttagaaagctttgatgtttgaacgaaacttcagttccatgaaagcagtcagtgacatgtttgatcaacatattagcggctacaaaatacagaactgccaactgctcatttccccggttcaattagctagtgatacatgggcatgctacatttgggacatgggagaagaggcaaatgcacattttggaccctgtcttgcaacaccgggaggtctccgatgtgagtgctaagcaccgtcagacagttacgatgatccacacaggcttgctaacatgtataaacaaattcttcgatgactgggatattaacccggatggatggacatgtacgtaccacacaaagattagcccgaggtgccaaaaatggaactctgtttttcacacattatactatgcgcgcgagttctatgatggcaagctgagcaatgttctagattcgggtagggttgctgccttgcgcagggatcttttctacaagctcctgactatggaagggaacagcgctgagctgccaagtcacattgcgagatacttggagtagttgtaccaagtgtcatgctggtcgtttagccttttgctagtatgtttatgctgcaagtatctgacgagaacttaggaagttgtcttgtgaccaggataattcccaagaaatctcctttatctaaaaaaatattctaggcgtctagataagccagtgttttctattgataatagcttgcactgaataaaggtatagcagcaagttgtttactagtagcatgtagcaaaagccttttgtatggcttccggcatgttaggactctttgggaagtgcatcactgaatgaatgagttttctgagtaactctttaattcagtagttaaatttgacagtataaccatatgcttctctttttttcttcttttcatttgcagcattgactcgtccctcacaagtgaagaaaggggacaggaacggaagtaagcaggcatcagagcaacatttgtgcagacctactactcactagtagtctatttggagattaattaatcaaaatgagccttcagaaataaatagattcaggggtaaatcctggtgcgtatttgcataggtaagtactctacaaaagaagctgaaggtaatatcggcagaagtttgctccaaggttcagagttgatatgggcatggggcattttaagttattgtactggagtacttaggtaatgtcaaatcctgtactagtttctgtattttgagatgagagagaggacatgtgtagatcgctgctgtgtttgtagtgttggtttgttgtactatgataattgtgttatccaacagcagaatgctttgctgtc

SEQ ID NO: 15632 - DNA, 1527 bp, Oryza sativa
  ref <308>: DATABASE ACCESSION NUMBER: AK066150
  ref <309>: DATABASE ENTRY DATE: 2001-12-06
gagttttcagttcgctcgattccgggttcttgatttcgtcctcaccacgccacgccaacggatttgcgtgcttccccgcgaaggatttccgcgcaatcgagtggagagaggggagggaagagattgattaagaggaggaggacatgggggcgttctgctccaagcagaatccgtcggggcagcagccgcactgctgcaaccacagcagcagcagcaatgccgcgccgaaggggaacaatcggttcgccaagttcggcgatgattaccataccctagagcaggtaactgatgctcttgcacacgctggtcttgagtcatcaaatctgattgttgggattgatttcaccaagtccaatgaatggacaggcagagtttccttcaacaaccagagcctgcattctctgggccatgtctcaaacccatatgagcaagccatatctatcatagggcaaactctttcacgatttgatgaggacaacctgataccatgctatggatttggtgatgctactacacatgaccagaaggtatttagcttctatcctgacaacaaaccatgtgatggttttgaacaagcacttgatcggtacagagaaattgttccacaactacgtttggctggccccacttcatttgcaccgatgattgagacagctattggaattgtggatagtagtggtggccagtatcatgtcctacttataattgcagatggacaggttacacgcagtgttgacacaggtaatgggcagctgagccctcaggaaagggagactatagatgccattgtgaaagccagtgactaccctttgtcaattgtgcttgttggagttggcgatgggccatgggatatgatgaggcaattcgatgacaacatcccttctcgtgcgttcgacaacttccagtttgtgaacttcacagagatcatgtcaagacctgttcctgccagcaaaaaggaggcagaatttgctctttcagcattgatggagatcccagaacagttcaaggcagcaataaacctccaacttcttggaaaacgtcgaggatttccacatcgaacagtgttacctccacctgtgagggatttccaacaatactatgggtgctcaacagtcaaagaaacgcaatctactagctatgggtcgctgcagaaaaagacatcagcacctaaacaggatagtgacataggtgatcagacttgtccaatctgctggttggaagcaaagaaccttgcttttggatgtgggcatcagacgtgctcggactgcgggaaggatctgaaggtttgccccatttgccagagggaaatctccacaagaattaggctctactgaagttgagaatctatacgcaattggcactttttagcatacacttacactttttgttccttatgatttaagattttgcaagagggagcactagctgtaaatacagtttatcagtgttatagaatactcatggtattcaaactagtactggtcattttggatagcatttgtgaaatgaatgttcctatcattttgg

SEQ ID NO: 15633 - DNA, 2872 bp, Oryza sativa
  ref <308>: DATABASE ACCESSION NUMBER: AK066151
  ref <309>: DATABASE ENTRY DATE: 2001-12-06
gacatgcatctctcctctcctctcctctcctcgtatattcctccatctcctcctcccgtcccaatctccaatctccaaccctcgcaatcccaaatcccaacccgaccccgacacagatcctctccgctaatcccaattccgccgccaaaatccacccttgcgctgtccccccctcgccaattcgatcttgattttgatttgagaaaatcgcgtgttcttttggagggaagagaagatttgggagttcttttgaagggggggggggttgatggtggcgaggatgtggccgtggccgcctccggcgaggaagttccgtgtcaggctggtggtgcggcgggcggaggggctcacggcgacggcgacggcgacggcgagctcgtcgccggtggcggaggcgaaggtggcggtggaggtgaggtggaaggggcccaaggcgtcgccgctggggtcgctgcggcgggtgatgcacagcaaccggacgcggctggagtcggcggcggaggcggcggtggcgtgggaggaggagttcgagagggtggagacgttcacggcgacgtcgcaccgcaagtccggcgccgccttccacccgtgggacctcgccttctccgtcttcgtcaatgattcaaataaagggccaaagggtgaattgattctgggtaccgcttcactgaacctagcagagtacacatctgcttctgaagaagtcgagataatcctcccattgtcggtgccaaacggttcatccgagtcttccccatcacttcatctcactttgagcctggtggaattaggacctcctcaccaatcacctgatgcttcacagcgttctgctgttaccgctcattgtcaccttccagtggtgactctgttccttccagcaaagatgaggtttcttctgtcattaaagcggggctgagaaatctaaaaattctcacagatctagtgtcgacacggaggtccaaaaagactaaccgagatgatgatggcagtgaggataagtgctatgttcacagtgatggtgctgaatacccttctgatactgactccctcgacgaagatctagatgatagagagcgggatgatggcttagggggttcaactgtcaggaaatccttcagctatggttccttgcagtctgtgaattatgccggtggcctactttatgcacatgcaaggattgatggagagcatgaggactggatatactacagtcaccggaaatctgaagcgggttattctgtagagcaagaggcctcatccactgctgaagaacctgtggtttcagtatcgcggaggagtctgcttccctggaagaagaagaggaaattgaatttacggttattgaaggtactgaagaataaaggggaacctttactgaagaaggggaatgacgaagagggaggtgatgacattgactacgatcggcgattattgaccacttctgacggaaatgctttagagggatcagatagctccatcaatagtatggtgtcaatatttggtgatgataattttgtagttgggaattgggagtcaaaggaagtacttagtcgtgatggccacctgaggttgtctacccaggtgttctttgcatcaattgaccagagaagcgaacgagctgcaggggagagtgcctgtacagcacttgtagctgtcattgcagattggtttgaagcaaaccaggatctgatgccaatccgctcgcagtttgatagccttatccgagaagggtctctggaatggaggaaactctgtgagaacgagacatacagagagcgatttcctgacaagcactttgatcttgaaactgtccttcatgccaagatccgcccactcacagtttcccccaacaggtcattcattgggttcttccagcctgaaagtactgaggatggaagtggattcgatttccttgatggagcaatgtcatttgacaacatatgggatgagattagccgagcagcagagtgctccactggaaaacctactctatatattgtcagctggaatgaccatttcttcgtcctcaaggttgaggctggcgcatattacattatcgatacacttggtgagaggctgtatgaaggttgcagccaagcttacatcttgaagtttgacgacaacactacaattcacaaagtacctgctgaaaagaaagaagccaaccctgattccagcgggcggttgaaggattcgtcagatagctcatcaactgatcaggacagcggaactgacactgaagagtgcgagctcgtgtcgaagggtaaagaatcatgcaaagagtacatcaagagcttcttggctgccatcccgatccgcgagctgcaggccgacatcaagaagggtatcatagcatcgacgccactgcaccaccgtctccagatcgagttccattacaccgaatcatgccccgaggagatcccgctgcctgctccattacctgccattgaagctccctttgagttctcctggcctgagccgcctcctgccatggaggttaccctagcacccgcagtcgccgccatataactcaccatggaagtgcctgccctaatgtttaacatatagagagcctctttttcagggcgaattgtgaagtgaaccagatcaaagatttggcttcgtttctagtttgcactgtttttttgctgtctaattatgatgaactgactagtataggtgacccccccctccccccctttggtgtatgttttctacttttcttcaccttcccttccaggttttagagctttcattttgtaaagaaggaaagggtgtttgctcctagttatcttcacctgtgaagtggcttgtgctcaacttgtaatccttgaaccatatcattatgttaattaagcccttgttatcttcc

SEQ ID NO: 15634 - DNA, 2005 bp, Oryza sativa
  ref <308>: DATABASE ACCESSION NUMBER: AK066152
  ref <309>: DATABASE ENTRY DATE: 2001-12-06
ggcgctcgctcgcacgtgccgcctcacctcctccctcccacgcaccgcctcacccttctcctctcctcgcatgcgccgccgccgccgccgcagctccacgctcttctagccatcttcgccgcgccggaagatccagccacccggacaagagtggtgctggccgtcgcttcccccttctcccctttcatctccacgcgcccaccgcttcccgctccttcacgctctccactccgctcggtgcccgatctggttcgaggacgggcggagctaatggtctaggcctccccaccggtggatttggttgccctcgctccgggctctggcgccggggatggtgctcgtgctccctcgacttctccgtgcaccctttaccttatcctctgcacgatgcggtggcggcgggagggcggagagaagcagctgtgccgcattagctcttcgctggtttcagaaactcaacttgttccaggtatagttccaggtgttccgtgctcgtcaggactgaaagagattacatatcttatttggtgattcgcaggtatgataatctttctcccacttttgttttcctgtcatgacatagaattagtgaagagcaaaataatgcatggcggataaatgattgcaacttgcaaggcagcatgttaaacatgcacagctctctcttgccttggaaattcttggactaggagatgtgtttacggtgcagttgacacatgcgttcagttgtcaacactcctaaacccttcacctttcgtctggatcaaatgaaggattgaaaatatgtgacttttcctatcttaattccatcggttggctagctccttctagccaacacattttttttaaaaaaaaaattcttggactggcgttcccagccttgagtacactgaatcgcatagaaagtactcatctcatattttcatgtcatgtagcatcaaatcctctctatgactttatggatctatggtttttgtttaggcttcctgttggtacttaattagagttgtttctttcatattttacttcagattcagtcaggattggaagagatcttatgtgataattaacagaagttctgtagtgcaggacattcctgccgctggtcgtgtcttggacagccagagctcttgaattctcagccttaagtacattggatcacatacagggtactcacctcatgtcatgtatcatcaatcctctttatggacctggagtcacaggtgcacctcatcagcttaagctctcaaggtctggcttcttggagtctatatgggcctcgtgccattctctctttgcactgaggcctgctgagtgcctggatgcttataacatactctctctctctctctacttgtcaacactgaaatatgttttctcaggacctcacgagccccaagactatgatcttaggaattccaatgaattttgggatgaaattcgcaggggactggttgacaaggattctttagtgaggaagcaggctttgtacatcttgagaatatcactagacatctttccctcatctaagaatgatgccgctcagcaatgctccaggaagaggtccgccgctctgcctgttcaagacaaaccaaatactgcaatgacaaaaagagagaggtgggctcagaaagaggccagatcccttggcatcggagaaacgagccaatcagatgaaaactgctcaagtcgtaaagaccggtcgaaagttttcctgttactctatgagatgcttcaggagtatggaacacatttagttgaggcggcctagacgcaccaggcagccattcatgctattgtgcttcttttgtggattggaataggataagaagcttgcacatggacttatagtgggtctgtactgtctgaatgggttcttattacaattatttttccccctctttgtgccttatgtatattggtgctctatgaaataatgtaccatgtaaccgataaatcatcattgacatatcaaagtgcacctatgtatgcgctatatttctct

SEQ ID NO: 15635 - DNA, 3088 bp, Oryza sativa
  ref <308>: DATABASE ACCESSION NUMBER: AK066153
  ref <309>: DATABASE ENTRY DATE: 2001-12-06
gggaggcccgtcttctccctagtctctcttcttcccccttatctctagggaggaaagaaaaataacaagaacgcaccttttgtctctctcctctcctccgaggtaaggtttggggaagctacttctgaccatggcaggcaccctgctccagccggttgccctcggaacaacttttgcaggccgtgtaagtggtcagcgatggaagtctcatggcacaaggaggcctccctcaatgttggcgatgtccttgagccgcccagttaagatggccgcatttgtcggtctgagatcggtgcatagcttctcagtcacgcctgtcaccaacttcagatcgacggttgcatcttacagatcaagacggggaaggcgtgctcgcttgtaaccagatcgatgtttgagaggttcactgagaaagctattaaggttataatgcttgcgcaagaagaggcaaggcggttgggccacaactttgtcggtactgagcaaattctcttgggtctgattggagaagggactggtattgctgctaaggtgctcaagtcaatgggcataaatctcaaggatgcacgtgtggaagtggagaagatcattgggaggggcaatggtttcgttgctgtcgaaataccattcacaccacgtgcaaaacgtgttttggagctttcattggaagaagctcgtcagctaggacacaactatattggatctgagcacttgcttcttggactgctccgtgagggtgaaggtgtagcagcccgtgtgctcgaaagccttggagccgatcctagcaatattcgcacgcaggttatccgaatgattggcgagactacagaagctgttggtgcaggagttggaggagggagtagtggcaataaaatgccaacacttgaggagtacggaactaatttaacaaaattagcagaggagggaaagctagatcctgttgttggaaggcaaccccagattgagcgtgtcgtacaaattctgggcagacgaacaaagaacaacccatgcttaattggagagcctggtgttggaaagacagcaattgcagaaggccttgctcaacgcatttctactggtgatgtgcctgaaacaattgaaggaaagaaggtcattacccttgatatgggacttcttgttgctggtacaaaataccgtggagaatttgaagaaagattaaagaagctgatggaagaaatcaagcagagtgatgagataatactatttattgatgaagtccacactctcataggagcaggagcagctgagggtgctattgacgctgctaacattttaaagccagcattagcaagaggagaactacagtgtattggagccaccacacttgatgaatacaggaagcatattgagaaagacccagcattagaaagacgtttccagcctgtaagagtgccagagccaacagttgatgaaaccatagaaattctcagagggcttcgggaacgatatgagatccatcataaacttcgttacactgatgatgctctgatttcagctgccaagctatcttatcaatacatcagtgatcgtttcctcccagataaagcaattgatttgattgatgaagcaggttcacgtgtaaggcttcgacatgcccaggttcctgaagaagctagagagcttgacaaggagctcaagcaaatcacaaaagataagaatgaagctgtccgtagccaggacttcgaaaaggctggagagttacgtgatcgtgaaatggaattgaaggcccagataacagctctcattgacaagagcaaggagatgagcaaagcagagactgaatcaggggagacagggccactggtcaatgaagcagatatccagcacattgtatcctcgtggactggtattccagtagagaaggtatcaagtgacgagtccgataagcttcttaagatggaagagactttgcatcagcgtgtcattggtcaagatgaggctgtgaaagccataagtcgctccatccgccgtgctcgtgtgggcctcaagaacccgaacaggccgattgcaagcttcattttcgcaggtccaaccggtgttggtaaatccgagctcgcaaaagcacttgcagcatattactttggatctgaggaggccatgatcaggcttgatatgagtggattcatggagaggcacactgtatccaagttgattggttcacccccagggtatgttgggtacacggagggtggacagctgactgaggcagttcgacgcaggccatacacagtcgtgcttttcgacgagatcgaaaaggcgcatccagatgtattcaacatgatgctccagatcttggaagatggaaggctgactgacagcaagggaagaacagtggacttcaagaacacacttctcataatgacttcgaacgtcggaagcagcgtcatcgagaagggtggtcggaagataggtttcgatctcgattacgatgagaaggacagcagctacagcaggatcaagagccttgtcgtcgaggagatgaagcagtacttccgccccgagttcctcaaccgtctcgacgagatgatcgtcttcaggcaactcaccaagctggaggtcaaggagatcgccgagatcatgctcaaggaggtctttgacaggctcaaggccaaggacgttgacctccaggtcaccgagaagttcaaggagcgtatcgttgacgaaggcttcaacccgagctatggtgcgaggccgctaaggagggccatcatgaggctcctggaggacagcctcgcggagaagatgctagctggggaggtgaaggagggtgattctgccattgtcgatgtggattccgaggggaaggtgattgtactaatggccaaagtgggttgcctgagctttcaactccggctgtcactgtgtagtagttcatatatactgcagagtgttaagagatgcagtgcttttcattcagatatatttctgcatagttagcaacttagcataactgtatatatagtatatacaaatcaaaggaggaggaaacaccagctgattcctggtttctcatgtttgggacacctttttttttattaacaataatttcatatggtagagggatctt

SEQ ID NO: 15636 - DNA, 683 bp, Oryza sativa
  ref <308>: DATABASE ACCESSION NUMBER: AK066154
  ref <309>: DATABASE ENTRY DATE: 2001-12-06
gagaggtctgccatcccccaatcctcccaaggccgtgaaccacaaaccgacaagcacagcgggcgcgagggcggccggcgccgggcggagcacacgcctctttcacaccatcatcgccagcgccggatccatccacgatgggcggcggcaacgggcagaagtccaggatggcccgcgagcgcaacatggagaaggccaagggcgccaaggggagccagcttgagaccaacaagaaggccatgaacatccaggtgattttcagggggactttttgggcaagacaatggtctttgctacttaaggaagaagatggccaaaaagtgagagaaggttgcttgattctagagaagagagtttctggctttttcgcaatgaagggatggaacttaaggaaaagattgggagattaatgctctctggttttcttgtgtggtatggttgaaactttgtattaactttttaagaatttctgttgctagagcctaagtactcgggtctagttgcttgtgatggtgttaaaccttgtgtaagggtgtgagtttatgtactcttgtaagtttcgttggggctgtgtacatccttttttgggtgtagaggccggtttaatccattatctaaaaaaatgtaaaggatgcactatatggcactctgaagtaaggtttcctgagtatggtcttttggtg

SEQ ID NO: 15637 - DNA, 2118 bp, Oryza sativa
  ref <308>: DATABASE ACCESSION NUMBER: AK066155
  ref <309>: DATABASE ENTRY DATE: 2001-12-06
gtgtggcagctcaagagagagaagagagagaaatagaaactgcccaaacatgggggtttctccatggattatcatcttcttgttgattgttcttgtgcaagcttttgtcgcttcggccgatacgaacgcacaggacacttctggacttaacgggcttgcaggtagctggggcagcgcaccatcgaattgggctggcaacgatccatgtggagacaaatggattgggataatttgcaccgggaaccgggtcacatccataagactgtcaagtttcggactgtccgggacgctttccggggacattcagtccttatcagaattgcagtacctggacttatcctacaacaagaacttgaatggcccccttccttcaaccattggaaccttgagcaagctccaaaacttaattcttgtcggctgcggctttacaggtgaaataccaaaggagataggccagctctcaaacctgatatttctatcattgaactccaacaagttcactggtagcataccgccatcgcttggcggcctctcaaagctatattggtttgatctggctgacaatcagctcactggaggacttccaatatccaatgcgacaagtcctggtctggacaatctcacaagtactaagcacttccattttgggataaaccagctctctggcagcatacctagccagattttcaactcaaatatgaagctgatacatctgcttcttgacaacaacaaattctccggtagcatcccttctaccttaggccttcttaatacactggaagttctgcgtttcgataacaatgcgcagttgaccggaccggttcctaccaacctcaagaacctaaccaagcttgcagaattccatctagcaaacagcaatcttactggtccattgccagacctaactggaatgagctcactcagctttgtggacatgagcaacaacagcttcagtgcatctgatgcgccctcctggataaccactttgccatcgtcattgacttcactgtacctagaaaatctgcgcaaccgtctgaatggcaccctaaatatagcagatgctactccttttagttctaatgctgagagcagcaatacgcatgagccagaagttgatgcacatgcgatatacgtgaggagtctaccattaaatgccactacgacacaactggaggatgagttcaagaagtttggcaccataaaacctgatgggattcaagtcagaagccataagattcaagggttctgttatggctttgttgaattcgaggaagctactgcagtccaaagtgctatagaggcttctcctgtaatgattggtggacgccaatgttttgtcgaggagaagagaacacctggttcacgaggatccagcagaggaggaaggtttgcaccaggaagaggtaataacaacttcagagctgacgggatgagaggccgtggcaattatagtggaggaaggagctacggaaggggtgatttcagttacagatctgattatggtggcagaggtggtggcagaggtgactctgcgcgtggacctgatgttggctaccagagggttgacggtggtcgtggtggccgtacatcagcaggccctggtgcccctgcaaaatgaggggcgaagtagcttgtgtctctagtattatcattccatggtccttggaatgtccagattcaacataggcttcatcaattgattgcatgctggaattgtcaagcccaatttacaaattatgaggttctatttttgaaggcggcaaaaggggttaaattggttgctaattgtagaatatacacctattcatatgtagtcttagcttggtctttgatgatcagctgatgtgttattttttttctttttgtgttaattttgtcccgtttaagtttggagcattcatttgttgtgtccatttgattttatagttactacgaactgctgaaaatttgattttatagttactacgaactgctgaaataattgatagtttagactctagagtagctggtaaagtagtaattaggagagattttgtcttgttcttgtgatgtcttgaggcgaaggacactcttattgatactagtttgatactggtttatttaattttcgaggaattt

SEQ ID NO: 15638 - DNA, 1194 bp, Oryza sativa
  ref <308>: DATABASE ACCESSION NUMBER: AK066156
  ref <309>: DATABASE ENTRY DATE: 2001-12-06
gacacactttgctcatctcatctccctccttccctcctataggaatccaaacccgccgcatcccggttcatgtcctgccgctccccatgtcgccgcccctcgagctcgactacataggcctctcgcctccgccgccgccgccctcctcctcctccgccgccgccgcccgcgcggacgacgtcgacctgaagggcaccgagctccgcctcggcctccctggctccgagtcgccggaccgccgccctgcggctattgccgctgccgctgccactgccaccacccttgagctgctgcccgccaagggtgccaagcgcgtgttccccgacgaggccgcgctgacgccgcccactgccgccgccgggaagggcaaggcggcgagggagggggaggaggtgggggctgaggaggaggacaagaaggtcgccgcgccgccgcagccggctgcgaaggctcaggtggtgggatggccaccaatccgcagctaccgcaagaacacgatggcaaccaaccagataaagagcaacaaggaggatgttgatgctaagcagggtcagggtttcctgtacgtcaaggttagcatggatggtgcaccatatctgaggaaggtggacctcaaaacttacaagaactacaaggacatgtctttgggtctcgagaaaatgttcattggcttcagcaccggtaaggaaggtgctgagaaccagaaagatggtgaatatgtgttaacctacgaagacaaggatggtgactggatgctggttggtgatgttccatgggagatgttcaccgactcttgccggaggctcagaatcatgaaaggctcagatgcaattggacttgccccaagagcaggggaaaagtccaagaacaggaactagaatggttattgcccacagttgaaagcaaaacggagatattaattaactgcaggagatggtggtgactacccctcctagggtttaccatctgttcattccaagtggctggtgtgagagaagatggatgtggagcattgcatatcattcattcagttaatctgctagtgtgtgtggcaatgtcaattctttccttatcctgcctgcccctggtattgctgtgtagtacttgttgacataataccaagcagagcagcatccactactagtagtacctagtgatgcctaccaaggcactggaataataatccttttgatg

SEQ ID NO: 15639 - DNA, 1650 bp, Oryza sativa
  ref <308>: DATABASE ACCESSION NUMBER: AK066157
  ref <309>: DATABASE ENTRY DATE: 2001-12-06
gccccttccccttccctttctccatttttgcaaggggaaaaaaagagaggagagagagagagagagagagggaggaagcttcgagccctagcaatggcggggtggtacgaggaggcggtggggctgctgcggcggccggcggtggcggagatggcggtggacgtgctgctgtgcgcggtgccgatctgggcggccgtcatgatcgggctcgtcatgatcgggctcctctccaccgccttcggcagccgcggcaagcaccagcgcaaggacgccgccttggccgacgacgacgacgccgccgacgcctccggggacgccggcgattgcgtcgatggcagaacattttttgagggcggccatcatgttgtcactgagaaggacctagaacacctcgtacaacttcttgataacaaggagagtggggatacaacatggcagcatttgatggaacgtaccacttccaacatgacttacaaggcctggcgccgtgagcctgaggtgggacctatcatgtactgtagtcgcactatttttgaggatgctactcctgagcttgttagagatttcttctgggatgatgaatttcgtctgaagtgggatcccatgcttgcatatttcaaaattttggaggagttcccccaaaatggaactatgattattcactggataaaaaagttccctttcttttgcagtgaccgtgaatacatttttgggcggcggatatgggaatctgggaaaacttactattgtgttacaaagggagttccttatccagctttgcctaagaaggaaaaaccaaggcgtgtggaactgtatttctcaagttggcgtattagagcagttcaatcaccgaaacaagatggacagcaatccgcatgtgaagtaacgctggtccactacgaggacatgggcatccctaaagatgtcgccaaggtgggtgtccggcatggcatgtggggtgctgtaaagaagttccagtccggatttagagcataccagcaaatgagagacacagagaacaccctctctcgcagtgccatcatggctcgagtaaccaccaagacatctattgctagttccagttgccccctggatcaagagccctccaatgcagcgaaaaccatcgatgagagtgagaattccagagcggttcaaccagggttcgactggaaatgggtggtgttcggtggcgcagtggctgccgtctgcgtgctcaacactgggcttgttgggaaggctctcctcatcggagctgcatcaagaaggcaggcgaagaagtgatgactgagtactgatgatgagtgatcagcaccctacctgtcagcttctgcaagatggcgttgagctctcttgcgcttcagactgtgcatgttgcaagtagagaagaggtaaagcgaaaaaaaaaaggacatagatgcggtgctactacaggaggcagataattagcacgcttaattttggatctcgtatttatgcagtatcgctgtcgcacatgtgtatcgtcaccataacgtaacaacagatcgtcgtctctggctaatgtacctgaattgaagatatgtctaatgggggattaattattaaaaggttttgctaatgtgcctgaactgttgcagttgataataaaattctccgccgtaattctcgact

SEQ ID NO: 15640 - DNA, 1126 bp, Oryza sativa
  ref <308>: DATABASE ACCESSION NUMBER: AK066158
  ref <309>: DATABASE ENTRY DATE: 2001-12-06
gctcggcgcgaccgcgcatcctctcccgcatctccctctcttccgcattcgccgtgcctcctccgcatccctcccctccgcgtcaggatcgagcgccgcctcgcgcaggggttcacctgcctgctgcaggcgcagccgccgcagttcccgtggccggcggcgtcgcacaagcggattcccttcgagatcgacctccccgtggtccccttcggcgcctcccggggtgcccgggccgggaaggagttcttcctcgccgcggccgtcgcctccatcatcgacatcggcaggaggccaccggcgccagggaggtgattctgccactccgcgcctcaccggtctccactctccatctcgccgccgccaccacgtccgccctctgccgcagatagaggaggccttgatatgtcagttaccggattcatggccattgttccacaccctaggaattatttgaagggcaatatttttatgaagcttaaagattgaatttgaatccatctgccctggcttgaagtacaatccaaatattatggtatatcaacagcagcttcagtctgggacagagcaatacaaggtcctccctgaggagatttggcttttcagtatgcttcagtaaggatttagcagatggcaatctttgctgtctgttagcaaggagcatcaagagttcctcggccttgtcgacaaagagattgaattatattatatactaatggaattccgccggcggtgtgaggcccactcagagtaggatttggagggtgcagaactgtttttgcattgccaatgaaaggaggaagaccgcctcaaagagccttgtccccatccaccaacatggtcatgataatcgttgacatcgaccaagatctctccagggtaagtagaacagcactaaaattaggattagcatttctagacaccatgttatttcagaaattgattagttggagtcttgtattcattttgctagcctgagtgcctaacttagtggaaatatattggaaaagtttctccatggcagattgaggctgttatttcctgtagatttaggtttcgctgtaaatactgaacaattattgcaattttctatttgtattgagtacttgggtggttctttctatcaacc

SEQ ID NO: 15641 - DNA, 1547 bp, Oryza sativa
  ref <308>: DATABASE ACCESSION NUMBER: AK098950
  ref <309>: DATABASE ENTRY DATE: 2002-08-28
cgaaggaaaaatctctcttcctatctccttcctccccacccacccccaaatccacctcgccgtcgccgccgcgaaaccctaggcagccatagccatggctgcggccatcctcctccgccgcgtcccccccgcgcgggcccaggccacggcgctcatcgcggcgcgctcgatctcggactccacggcgccgctcaccatcgagacctcggtccccttcacctcccacatcgtcgacccgccctcgcgcgacgtcaccaccaccccggccgagctcctcaccttcttccgcgacatgtccgtgatgcgccggatggagatcgccgcggattccctctataaggccaagctcatccgcgggttctgccacctctacgacggccaggaggccgtcgccgtcgggatggaggccgccatcacccgctccgattccatcatcaccgcgtaccgcgatcactgcacctacctcgcacgcggcggcgacctcgtctccgcgttcgcggagctcatgggccgccaggctgggtgctcccgcgggaagggcggatccatgcatttctacaagaaggacgccaatttctatggtggccacggtatcgtcggcgcccaggttccccttggatgcggtctcgccttcgcgcagaagtataggaaagaggaaactgctacgtttgccctctatggtgatggtgccgcgaaccagggccagctctttgaggccctcaatatatcggctctttggaagctgccagctatattggtctgcgaaaacaaccattatgggatgggaaccgctgagtggagggcagcaaagagccctgcctactacaagcgtggtgattatgtgcctggattgaaggttgatggaatggatgttcttgctgtgaagcaggcatgcaaattcgcaaaagagcatgctattgcaaatggcccaattgttcttgaaatggatacctacaggtaccatggccattctatgtcagatcccggaagcacttaccgtaccagggatgagatctcaggtgtaagacaggagcgtgatccaattgaaagggttaggaagttgattttggctcatgacctagcaactgctgctgagctcaaggacatggagaaagaaatcagaaaagaagtcgatgatgccattgcgaaagcaaaggagagtcctatgcctgatacttctgagctctttacgaatgtatatgtcaagggttttggtgtggagtcatttggggcagacaggaaggaattgagagctactcttccataggctgacaacgagaagatggcggcattatttcttctaatatgatatgatagcctggagaaataagcattggtgaagaagtcctcaggcatttctgccattctttgttgcaaaaatgaacctgtatagagatgcgtcaggaagaatcgcaccatatttgtttttgcttcttttccttttctgcaattcatctaaccgctgttgtcaggcttcaaattcaagcttgagactttgcctgcgtgattgctccttttcggaagaaaatgttcaagattatacatct

SEQ ID NO: 15642 - DNA, 1852 bp, Oryza sativa
  ref <308>: DATABASE ACCESSION NUMBER: AK066159
  ref <309>: DATABASE ENTRY DATE: 2001-12-06
gacttcctcaatcctcacccgggaaatcgccggcggcgagccccctcctcctcctcctcctcttccggcgacccccgactccgctccggcgacccgatccccacctcgaccaatatggactcagagccctcatcgcagaacccggcagatatgacagcatttgtacaaaacctcctaacccagatggtgagttccttcggatatgtttctattaacatctgtactgatgaattcacatccatctttcactcacaaaaataatgatgaatttcagcaatcaaggtttgagtctatgtcccagaacattgtgtcaaagaatatccttttctgcttctatgccattatgctcattctattcttctcttggaatcttccgaatgaaatctgaaagtggatcactaacatcatcacactgaacaattaaccttatgccaatgcgtagttaacttagggttgtcgttgcattacaatatcttgcgttatgctattgagaattatgatgatgctagtatcacagtatgcatttcagatggtgatattatttatcattctatcatgccatttgtttctgtttgaatttgtagatggaaatttgtagtattctgactatttatgttaaacataatcattccaacagccaagtatctctacaaacagcatatgccattgatataggcttgtttgatggttgaacagttacagtacttgataactaagtactcctaccatcccaacatatagcaacttctagcgttcaaaatttgtcccaaaatatatcatctctttcacctacttcctcatctaaaccaatcacaactcacaaccatctctcagttaattcctccaactacttcctcatctcaatcaatcccaaccttttcttatttaatgaactgcttacattttgggagtgacggaggagctaactagtactactggggttttgttcttctttctcttctgtcccttttgtgttctagttttatgtggttacatttctttggcaatccactccacatttttgagggtaatatttattgtcatgtaatgtaagtggtagaacaaagcaacatttgacagtttccgcacaatctttattgcaagattaatttttacaagctttatgtaactgctggtagtattcttttttgtcagttaccatccttttatgtaacaaattaacaagccttccatgatatcatgtctgagtcagatattgaaaattgctggtagtattctttttctcatgctttttgtaactgcttccgtaatgacccaagttgttcagataccgctctacttgttcaaaagtaaccccatgatgcaaaccttatacttggtatattgtaaacggacacaatgcattctttgttttgaagctatcgattctcaaatacggacataagtttcatcgctgcattcatacctttggactgctatattccgttttctttaactgcactgcactagatgaaatgggaaccaagatcgatgagctggagcagagcgtcaacgacctgaaagctgagatgggtactgatgtgcctaccaagaaggccgacgaggcgaagcctgccgactccacataacttggccgcagaccagagattggcccgtaacgatttggcatcggtgatggatttttcagcgttttatgtgtatccgatattagttttcttggaccattgctgttgaatgactcgagagtgattttatgctatgagcgttctcctctagagtatctgctgctgctgctgctaaggcgatgtgtttggcttgtatgcaaatttgattttagcagaatgccacagatgtttgcttgctgataacaagccgcagctgctcgcctttt

SEQ ID NO: 15643 - DNA, 1052 bp, Oryza sativa
  misc_feature (14)..(14): "n"=any one base of a, t, c, or g
  ref <308>: DATABASE ACCESSION NUMBER: AK066160
  ref <309>: DATABASE ENTRY DATE: 2001-12-06
cgatcccctcctcnctcctcccccacttctccccaccaccacaccaccacacacacgcacgcacgcacgcacgcctccgttttcccccaccgacgagaggcggagagggaggggagctagggtttttcggggcggggatggcgcggagggggagagtgcagctgaggcggatcgaggacaaggcgagccggcaggtgcggttctccaagaggagggcggggctgttcaagaaggcgttcgagctcgccctgctctgcgacgtggaggtggcgctcctcgtcttctcccccgtcggcaagctctacgagtactcctcctccagcattgaaggtacctatgatcgctatcagcaattcgctggagccaggagagacctgaacgaaggaagtacaagcatcaacagtgatgaaaatgcaagtatacactccaggcttagggacataacggcctggtctctccaaaacaatgctgacgagtcggatgctaatcagctagagaaactggagaaactgctgacaaatgctttgagggatacgaaatcaaagaagatgttggcaaaacaaaatggtgaagggagtaggagcagagcaaactccagtggctctagggggcaggaggaaggaagtgcatgagcaggaagcacaggtgtcctgtgcataagtttggcagtgcatgcacctcccaaattaaaaagctaataaaaaaaagagaaaatggtgcatgctctgtttgctgccagtttctcccactgattgatcccaggtagagaaaagagttgccatggcctctggctctgcttgttagatcaagggggggagatggaataaaaggatggggaagtattcaggttcttgtaatgaagacctatgctgtggtgttttagcaatgtttgatatgtgtgctacctgtgtttgactggttgtgttgcttgatgtgtcatctgaccatgatactgaaagcctgataattgcactgacttgtgtatggagtttgtttcaacctattggtatgaatctgtttgattctgtaggaactgtggtttgctgtttgcc

SEQ ID NO: 15644 - DNA, 2136 bp, Oryza sativa
  ref <308>: DATABASE ACCESSION NUMBER: AK066161
  ref <309>: DATABASE ENTRY DATE: 2001-12-06
gagatgcgagctctcgcggcggcggcggcaacggcaacagcgactgcagcggcggcggcggcgccttcccccgcgcgcttccctctccgcctcgtcgtcaccccgcgcgcctcggtcattgtagagcatcttcctccgcaaggtctccgaggagggcctgctacgcgaccaccatgggggacgagacctccacctccgtcgccacgcagtcgcaggaacctgcagcagtgggagctgggagtgtgaagcaacagctctccaagttggttattgcatcactccggactacggttcccgaagtggaagtcgatcctatggttgaagtctgcacagcaaagtttggtgactaccagtgcaacaatgcaatgggattatggtcaagaattaaaggatctggaacaagtttcaagaaccccaatgcaattggacaggccattgcgaagaacctgcctccgtctgatattattgaatccacatctgtcgctggacctggttttgtgaatattgtcttgtccaacagctgggttgcaaagagaatacaagatatgcttgtgaatggtatcaaaacatgggcaccaatcctgccagttaagagggcagtgcttgatttctcatcccctaacattgccaaggaaatgcatgttgggcatttaagatcaacaatcattggagacacccttgcccgcatgtttgaattttccaatgttgaagttctctgccgtaatcatgtcggggactggggcacacagtttggaatgctcatacaatatctatttgaaaaatttccaaattgggaggaaattggtagccaggctattggtgaccttcagactttctataaagcgtccaagaaccgctttgatggtgatgcagaatttaaagacagagctcaacaagcagtcgttagacttcagggaggggaagagagataccgtgctgcttggaacaagatttgtgaaatcagcaggaatgaatttgacatggtttacaagctcttgaatgtaaagcttgaagaaaagggagagagcttttataatccttttattccacaagtcttggaagagttgaataacaaaggtttgatcaaagaaagcgagggtgctaaagtgatattcatagaaggccatcaaatccctttgatagtggttaaaagggacggtggctttaactatgcctcaacagacttagctgctctatggtaccgtcttaatgttgagaaggcagaatggataatatacgtaacagatgttggacagcagcagcactttgacatgttctttaatgctgccagaatggctggctggcttccagatccaaaagaaaagaaatatccaaaaacgaatcatgttgggtttggtcttgttcttggatcagatggcaagcgtttccgaactcgtagtaccgaagttgttcgattgatagagctacttgatgaggctaaatctcggagtaaatcagaacttctccagcgactaacagaaaatggtaaaattgttgattggactgaggaggaactggaaaagacttcagaagcagtaggatatggcgctgtcaagtatgcagatctgaagaacaatcgtcttaccaattacacatttagctttgaacaaatgctgagtgataagggaaatacagctgtttaccttcagtatgctcatgctcgcatttgctctataatcaggaaatccaacaaggatgtagaagagctgaaaatgagtggtgccatttctcttgatcatccagatgagcgtgtcttgggactgtacctgatccgatttgcagaggttgtggaagaggcgtgcaccaacctacttccgaatgtcctgtgcgagtacctgtacaacctttctgaaatgttcacaagattttacaccaactgccaggtggttggatcgcccgaggagacaagccgactgctgctctgccaagcgacggcggtcgtgatgcgacaatgctttgagctgctcggaattacaccagtttacaagctgtgattgacatttcgatatccatttttcatacaaactttctttcatggttgcagtttttgttatgtaacctagatgatgcttctaacatattctagtcttggttgctgtattcgaagacaccaaagaaagattttatttgatctct

SEQ ID NO: 15645 - DNA, 2797 bp, Oryza sativa
  ref <308>: DATABASE ACCESSION NUMBER: AK066162
  ref <309>: DATABASE ENTRY DATE: 2001-12-06
gggcctcgccgcgcgagtgctcctcaaaacgagcgtaaacccgcgcgcccatcgcgtcgcgttcttagaagaacagacaactcgcctcgccaaaagaaacatgatggtgacatggccgtggcgcgctctaccgttggcggccgttctcttcctcttcctctcgccggccgcgtccgtcgatacggtcaccatggaggctccactcgcgggcaaccggacgatcgtgtcggccggagggaccttcacgctcggcttcttcacgccggacgtcgccccggcagggcgcaggtacctcgggatatggtacagcaacatcctagcgcggaccgtcgtgtgggtcgccaatcgtcagagcccggtggtcggcggctcgcccacgctcaagatcaacggcaatgggagccttgccattgtggacgggcaaggcagggtcgtgtgggcgtcgccggtgatgtcggcttctgtgctgagcgccggcagcgccaaggcgcagctccttgacaacggcaacttcgtgctgcggttcgccagcgccggcgttgcgtggcagagctttgactacccgaccgacactctgctccccggcatgaagcttggcatcgacttccgcaccggccttgaccggtacatgaactcgtggagggcggccgatgacccgtcccccggagagtactccttccggatcgacccgagcggctcgccggagtttttcctgtaccggtggtccacgaggacgtacggcagcggcccgtggaacgggtaccagttctccggcgtgccgaacctcaggacgaacaccctcctgagctaccagtacgtgtcgacggccgacgaggcatactaccggtacgaggtggacgacagcacgacgatcctgacgcggttcgtgatgaactcgtcggggcagatccagaggctgatgtgcatcgacacgacgcggtcgtggagcgtcttctcgtcgtaccccatggacgagtgcgaggcctaccgcgcctgcggtgcctacggcgtctgcaacgtcgagcagtcgccgatgtgcggctgcgcggaggggttcgagccgcggtaccccaaggcatgggcgctgcgtgacgggtccggcgggtgcatcaggcgcacggcgctcaactgtaccggcggcgacgggttcgccgtgacgaggaatatgaagctgccggagtcggcgaacgcgacggttgacatggcgctgggcctggaggagtgccggctcagctgcctgagcaactgcgcgtgccgcgcctacgccagtgccaacgtcaccagcgcggacgccaaggggtgcttcatgtggacggccgatttgcttgacatgaggcagttcgacaacggaggccaggacctgttcgtccgcctggctgcgtctgatctccccaccaattctgtttcagacaattcacagacagctaagctcgtcgaaatcattgtcccatccgttgtcgcactattgttgcttctagctggacttgtcatttgtgtcatcaaggcaaagaagaacaggaaggcgatcccatcagcactgaacaatggacaggttactcctttcggacaaagaaaccatactgcttcagcactgaacaattgggagattactcccttctggcaaagaaaccatgttgctgcatccaacgatgcccaggacaacaattccatgcgtcctgctggtcagggaaatcaccaggatttggatctgccgtcgttcgttatagaaaccattctttacgccaccaacaacttttcagctgataacaagcttggccaaggaggatttggccctgtctacatggggagacttgacaacggacaagatatagctgtcaagagactgtcacgtagatcgacgcaaggtctccgcgaattcaagaatgaagtcaagctgatagctaagcttcagcacaggaatcttgtcaggctacttggttgctgcattgacggttcagagaggatgctaatctacgagtacatgcacaatcgtagcctcaacactttcctgttcaatgaagagaaacaatcaattttaaactggtcaaagcgattcaatatcatcaacgggatcgcgcggggaatactatacctgcatcaagattccgcgctacggataattcatagagatcttaaagcaagcaacattttgcttgacagagacatgaaccccaagatctcagacttcggtgttgcgagaatatttggaactgaccagactagtgcatataccaagaaagtagttgggacatacggatacatgtctcctgaatacgcgatggacggcgtattctcgatgaaatctgacgtcttcagcttcggcgtcctggtactggagattgtcagtggcaagaagaacagaggattctaccacaatgagctcgacctgaacctccttagatatgcttggaggctgtggaaggaaggtcggagcttagagttcttggatcagtctatcgccggcacttcctcaaacgtgacggaggtgctgaggtgcatccagattggcctgctgtgcgtccaggagcagccgaggcacaggccgaccatgtcggcggtgaccatgatgctgagcagcgagagccccgcgctgctggagccgtgcgagcctgctttctgcacggggaggagcctcagcgacgacacggaggccagccggtccaacagcgcaagaagctggactgtaacagttgtagagggcagatagctacagcacgggcttatcgcaggatgaacactgtacgttttgtatgtaatttaagcacaatgggatttgatttaattatactcactcggc

SEQ ID NO: 15646 - DNA, 1438 bp, Oryza sativa
  ref <308>: DATABASE ACCESSION NUMBER: AK066163
  ref <309>: DATABASE ENTRY DATE: 2001-12-06
tactcgtgctccatttccgcgtctctccgcgaccaggctctgcccccccagcgcgacgaactgcccggtgggcgatcgctccaccgccgccggcgacctcactcccccccaccaccaccgcgaagccgccggcggcacccctccccccgccctcccgcccgccgcgatccatccggtacaaagagtttatttgctgttgtgagctatccgaggttccaaatccaaaatgagtaccactaatcactatcaacacatcaagtcaaacaagcctgttctaggcaaagcaagaaaattgaaggatctaatgttaaaaagtgacaaccggatatgtgctgattgtggtgcacctgatcccaaatgggcgtctgctaatatcggagtatttctttgcttaaagtgtggagatgtacatagagcacttggaccagacgtttcaaaggttttgtcagtaactctggatgattggtctgatagtgatatagattccatgcttgagattggtggaaactcatatgcaaattccatttatgagtcttttcttccaaaagatcacccaaaacccaagatggattcaactatggaatataggactaaatttataagagccaagtatgagacacaagattttttgaagccaagtttgcgcattacatcaaagggttcttttgatgcgaccaatgctgtgaagagtgtaactagcagtatctctagcgcttcagggaagcatgtcgctgacgatacaagagaatttgttggagagctgaacattacagtggtaagaggtattcagttggccgtcagagacatgctaacgagcgatccatatgttgttctaacacttggggagcagaaagctcaaaccactgttaaaccgagtgacttgaacccagtatggaatgaggtgcttaagatatcaattcctcgaaattatggacctcttaaacttgaagtatacgaccatgatacgttctctgctgatgatatcatgggggaagcggagatagatcttcaaccaatgatcacagccgtcatggcctttggagatccctcgcgtgttggtgacatgcaaattggaaggtggttcatgaccaaagacaatgccctggtgaaagatagcactgtcaatgttgtgtcgggcaaggtaaaacaggaagtgcacctaaagttgcagaatgtagaatcaggtgagatggagttagaactggaatgggttccaataccctagattaataaagctcgattggttctctgccaaaaaaaattactcaagaagcgtcagttttgtaatttaaatgaatggcttcaaatcccgtgtacttactgaatctctgtcttcaacattttggccacccgaacgaaattcgtaaaaatgccattgtaaaatatcatgttgtaatccgtcggctgcactcacgaccaattatattattctttagtc

SEQ ID NO: 15647 - DNA, 1555 bp, Oryza sativa
  ref <308>: DATABASE ACCESSION NUMBER: AK066164
  ref <309>: DATABASE ENTRY DATE: 2001-12-06
ggatcaaaaggcttgaagggaagaagagcaactccagcaggtagaaaggccagaagcaaagatggcgatctccagcctacatgccaccacctccctgcactccccatgcaccaccaacacaagcttcaggcagaatcaggtcatcttcttcaccaccagaagcaacaggaggggtagcacaaggtacggaggagcaagaacctttcaggtttcatgctcagtcgacaagccagtggtgattggccttgcagcagactcaggatgcgggaagggcacctttatgcgccggctcaccagtgtgtttggtggtgctgcagagccacccaagggtggcaacccagactcaaacacactcatgagtgacacgacaacggtgatatgcctcgatgactaccattccttggacaggactggcaggaaggagaaaggtgtgactgccctggaccctagggcaaacgattttgatctcatgtatgagcaggtgaaggcaatcaaagaaggcaaggcaattgagaagccaatctacaaccatgttactggtctcctagacccaccggagcttatccagccccccaagatttttgtcattgagggcttacatcccatgtttgatgaacgtgtgagggacctcctagatttcagcatctacctggacatcagtgacgaggttaaatttgcatggaaaattcagagggatatggcagagcgcggtcacagccttgaaagcatcaaggctagtatcgaagccaggaaaccagattttgatgccttcattgatccccagaagcaatatgctgatgcagtgattgaagttctgccaacccagcttattcctgatgacaatgaaggaaaggtgctacgtgttaaattgatcatgaaagaaggtgtaaagaacttcaacccagtttacctcttcgacgaaggatcaagcatcacctgggtcccttgtggaagaaaactcacatgttcttatcctggcatcaaatttgcctatggcccagacacttactttggcatgaggtatcagtgctggagatggatggccaatttgacagactagatgagcttatctatgttgagagccatttaagcaacctctcaaccaaattttatggagaggtgacacagcaaatgctaaagcatgcagacttccccggcagcaacaatggaacaggtctcttccaaactatcgtaggactgaagattagagatctctatgagcagattattgctgagagggccggtgcacctactgaagcggcaaaagtttaatgagctccacattcatatttcgtgaatctcttcatcaccataccatatcaatgacaatgggcatcctcgcatttcttgtaactagttttggaaatattacagctagaagaaagtaggatggtcattgcataacttgtgaaaccatgcaatggaacttctaaaaatccctctccatgagggtgctcctacatctcttcttgacacatttcaatgtacatcttctatatttcaatgtagaaagaaatacggttgctttctactataaaaaataggtccttccttt

SEQ ID NO: 15648 - DNA, 1786 bp, Oryza sativa
  ref <308>: DATABASE ACCESSION NUMBER: AK066165
  ref <309>: DATABASE ENTRY DATE: 2001-12-06
gacttcagttccacaagctcctttgcactctaccaaatccagccatggcagccaaggcccctctcgtgctgcgcctctgtctcttcctctgcatctccctctccctcttgctgttatcatctcctcaacgggtgacgagcttgagcctcgatgccgatgtggacgatcactactaccattacgatggggacgaagacgatgacaactactaccatgatgacgacgacgacgtcttctccggcaggccggtacggagaatatacgacggcgacgacgacgaaaactactaccgcaatgatgaagtagacttctccagcaggccggctcggaggctatacgacggcggcgcagtcatgccggagaagtacaacgtcctgaacggcaactcctccaacagcagctccggctcggccttttgcaggttgctttctctccagatcctggacctgtcaaacaacaagctcaccggtaagctgcctgactgctggtggaatctgcagagcctgcagttcatggacctctcccacaaccgcttctcaggtgaaatccctgcagtcaatacaagctacaattgttctcttgaatcggttcatcttgccggcaacggcttcaccggtgtttttccatcagcgctaaagggatgccagacgctggtcactttagatattgggaacaacaatttctttggtggcattcctccttggattgggaaaggcctttcatctttgaagattcttagccttagatcaaacaacttcaccggtgaaattccttctgagttatcacatctttctcaactccaactgctagatatgaccaacaacagtttgacagggtcgattcccacatcttttggcaacttaacatccatgaagaatccaaaaattgtatccagtgcgggatcattagatgggtctacctatcaggatagaatcgatataatctggaaggggcaggagataattttccaaaaaacacttcaattaatgacgggtattgatttgtcaggtaactcattgtctgaatgcatccccgatgagttaacaaacctccaaggccttcgatttctgaacttgtcaaggaacaatctatcgtgtgggatacctgaaaacataggtagtttgaaaaatcttgagtcccttgacctctcgtcaaatgaaatttcaggagccattcctccaagccttgctggtatatctacccttagcactcttaatctctcgtataatcatctatcaggcaagatacccaccgggaatcaacttcaaaccttcactgacccatcaatatacagccataattcagggctctgtggccctccgttgaacatttcatgcacaaatgcttcagttgcgtcagatgagagagactgtagaacatgcgaggaccagtatttctactactgtgtaatggctggagtggttttcggtttttggctatggtttggaatgctcctttccatcggaacctggaggtatgccattttcggttttgttgatggcatgcaatgtaaagttatgcagaaagtctcctctgttgataaatttctttcaagaggaaatactgatcagtatttgtagctgtgtgttttctttctgtaccatctgaagatgtagcatggttagttttgtcagtgttctgtaattggcaggagtcataggacccccaacaaacttcctttgtatcaagactaagatgtaagaagttactgcatccatccaaaattatatggaacatgtccatcttatatactaccaacaaatgctgctatgcttggatattcatt

SEQ ID NO: 15649 - DNA, 1598 bp, Oryza sativa
  ref <308>: DATABASE ACCESSION NUMBER: AK066166
  ref <309>: DATABASE ENTRY DATE: 2001-12-06
ggaataaagaagttttctactacagcctttgcctttcacgtttcaaagctactggtattgttttgtggaatggcggcggctgctgggctctcgcccaggcttgttgttacgccggggaggagaagccacagccatggacggcggcggatgtgctgcgccgcggcggcggcggcgcagggggagaggaagacgacggtgaggagcaaggagggagacgcggtggagttgtgccgggtggtgaacggcatgtggcaggtgagtggcccgtcgtggggccgctacgagacgcccgccgccgtggacgccatgctccggtacgccgacggcggcctctccaccttcgacatggctgacatttatggaccagcagaggatttgtatggccttttcatcaatagagttcggcgtgagcggccacctgagttgcttgaagaaatcaaggggctaacaaagtgggtaccacctccggttaaaatgaccagaagttatgttgaggataatattaacagatctcgaaagagaatggatgtttctgccttggacatgctgcagttccattggtgggattatgcaaaccctggatatctggatgcactaaaacacatcacagacctaaaggaggaaggtagtattttgaacttggatcagatttttagtctacttatgtgtttcctttcgcatgtcatggtttttcagtactgacggattctcgcttcatgccttgttttgttatgtacaatgtgaaggtaagataaagacagtagctctgacaaacttcgatacagacaggctgcagataattctagaaaatggtatcccaattgtcagcaaccaggttcaacattctattgttgacatgcgtccgcagcgaagaatggcagaactttgccagcttactggagtaaaacttataacgtatggcacagttatgggtggtctgctgtctgagaagtttcttgacaccaatgtatctataccttttgctggacctcctctgaataccccatctttgcagaagtataagcggatggtggatgcctggggtggctggagcctgttccaggctttgcttcagacgttgaagaaagtatcattgaagcatggtgtttctatatcaactgttgctgtgagatacatactgaaccagacatctgttgcgggttcaatggtgggtgtgagactgggactctctgaacacataaaagacaccaacgccatcttctcgcttgaattagatgaagaggacatgaacagcatcactgaagcatcgaataagggaagaaatcttatggatataataggcgattgtggagacgaatacagagcataattgtgcagagagataaagagagagagaggcagagggggtagaccaatgaggcgtgtgcctgccagttttctggagttctgaaatctgatctgttttgtcatgaacgtagtgtgcagcagctatctgatcttccagtatactactactccagatcagtgtgtaaaccaacctcccaaaagaaagtggcattttataagaactgtacatacacaagacagattataatttgatatgcccattaatacggattcgatttgcgcagttagcc

SEQ ID NO: 15650 - DNA, 1342 bp, Oryza sativa
  ref <308>: DATABASE ACCESSION NUMBER: AK098951
  ref <309>: DATABASE ENTRY DATE: 2002-08-28
ggcacatctctctctctcgcttctgccactgctggctgtgctgcttccctagctcctcggttggatcaaagagaagagaagagaagagttaatgctgatggcctccgaggcgtggctgtcgccggcttcccgcctcttccaccctccccgctcctccaccgccgccttcttctccgcttccgggctcccccgcctgcctcgccgctcctcctgtgcactcgcaacctccacgcgtgggcggcgcctccgccttggcgccaccgatcagcagcagcagcaaggcaaacaagatggtgatgaggttgtggacagcaacgtgctccagtactgcagcatcgacgggaaggggaagaaggccgagaagaggtcgctgggtgagatggagcaggagttccttcaggctcttcaggccttctactacgaccagaaggccatcatgtccaacgaggagttcgacaacctcaaggaggagctcatgtgggaaggcagcagcgttgtcatgctaagccctgacgaacaacgcctgctcgaagcctccatggcctatgctgccggcaaccccatcatgtctgacgctgaattcgaccaactcaaactcagattgaagaaagacggaagtgacattgtcaccgaaggtcccaggtgcagtctacgcagccgaaaggtgtacagtgatttgaccgttgactacctaaagatgttcctgctaaatgttccagcaactactcttgctctaggactgttcttcttcatcgatgagttgactggctttgagatcaacatattccagctgccagagcctttcggtttcattttcacatggtttgctgctttgcctctaatattgttcatagcacagtcgataactaatgccatagtgaacgacttcttaatcctcaaggggccatgtccgaattgtggcgctgaaaacctttccttcttcgggactatcctgtcagtgtctagtggcggtgaaacaaacaaagtgaaatgtgcagattgtagcacggagatggtatatgactcgaaatctcggctcatcacccttccagaaccatcgcaatgaaatgaatggtgaattcttcaaggtacgatgccagatggagagatgcaaacaaggaggtgatcaggtaggaaacaacaaataaaatggaattattgtaacggatgggtgttcacaaattgcatgcagagtgtatatatactacagtaagaaatgtagatcgacttctatactactaactattaagcgctgttgtgtacagtatataaaatgtagtacatacatgtttactgatatctgactcaactgaaatactacacacatatgtgtgttggagat

SEQ ID NO: 15651 - DNA, 1570 bp, Oryza sativa
  ref <308>: DATABASE ACCESSION NUMBER: AK066167
  ref <309>: DATABASE ENTRY DATE: 2001-12-06
gtgggtttctctctctctctctctctcctctctctctctctcctctctctccaatcgaatcggaatccatggagtcgtcgcggtcgcggaagcgggcccgccaggactgggacggcgccggcgcgccgccgccgccggcggagcgggcggtggtggcgaggggcggcgcgtcgccgccgtggagggacgacgaccgcgacgggcactacgtgttcgacctcggcgagaacttgaaccgacgatacaaaatcttgagcaaaatgggagaaggtacttttgggcgtgttttggaatgctgggaccgtgaaacacatgaatatgtcgcaataaaagttgttcgtagcatccgcaagtacagggatgctgcaatgattgagatcgatgtgctcaaccgccttgcagaaaatgagagatacagatcactctgtgtccagattcaaggatggtttgactatcgcaatcatatatgcattgtttttgagaagcttgggccaagcttgtatgattttctaaagagaaatagataccaacctttccctgtggaacttgtgcgggagtttggacggcaactgttggaatctgtagcatatatgcatgaattacgccttattcacactgatctgaagccagaaaacatactccttgtgtcttcggagtatataagggttccaggttccaagaagaattcacaagatgagatgcatttcaagtgcttaccaaagtccagtgccataaagctgatagattttggtagtaccgcctttgataatcaggaacatagctcgattgtttctacaaggcattacagagcacctgaaataatcttaggcttagggtggagtttcccttgtgacctttggagtgtcggatgcatcattgttgagctatgctcgggggaagcattgtttcaaacacatgagaaccttgagcacttagcaatgatggagagggttttgggtccactcccagaacacatgataaggaaagccagttcatcagctcagaaatattttagacgaggagcgcgtctaaattggcctgaaggtgctgtttcaagagagagtatcagagcagtcaaaaaactagatcggctaaaggacttagtggcgaggaaggctgatcattcaagggcggtgctggcagacttgttatatgggcttttaaaatttgagccatcagagcgtcttactgcccaagaagctctagaccatccatttttcagaaatacaacatgagtacatgatcatgctgactctacccctcccaatatgtacgtgaagaacccaagcctggagaaagcaggcgcaaggacattcccatataaagcagaatgccttcagctcatctgtaccataaatcttctgtaagctgagctataatgcttgtggtggtgacacggcataactgttacgttcacccgatgtaatgtacaatagcattgaatctagggaaggttgatgtagcagatggaacttgtgcattgtgagttgtgtgatacatgaggaattgcattgcgactcatgtcgcagtgacacaacaatgaccaaagcaggccatatatgccccttcc

SEQ ID NO: 15652 - DNA, 2106 bp, Oryza sativa
  ref <308>: DATABASE ACCESSION NUMBER: AK066168
  ref <309>: DATABASE ENTRY DATE: 2001-12-06
ggatggccagatggacacgaccaccagtccaccacctcctcctctacttcttcttctcacgtctctctctctgaatccagattttttttttgttggttccatcctctctcctgcttcagatcagggtggccatctcgcttgaatctgcagggtgagctgaggaggatccactgaggtggcggcggtcgagatggggctggatttgggagctctcgttctcaaatccggcgggctgttggtgtcggactacgactcgatcgtcgcgatcaacatcttcgtggcgctgctgtgcagctgcattgtgatcgggcacctgctggaagggaaccggtgggtcaatgaatccatcaccgcgcttgtcatggggctgatcactggaggtgtgattctgctcgtcagtggtgggaagaactcgcacattcttgtgttcagtgaggacctcttcttcatttatttgcttccaccgatcatctttaatgctgggtttcaagtaaagaaaaaacaattcttccgcaattttatgacaattattttatttggtgctgtggggacattgatatcctttgtgataatctctctaggtgccatgacattgttcaaaaaacttgatgttggtccactccagcttggggactatcttgcaattggggctatcttctcagcaacagattctgtttgcaccttacaggtgcttaaccaagacgaaacacccctactctatagtctggtttttggtgaaggggttgtcaatgatgctacatctgttgtgctctttaatgcaattgaagacattgatattgctaattttgatagccttgttctactagcgttcataggaaattttctctacctattcttcaccagtacccttcttggagtagttgctgggttgcttagtgcctatattattaagaaactatgttttgccagacactcaactgacagagaagttgctatcatgatactcatggcgtacctttcatatatgctgtcgatgctgctagatctgagtggcattctcactgtgttcttctctggaatagtaatgtcacattacacttggcataatgtgacagaaagctctaggattactaccaagcacacttttgctactttatctttcattgctgaaatttttctatttctctatgttgggatggatgcactggacattgaaaaatggaaattagctagcagcagtcctaaaaaaccaattgctttaagtgcaactatattgggcttggttatggttggaagagcagcatttgtattccctttgtctttcttatccaatctaagtaaaaaaagagacacgcccaaagatctccttcaagcagcaagtaatcatatggtgggcaggtctcatgagaggagcagtatcaatagcacttgcctatcacaagttcaccgcatctggtcatactgaattgcgaatcaatgctatcatgatcaccagcacagtcattgttgttctgttcagcacaatggtttttggtttttttaccaagcctctcctcaatctcctcatcccaccaaggcctgacatagcagctgatctctcaagccagtcaatcatagacccacttcttggaagcctgttggggtctgacttcgatgtaggccagccctcccctcagaacaaccttcagcttcttctcaccattcagactcgctccgttcatcgcgtgtggcgcaagtttgatgatagattcatgcgcccgatgttcgggggccgaggcttcgttcctttcgtgcctggttcgccagtggagcggagcatccatggatctcaactgggcactgtgactgaggctgaacatagctgagtttgaggttcagaaggtgcaagcatttctgtaaattttcagagaccactcaattttgttccaggatacatttgtgtactgttgtcatatcttgtgcagatagtttgtgtagaacgacgtatttaagctggtataggttcatattggaagccattattccaagtgtataattcatctgtaaatttacatgttgtttgtagaggataaacaaatgcattgtattggatttgtagaaagtactccctctttgttaaatttaaatgaaggtgccacagttttc

SEQ ID NO: 15653 - DNA, 966 bp, Oryza sativa
  ref <308>: DATABASE ACCESSION NUMBER: AK066169
  ref <309>: DATABASE ENTRY DATE: 2001-12-06
gggcctcggctccgccgccttgctccgtgctccagtgctccgctcctcctcccttcgcccctacggctctcggcggtgatcctcacggcatcggcgcctttccatcgcctgcggctggccccgcggagcgcgggtagggcgctcggcagctcgctcgacgccgttgcgccgaccggtggtgccggctcgtcctcggcgccggcggcttgggctcccgcgcaccctccttcgtcggcacaacggcagaaaacgaagctacagagatacgttggttggtatcttggtgaattcagggtttattgctgattaggagaaattccttgttgaatatgtcagagactcacgagaaagataagcaatttgagaaagaaggagaagaaggggaagaggaagagtatgtcttgcttgagttggatgattgtctttattccgacgtgcaaccaaatgcttcatatgtgctctctggtctggatacattgactcctaccttgatactaggtgatggcctgaaaatgattggagaataccaagagactattggcacatgctatttgttctcagaaacaaatgctccaccaaaacccattcacggtgagatggcacctcctgaagaaaacaaggacaagcaagccagctgtagcaaggaagtgccatcaaaggaggtgaagcatctcgcaagcgttcagaagatcctcaaatttcgctctatcaatgcggatcatgagcagcgtagagcctacagggataatgagagagaaatttgaaacagaacttgtagcgttttttttttctcatcaccaacttgtacagtatttatgctcatctcactgtggtcctctaatattattctcatcttactgtgacgctgtctagcttggtttagcttggaaagttgcaatatatgcgaaactcttttgcctcactgtaaacatctgagaggcttaaaaaaatcgagcatcatggtgg

SEQ ID NO: 15654 - DNA, 1067 bp, Oryza sativa
  ref <308>: DATABASE ACCESSION NUMBER: AK066170
  ref <309>: DATABASE ENTRY DATE: 2001-12-06
gtaacgcgctcgagcaagtggctgcgaacgggcggtgggcggcggcgggtggacggcggcgcgcggggagagagagagagagagggcagaagagatagggccaaggcgtgttgaccggaagtggcgtccgtcagccgcataggaggcacatggcgacggaggctggtcccctcagggagccggcggtggagttcaatcggtgcctgtggccgaggaggagatccgcgccggtggcctaggaggagatccacgcatgtggccgagaaggagatccacgtcggtggccgcctcctcgagcatgagctctgcaacttcctgcataggaggtcgtggaggtcagggggacggggagaagcggcgaaggttggcgacaagacgtccgtgcagcttccagggatgaggccgacctagcagcgtcgaaggaggcagatcaagatggaggtggagacgacgacgaggccgtggcgccttcgagctctcgaccggcaaccgccacgacaccttctcctcaattcgcgagcgtgataaggggatcgagctcctcaccgtggctcctcaacaacgacggtctccggcaactgccttcgagagtggcgacttggtggtgtgcttgttgtgccgaggaggagaaagcccggccggcaagctcgacggtcggccgctgtcgcatgctttagcgaggagaggaattcaagagaagagatagagagggatacggattgagaaagacaagaggatagaggtgagggatagatatgacaagtgggcccaccgaacttttttaaagaattgctgactggactgtcacgcgtatgccacgtaggatcaaaaccactccagattgggttaggggggttatttgtctagttttagtagttgagggtgtcaaatgtctagttttaaagtctaagggggtaattcagacgacctaaatagttcagggggataattcgtactttttttttcttaaggtaatttatcatccgaacattttcattatagttggataaaggacataatgactttgtggttttagctgcaggacactgcataaagtgacttttggg

SEQ ID NO: 15655 - DNA, 3068 bp, Oryza sativa
  ref <308>: DATABASE ACCESSION NUMBER: AK066171
  ref <309>: DATABASE ENTRY DATE: 2001-12-06
gagttttattattattacttacttacacgcgcagcgaagcagccagcgaacgaaagaggcgaagccttcgcgtcgccgctcgccgccacctcgtcttccgctgcgagatctcgcgcgagcgccgccatcggaggaggaggcgcgtcggcagggtttgtggcggcggcggcggcggccggggatccgggcggcgatggcgagcaggctcaaggaggacgagaggaacgagcggatcatacgcgggctgctcaagctgcccgccaacaagaggtgcatcaactgcaacaatttgggaccacaatatgtctgtacaaatttctggaccttcatttgtaccaattgcagtggagcacaccgagagttcacgcatcgagcgaagtcagtttctatggctaaatttactgcacaggaagttagtgcccttcaagaaggaggaaatgagcgtgctagagaaatattcttcaaggaatgggatgctcaccgcaattctttccctgacagcagtaatgcggataaattgaggaactttattaagcatgtttatgtggaacggagatacacaggagaaagaagtgcagatcggccaccgaggggaaaggatgataaggatgagtatagtgaaaacaggagatctgattgaaattggggtggttcaagaagtccgccatacaatgaaagctattctgatcgtcgcagttatagtggaaggagcgatgacagaaattccagatattcctatggagaacgaagtcctggctatgaacataatgattataagaaaagcccccgctactttgaagttgatgatagaaatcgtgaggatagatctggaaaaacaactccagttcaacggtttgaggaccgcaggccttctgaaccacagaggccagataatgggtctccaaattaccagaaggaaaccgatggatctagccctgttgtacggccagtgagggatatactgggtgataatgcacctcaactacgggttggtgagcctcctaagccaaatgtagcgagaacgattgatcctccgagaccaatcgatcctccaagaccgattgatcctccaagaccgattgatcctccaaggccaattgatcctccaagaccaaatggaaccagaaccatcgaacctccaccacagatgcagaggacatcaactgccagcagtattggttcttcagaggggacctccgaacagataaaagtggcaagtacgataagtttaattgatttcagtgctgatcctgagccttctgcatctgtgccacctccacaatctacacctacatcacaacagcagcctgctagtgcacagccagtgcaacctgttaatgcaccagcacaacagcctgctgtggaacaagggaaaaatgtgtcatcagtgagcagtggtggtggtgactgggcatcgtttgattctttcggccagcaacaaacaccacaaactggcaatagtgtagatccccttgagtctgcacttgctcaactatcattttctgaaacaccctctgcacccaattcatcagcttttccagcttcggtcatgcccacttcagttccaaatgatggagggtcatccatgatggggcagtcacattcttcattttttggtgcaccccctggagtctcaggtcaccaggcctcaacaggaatgtctatccatggatcttcagttcaacaaactggtctagctgctccggcagctggacttccgttccaggtctctgcgaattcccgagcaactagtggcattcaagaagcagcacctaatactgacagtagatccattggccggaaagaacttccagcggtatgtgattaactgcttgtagagaattgaacatctagcattgcagcattttctagtccctgcactactgacttgtttcatcttccccacccctttgcttcattggcttcatttagatatgtaatccgttaatttgtatgttctacagtatagcttgtgcaatatgcgatgccattttctaaacttattgtaaccatattttgtgaatcataaagctgaaattaccaaatttgtggacagggcatagaaccaactacttaccagattagtagcacaaccgttttctctttgacgctttagaatccatgttgtaagttgcagaggaactgcattattttatacctataatatataggatagcagtatgaggcactttgttgttgcctaggcttccaagtcgatacctgttggtgtattacctataatatataggacagcaatatgctttgaggttcaggacttatgatatggttatcctcccatgaactaatttcatgacatataatcactgcagtccaactaaattgagtactagtcaatatgagttcttagttcggatttcacttaccatatgcatatggggtacatttcatacccaagctccaaaattcttgttgagcatatacatgtattggattatagatgtgtccctagatattcaggtgcctttaataatttacataaagttacaaaagttatttgcagtgtcgtgctgaaattttatggagttaaaaagtgtcagataaaaaaagaacaggagtacatgataaaaggtatagagctcaaaactgctaagagactgacacttacagtttttctatggctagtatttccttgaaatcttgtcaaataatgtaaggtgtggtggcccaaggttaaatgatgatcttttgatctgtcagaggtggtatttctgtttagcaagcattagctaactgttaatacgttggtaggatatatcatttcctatgcgatcagttatgttggtttaaaactaggtgagatttgttgattgtttacatattaaattgcattttaatgggggttacatggttattaacttttttttattgagagatgataatatatgcatgtaaaacaatgcatggtatggtagggcaagagttgaataatggtgttaataattgttggtgcatttgaatgtgatatctgggttgactaaccagatacatggaaataaatcaggttatcgagtgaaaaagctaaacaggcattcaggtcatcattatgc

SEQ ID NO: 15656 - DNA, 1140 bp, Oryza sativa
  ref <308>: DATABASE ACCESSION NUMBER: AK066172
  ref <309>: DATABASE ENTRY DATE: 2001-12-06
gaccgcctctctctcctcccccaccacgcggcggcggcagcagcagcagctagggtttagagagcagcccccaatcccatggccccgccctccgactccgacgactcggccccgatccccgccggcgccatctccaagctcctcatcgtcatagcgatgcagacggaggcgctcccgctcgtcaacaagttccacctcgtcgaggcggaggaatccatatttcctaaaggtgccccatggattagataccatggcaactacaaaggccttcacgttgaccttgtatggcctggaaaagatcctgttctcggagttgactgtgttggcacggtatcagcagcacttgtgacttatgcttctattcagtcattgaagccagatctgatcatcaatgctggcactgctggtgggtttaaggccaaaggagcagacattggagatgtctacttagcatccgatgttgcattccacgataggagaatacctatccctgtcttcgacatgtatggaattggaacacgaaaaacatttgctacccctaatatattgaaggaactcaatttgaaggttgggaagctctcaactggcgattctctagatatgtctccccatgacgagtcagcaatattgaacaatgatgctacagtcaaggatatggagggagccgcggtggcatatgttgctgacatgttttcaacaccggcaatctttgtgaaagctgtgactgatattgttgatggggagaaaccaacagccgaggagtttctgcagaacctggttgctgtgacagcagctctggacaaggcagttacagaagtggttgatttcatcagtgggaaatgcatatcggatctttgaatgatgaagcttagaaacctgttcatcaaatccaagctctgctgcttcaatgcactatactatactacatcactgctgtatgatttttcatggggatgcgtatacaatttttaggttcccctgaggccctgatcccccgtatgtacaaaattcttggcaattacttggatcaatagcgtggaattttgtagaatattctgcaaaatgtgcagtgtaatgaaactaaataaggtgatattctgtcaaactaagataagtggtgggcggtggagttattttctt

SEQ ID NO: 15657 - DNA, 3551 bp, Oryza sativa
  ref <308>: DATABASE ACCESSION NUMBER: AK066173
  ref <309>: DATABASE ENTRY DATE: 2001-12-06
gaatgagcgctcctcctcctcgcgtttgctgccaccaccaccacgcgggactcacactcctcctcgcgtgtgctactgccggtctgccgccaccacgcgccgctccgcctcaatccaccgctgcccccgccggcgcgactcgctccttctccctcctcctcctcacgtgtactggtgccgccgcctcactccaccactgcctccgccggagccgatttcttctccagccaccttcggagccgtggtattccccattcaccgcggctggagccgaggtcgtcccttccgccaccgccgctgcactccactactgcccccaccagagcccaggtcatccccagccaccaccggacccgtggtcttccccatccttcgccgtcggagccgaggtcgtccccttccgcgcccgcacgcacattctgctgccgctgctccagtgacgcgcggccacgaccaccggtgatggcgacgtgtgggtttgcagcaacacctccttactccgcctcaagaaccgtcgtcatcactcggtgtcggctgtcatcaccaatcggtcgtcgtccgctaccccaggactcgatctgcgtcgcctccaaccggattggctcctccaagctcgagtgactgtaggggatgaagagcgtgatgccggatctggcccaccggcggcgacggatccgacaactcgatggccctaggcggcagcctggatgttaggaacccaaatgggctgcctgtgggctgtcaaccactttcaaagcaaggcccaagcaagcaaatcaggagcacatataaacagcaggagcagcatcagagaggagatcgaacagagaacaacagaaccggttgaggggcttctcggcggcgacggcggcggcggcgacctggaaccgggcttggtatcacgcttttgtatccttccattttccacctcaaaacccctccactattgtaacagacttggttgttccttgtgttggatttggtactcatactcctgaaattgcattgttgagtgggttttctaacaaatctggtatcagagccaccaagccccaccaaattcactaagcaagcatccatggaaggtgaggataagttggatttgattttgaggcggatggaggagtttgaacggaggcaggtggaggcagatcagaggagagctgaataccagtctctcaaggcggcggtagaattgtggatgcctgaaatccagaagaatgctgaagacctacagtttttggttggggatgagcagtccaaggtgacgctcaccacctgttcgacagagtgccctaatggcagcagcccgagcagaacagcgagatccatctacgacgacgaggggtctactccaacgatcatcctggagcttgggggtggtgaggacaagattcatgacccttacatcatcgccaaggactctcttgaggtcacgcccaccatgtgttcgatgaaatgctccatccccgacaccgagtccaatctcaccatggttgcggaggtgacctacgctagcacagccactgtctctatggagttggtagctgctcaggaagctattgatgccacgtacagcgacacctctgaccattccaaggtgatgcgcaccaagtgtttgacggttgtcctcgatgccattggtgacaccggtcaagctatggttgtgttccagacctggacagatgcattcaaggatgttccgacctccgttcagttcatggactttttctcatcaagtatgatggctaacatcaagtggaacacaccaatacccattaagtattcggtgcagttccttgggcatgacatgttggctacaaacgctcttgatgttaactcatggccacctccttggtcagatggagtgattagaggtagagacttaaggccttcgccatggccgggattcaatttctgtgggacggtggaacactggatgccaccatggccacccccaactcagccaatgcctctaacgtatccatcaaaatttggccttgtgtttacaatagatggagtacacattgattggaatcttgttgttgcagtgcataagattttttggagtgtgatgatcaaatcaatgagacatgtaccaagcatcagtagtgagctggatgacatccaagggaaatccactatgatatttattgatgttacaatccctgaaggatgtaatccaaagaaatcaggctctgcgacaacagaaacaatattcaactcattctcagaactattagatgtgcacttgactactattgaaatgcttgtctccaaaagaagccaagaaattcgttgttggcagggagctctttgagttgcaagtcagtgtgctcttctggttactggcaaggaacatcaatcctcctaaatttgaagtacaagtactggagtttttattgagggtgctcattggcagcttaagtgaaaaatactctggtaatactattgatcttgaggtgtgcttttcgaaaataggtatatgtttacacagagatgtccttaagttcccaatttcacaatcaacaaatgcctgcattacaattttgtgtgatcgacatgctgctttcagttttgacacaagcatggagtggaatagtgatacaagaaaaatcatacaagaaacaatgagcttactggagcattcagtgatgatttttaccagcatgctggacctacattggtctgtaattaatacagaaaagtggacttcaggatcattaccatcctcatgtattgctcttgctgacaagtacaagacttcaagttttgccatggtctgttgcagtaaactgaatcagtatcacaaaacaataattgtgcacttactgatcaggaacaagctcaagacatggatatctgaaatgattggaagaatgatcgtgttgatgctaagttcacaattgtttgtcagctatcaagatcacttcaatctgggacacatattcttgacctttattctgcagaggagcacatttctgacaatttccttaatgttatcatgtggtgttcagttcctatcaagaatctacataaacagtgggaccccggtggctctggtgaaactttgcatcggcttggggacaagccgaaatttaaggagaggagattgttaggaacccaaatgggctgcctgtgggctgtcaaccactttcaaagcaaggcccaagcaagcaaatcaggagcacatataaacagcaggagcagcaccagagaggagatcgaacagagaacaacagaaccggttgaggggcttctcggcggcgacggcggcggcggcgacctggaaccgggcttggttccttgtcgatctttactctccctcttcttctacttgtctagaagctagtagaacctactagcctttgtatccttccattttccacctcaaaacccctccactattgtaacagactcggttgttccttgtgttggatttggtactcctactcctaaaattgcattgttgagtgggtctctaacactggaataagtcaggtatgcaaccttttgattagtaagtttgttaatgcacacgcagtcacttc

SEQ ID NO: 15658 - DNA, 3357 bp, Oryza sativa
  ref <308>: DATABASE ACCESSION NUMBER: AK066174
  ref <309>: DATABASE ENTRY DATE: 2001-12-06
ttggcaccaccagatctcccttggaccggttccatcgtctccgccgtggaccagcgccaaccctcgccaccgcacgtcgccgggctccggcgaggccgccggagtgtcgtcgggaagcggagggcctcctccgtgccgcgcctccctccgcccctcaccccttcctcctcatggctaggtcctgacctgaggtggggctccgcggctactgctccccgcctcgccccgcccccgcccccgccccctgcctctccgccgcggcgccactccgggctccggcacctccctctccgtgcgctcctgcgggaagttgtgtggagctatctctgatgctgtttatgcaaagacttatgctcacttcttgattagaaatggacagtagccgagattctgaagaagaaaggcctcaaaggaaggacaatggcgaagaaactgaaaatggggaagatggtggaaatgctttgagcctcaaggatgttgccaatgagcttcttggttgtgttgtccatagtgaggaagaggcatacaaactgtattgtgactatggacatagaattggttttagtgtccgcaagggtaaacagtcttacttcattggcacgaagaatattcgtacaaaagattactactgctcaaaagaagggcttaagtacgatgggccagttacagaagcaaattttaatcgaccagacacaagaactaattgcaaagcaatgatccgctttagagttgatgagaaaggacgctggacagtcatacgctttgtcccaacgcataatcaccagttggctaaacctggggaaagacacatgttgagatctgcgaagtcgcttgctgttggaaaatcaggtgtcatagatccacaagcatctacggaatcacatccaataaatggtttctctcatatgataggaagtgatattgtggagcctcctgggtatactataagggattgctacaatcatgtgagcatgcagggtataacgataatcgaggcaggagacagccaaagtcttgtgaactatttcaagcgtagaaccaatgaggaaggtatgttctattgggatgttcaagttgatcaagaaggtcgtatgaccaactttttcttcagggatgccaaaagtagaaatgattttgactgctttggagatgctgttatatttgacacaaccttccgcacaaataaatacagcctggtatgtgctccttttgttggagttaaccaccattggcagaatattgtttttggatgtgcattcttgttagatgagtcctcagcttcctatgtttggttatttaaatcattcctcgagtcaatgggtggccggtctccaaaatcaattttcactgatcaggatgacgctattacgcaggcagttgagctggtttttcctaacacgcagcactgtttttcctattggcatattctgaaaaatgcacagtctcatttaggcacggtaaatacctctcaaacatttcaaaatatgtttattaagtgcatgcaaggacctaactcagaaacggagcttgaggaatcatgggccacaatgttaaatggatataagttacaggagaatagctggcttagcgacctttataggtcccgcaataaatggtgctcagcatttaataaagatactttcgatggtgggatcaattcatctcagtggggggaggtctcaaacaatacatttactggaatatctgatgaatctacccctcttacacgatttgcccttttactagaaaaggttttcaagggtctacgtagaaatgaatctgaagaggattttcgctgtagccaaactgctccagttcgtgcaattaaacacagtacagttctgaagcaggccgcagaatcctacacgcataagatatacaaattatttgaggcagaatttctggatgggtgcggagcaacttcatgccatgaaagttcttgtggtgggaacttgttgaggtttgaaattactatgcaggggaggggatcaaaagtgtggaccgttcttcttgatacctccacgatggaaatctcttgtggttgcagaaagtttgaaaggatgggtcttctttgttcacatgctctgaaagccttcagcctgcaaaatgtggacacaattcctgagaagtacattccgaaacgatggacaaaagatgccaggagaagcatgtataagcttagtcaagatgattcaacacaacaggaatgcactgaggctgaacttgcatatcgcaaccgggcaacgcagtatgcatgtagccttatagcgaagagccaggaactggatgaatcaagaaagatattctgggacacccttgaaacaggagaaaaagcacttgatgtattctttgaaattagaagtttgcgtagtcaagctgcaaaagatgtcagtaaaagggacaaaaagaagaaaaaatcatctaaaggaccaagcacaaaaaaagcaaaaccaaccccagcaacttcctctgctgtacctgaacttcttgcccaaactaatgtgcaccagtttcaatctgcacaagatgctcagggtaacacgacaattggtagaccgttgtactatcaggctttttcatctgccccaattcaaccaaaccagatctacatgcatccgaacatgcacacaatgcctctttgtgcaccacaggatttctcggcatattctgcaatgcgtcccaattcgaattttggtggtgcaaagaatgtctgaaggacagtaaggaatctgctaagacgtcttttggaaaatgctgcttggacatggatgcagccaaccacctggatggattttgtcaaccttcccggaggtgtgatgttgcttttggatgttaatttctggctcgcaactgttgatgtgtgtaactattctggtctttgacgtttctgttctgttgaagtggagttctagtaatgtcaattaggtgactgtaggcttgtaagttataattggagtgtagatgctggatgaatagaggccaggaacatgttgcttccattgtcttaaggaaaaggttgtaactgggagtagtcactagctatttacaggatcagattctttgggctaaaagatgatcagctggcgcccttgttgcctcttggcccatggtgctactagttgtcaagagcagatagcatcccttctcgaaggagttgagctgcagaacaatgtgaaaaggaagctgaaatggaagctcatgcagattcagtgaagtgcaccgtctctgcatgggaggcagtagttccaaactgaccttgttatatgtttttttttgtgaagattttggatctaatttagtgtacctgtacaatctgactgctgattaagatgacacagcagtattgatctgatattg

SEQ ID NO: 15659 - DNA, 2084 bp, Oryza sativa
  ref <308>: DATABASE ACCESSION NUMBER: AK066175
  ref <309>: DATABASE ENTRY DATE: 2001-12-06
ggctgcgccgccccaactccggcgccgcaacaaagccatggccaagaagctcggcaagtcgccggtggcgaaggaggaggacaaggaggggctcttcgcgtcatgctccttcaccgacctcggcctccaccccaccctctgcgctcacctccaagataagatgggcttccaagcgccaacaagaatccaagctcaggcaattccagtcgccatgtctggacaacacatgctagtgaaggcagcaactggtactggcaagactcttgcgtaccttgcaccaattgttcaccttctccagatgagggagcctcgtgttgagagaactgatggaacttttgctctggtacttgtaccaacacgggagctatgcctacaagtttatgggattgcacagcagttggtgcatcgtttccactggcttgtccctggttacataatgggtggtgagaacagagcaaaagaaaaggcaagattgcgaaaaggaatatcaattctaattgctactcctgggcgtcttctggaccacttacaacatacgtcatcatttgtctacccaaatatgcgttggatagtttttgatgaagctgacagcattcttgaacttggttttgggaaagcactagaggatatactagagcacttgggttcaaggaatgatacttctaaccaaaataaaaacaaaatggaacctatgaaaaggcaaaaccttctgttatctgcaactctcaattaaaaggtgaatcggttagccaagattagtttgaagaaccctgtgatgattggtcttgacgaacagaactccagtgcccatgggaagaaccacacttctctattatctgatgatgaagaggaaatactggaaaagcacaacgttacagtggaacaagcagttgacgatttcaagcttcctgcacagcttgttcaaagatatgttaaagtttcatgtggttcaaggctcgcgattcttcttaccattcttaaatctctgtttgaaagacaactgtctcataaggttgttgttttcctgtcaacatgtgactctgtagatttccaccatacagtactcagccagcttgagtggagccctggcctgcaactggatacggataagaagcgaaagtttattagctgcaaagtgttccgtttacatgggaatatggaccaggatgatcgcaagaaatcatttctgggattcagttctgagaaatctgcaattcttgtatctactgatgttgctgctaggggcttggactttccaaaagttaaatgtatcatacagtatgattcacctggggaggcttctgaatatgttcacagggttggaagaactgcaaggattggtgaaaagggggaggctctcctgtttctccaacctattgaaaccgactacttgagagatctagagctacatggtgcatcacttacagaataccccctccaaaaggttttagacagttttcctgtaaatggacagaggcttcacaaaaggaagcaaatatctttagatatgcatccatggataatgtctttacagagagcattggaaagttttgtcacatccgaggacacgacgaagaagcttgcaagagatgccttctgttcttgggtgcgcgcctacactgcccaccgaggtgaactgaagaagatttttatggtcaagaagctccatttggggcatgtagctagaagctttgggttgaaggagcaaccctccttgttgggaaggtcacaccaggtgcaactcaagaagaggaagaaagaacagaagcgcgaaaggcctgcaaaaaggaggaaaatcccggccaagagatgaatctccatagcagaaatgcttgtaactcgaaaactaatggtggatcatgatccactccaattttgtggaactaacagccgcagcttgaaggtgaaaacattgaccccatgaagctttcatgttttggccagaagcctagagaagagctagtgtactgcctgtaatctgaaatgtatcaaaagacacagaatgttttgctcagtttgggattatctactgctctgctagttacccattttaatcagaaatataatccatgtgtttcttcctt

SEQ ID NO: 15660 - DNA, 624 bp, Oryza sativa
  ref <308>: DATABASE ACCESSION NUMBER: AK066176
  ref <309>: DATABASE ENTRY DATE: 2001-12-06
gtttctttctcttcctctctgctctcaaccgccgcaggcgccacttcgcccaacgttgtggcgctcacccgccgtcgccgctccgctcgctgcgctcgcccgccgcctctcctcctgcggtacagcgccgccaaccaccgcacccgcagccaccggaatgcaccgaacagccgcctccgcccgccggcgccgccgccgagcctcgcacggtcacacggcggcgcgacgacgcagcagaaacttgcggagggagggagcggcgacgggatgggcactgagggagggagcgcgcgtggtaacggcagcgcgaaggtagcagcggcgactgcactcgagggagtggcgttggcagcggcggctgctgctgccctcggaggaaacggcgcggctctgcttctgctgccctaggagaccaccatcgacgtagcttgctcgtccagcatccaagcctgacatccacccccacctctcttttgactgctgctaccaggaaagacttgcttgtgtgtgttgtcagttgtcacaaggtgttcgacaaacttgatgttggatatgaatatcggttggatttggctatatctgtgcttttgattcattgtatgtaaatatatgtgcttttgcttc

SEQ ID NO: 15661 - DNA, 2525 bp, Oryza sativa
  ref <308>: DATABASE ACCESSION NUMBER: AK066177
  ref <309>: DATABASE ENTRY DATE: 2001-12-06
gaccgcgatgccactcctcgacaccccctacctcgccctccgcgttcgcctcccccgcttcccgaccccccacaatcccagacccgccgttgccatcgaagcccagcactcctttccccacggcctgctcgcccgtgccgcgtgccagccgctccgtcacgtcgcggctccagcggagggggagggggaagaggtagaggacctcggcacgccgtcggctgcggccgtggcggaggccatccggcgtgcttcgagcgcgtcgccggtgcgtttcaggagggtgcaccgggaggagaatgagaagctgcgaggagagggaggcttcacggagcccagcaccgacttccggcgactgtgcggggagcagctcgagatgttccgggtggtcatctcccgcgacgccgtcctctctgtgtatgtaagacctgctggcagttatattatggatcagcttgaattacgtcgagttgctttatatcctgaaactaatgtttctaaaggagatacagtgattctagttggtaatttcaccatatctgctggactaagagcagcggaagcttttcttgtaaaacaccagatggaaatcataactgaatttggagctgtagtccttccaatggtgaaacacccatttgttgttggtttccttgttgcggagctcccagaactagttggatgtacaaagaactccgagacttctgatattcagataccatcacactcattcttagacaagtcatcagatataactccatatactaaaggggaaacttgggattttcaaacttctggagaccaagctaatagttatgctcagttagttactgaatggaaaaatagtgcacttatgatttctcgaactttagcaatggcttatgtcatggaccaggtagtttgttcatgaccattagataatttttattcaaaataaaatcattcattaactgtttttgactggaatcattaactgttgccagccaatgcctataacctttcttgtagacacatattattttggaatttgggaaaacatgcaattaggaatgcagttttgaggcatcccctttgatatacagcaggcatatgtgaaatatttcctgatgttttattcataaaacatgggcatgtgtaacagatatgctcttgataaactgaagaaaatattccataactgaattcctcgcctgctctagtttacattgctagttatatattttggttattcacataagtgcattcctcgcagaaagcatatttgcttcagcaagcttcctggcaaaacaatattagaatgagtggcttagtagaacagattcgaggacccctcgctaatataagagctcttgcaaagatgttatcagttcatacaaagagaaatgagatctcttatgatattgttgaagacgttatgatccaaggtgatcatttgaaagatgctttgcaacagattcaagatgcagtttatctgactaaggtgaacatagttaggtacaatgaggaaaccttaaagaaaattcaggggtcaccttcttcaagaactctaccacactatcaatcagatcctaagaatagttcacagaaagttgattcgttgtcatcacatgattctgacaatggagacatggtgatacccatgccacctctctggctggcccctcttcaaccccaagacgctaggcagaccatgtgatctctctgttgtactggaagatttggttggagcagctcaaccgcttgcttttaggcagcaacgcactctagatgtaacaggaatttcacacccgcttcaagttgctgttgaggaatctgctttaagacaagcgctgagtaatctcatagagggtgctcttctacgcactcagcttggtggccgagttcagatatatgctggtgaagcacctgcaggaggcattctcgttgtcattgatgatgatggtcctgacatgcaatacatgacacagatgcattgccttgctccattcgggtcagaccttgcggatggtatgcatgaagataatatgacatggaatttcattgcaggattaacagttgcccgtgagatacttgagaactatggctgtgttttgcgtgtgatatcgcctcggagacctgatgcaattatagggactggaggtagtcgtattgagatatggttgccaacttcacagacagaactatctgagatcactgaaggagcttagctgaattttagtaatcaacgcatgtttagaagataaaggtcatgtttaattggcatgatggagatcataccaccttttctgttttggaaatgttcgaacgacggctgcaaagtgagcttatacttctgattagatcagtcatcagtgaagcaccatatgaacatctttacacgcattccagtaaagcatgttacctgtggaaaaagcaccatatgaacacctttggacgtttttgtagcataaggaactgtagcacggtatacagtttgtatggtagagctagataccgcacttatgaaaagaagtacttttttgttgttt

SEQ ID NO: 15662 - DNA, 1717 bp, Oryza sativa
  ref <308>: DATABASE ACCESSION NUMBER: AK066178
  ref <309>: DATABASE ENTRY DATE: 2001-12-06
ggcgaggagaaacagagttggaggcgatggcggcggcgtcggcggcgaaggagctccacttcttgctggtgccgctggtggcgcagggccacatcatccctatggtggacctggcgcgcctcctcgccggccgcggcgcgcgcgtcacggtggtcaccacgccggtcaacgccgcgcgcaacagggcggccgtcgagggagcgcggcggggagggctcgccgtcgagctcgccgagatcaccttcaccggcccggagttcggcctgccggagggcgtggagaacatggaccagttggtggacatcgccatgtacctggctttcttcaaggccgtgtggaacatggaggcggcgctcgaggcgtacgtgcgcgcgctgcctcgccgcccggactgcgtcgtcgccgacgcctgcaacccgtggacggcggccgtgtgcgaacgcctcgccatcccgcgcctcgtgctgcactgcccctccgtctacttcctcctcgccatccactgcctcgccaagcacggcgtgtacgaccgcgtcgccgaccagctcgagccgttcgaggtgccgggcttccccgtgcgcgccgtcgtcaacacggccacgtgccgcggcttcttccagtggcccggcgcggagaagctggcgcgcgacgtggtcgacggcgaggccaccgctgacggcctgctcctcaacacgttccgcgacgtcgagggcgtcttcgtggacgcgtacgcgtcggcgctcggcctgagggcgtgggccatcgggccgacgtgcgccgccaggctggacgacgccgactccagcgccagccgtggcaaccgcgccgtcgtcgacgccgcccggatcgtctcgtggctcgacgcccggccgccggcgtccgtgctgtacgtcagcttcggcagcctcacgcacctccgggcgacgcaggcgatcgagctcgcccgcggcctggaggagtcggggtggccgttcgtgtgggcgatcaaggaggcgacggccgccgccgtgagcgagtggctcgacggcgaggggtacgaggagcgcgtcagcgacaggggcctcctggtgcgcgggtgggcgccgcaggtgaccatcctgtcccacccggcggcgggcgggttcctgacccactgcggctggaacgcgacgctggaggccatctcccacggcgtgccggcgctgacgtggcccaacttctccgaccagttcagcagcgagcagctgctcgtcgacgtgctccgcgtcggcgtcaggtcgggcgtcacggtgccccccatgttcctccccgccgaggccgagggcgtgcagctcaccagcgacggcgtggtcaaggcggtgaccgagctgatggacggcggagacgaggggacggcgaggagggcgcgcgccaaggagctcgccgcgaaggcgagggcggcgatggaggaaggcgggtcgtcgcacgccggcctgacggacgtgatcggatacgtctcggagttttcggcgaagaagcggcaggagagggacgccggcgagaccgcccagcagccgccgccatctccggcggagctcggagatattagcggcgacaaggtcgaagcagatcctgccttgtcagtacaatcgtagataatacagtgtgttactaggttactagattgatgatgatgtaattagcgcacatttaggttgttacattattaattaatcacgaattcgaaaacatgtataac

SEQ ID NO: 15663 - DNA, 1557 bp, Oryza sativa
  ref <308>: DATABASE ACCESSION NUMBER: AK066179
  ref <309>: DATABASE ENTRY DATE: 2001-12-06
tgtgtgtgcagataacccaactcgcccaacccgggagagctctcccctccctctcctcctcttctctctctcactaaacaaaccacacgcaacgcaagcacgcggcggcggcgtctcctctccacgaaaaccctagcccgcgccgcatccccaacctcctcctcctcctccccgccgccgccgcccgatcgccgcgtcctccgctccgcaccctcccccgcagatcggcggcggcctgtgcccgcgggggtcgcgcggggcccgcgtgtttcccagattcagatttccccggcggtgagcggattcgggaggttttttaggggggttgattatggtgggaggagggaggaggggcgccgcggcggaggaggtgaagctcagcaccggcaacgtgttcgccgcgctcgagacgctcaagaagaagaagaagggcggggacaaggccaagggcggctcgtcgtcgtcgtcggggaggaagagggagcagcagggggcgcagccgtcgtctcagcagcagcagcagcagcagaaggaggtcttctgggcgcccgcgcccctcaccaccaagtcctgggccgacgtcgaggacgacgacgacgacgactacttcgccaccaccgctccccctcgccccgcctggggcaccggccatggcgacgatggggccaaggaggaggatgaggaggacgacgacgatgccgtccacgccgcccttcaggaggaagtagagagtgaagatgaggacctcgatgatgaggttgatgatggtgctgtggatgaacctgagcatgaagtggatgatacctctgctgaacctgctggtaagaaagctgcagttcctgttgcaccgcctaaagatacggagaggcagctgtccaaaaaggagttgaaaaagaaggagctagccgaacttgatgctgttctggctgagttgggaatttctggtggttcaagcaatgctgcacaggatgaaaacaatgctgagaagaaaggttcaaaccaaactggtgatggagatgcaccagcaccttcagagagcaagagttccaagaagaagaaaaacaagaaagcaaaggaggctaaagaatcacaagaaccagctgatgggacagaggagactgccagtgcagaacctgatgaagacacaacctctgttgatgtgaaggagcgcttaaagaagatggcttcaatgaagaaaaagaaatcaggcaaagagtcagacacagctgcaaaaattgcagctgctgaggctgcagcaaggagcgctaggctcgcggcagccaagaagaaagagaagaaccattacaaccagcaacctgtgcggtaaatggccgccaaagttttgaaaaatgttctgagtttgaaaaatccccttgttcgtttttggactcacaataaacttttttgagttgtatttatgacctttgagcgcctttctgagattcatttcgaattcttgaaggcctttctggtctcaaaacggtcatgtaattgtgttttgaattgttgacccggtggaacttaatggacggcatggccagtgggggctaattgggt

SEQ ID NO: 15664 - DNA, 1551 bp, Oryza sativa
  ref <308>: DATABASE ACCESSION NUMBER: AK066180
  ref <309>: DATABASE ENTRY DATE: 2001-12-06
gtattgtattatactagcttgcttgttcaattcaatcgagcagtagctaattgcatagtgatcgatcgatctgtatagatggtggtggccggcaagaagcagggacggcattctttttctgcatcatcatcgtcgtcttcgtcttcttcttgttcagtagtgcagctgggtcatcatcagcgcccacagggtgaggaccctctcatcggcatcaaagcagcagcagcaggaggaggaggaataatgagaaagggcccgtggacggagcaggaggacgtgcagttggtttggttcgtgcggctgctgggcgaacggcggtgggatttcttagcaaaggtgtcaggtttgcgcggcggcgggtgatgagcatatgcgtgcgtgcatctaatctatcgattaattgttgatgatgtcgatcagatggatggatgcatgcatatgccgtacatagtagatttgatgatagtaactgacataaatataatgtatgcgtgcgatcaacgctggttgttggatcgtccgtcgtgtgtatgggtggtgtgtggctgatgcaggtttgcagcgcagcgttaagagctgccgtctccggtgggtgaactacctgcatccagggctgaagcgagggaggatgagccccgaggaggagaggatggtggtgcagctccacgccaagctcggcaacaggtggtctcgcatcgccaagagcattcctggccgcaccgacaacgagatcaagaactactggcgcacccacctgcgcaagctcaagctcaaacagcaaaagcagcagcagtccgacgaccaccacaacgacaacgacgacgacgacgaccgcaactcctcctcctcttcgtcctcctccaacagcaacagcaacctgcagcagcagccgcagccagaggatgagtcgtcggccagtggcagcctgcaggcccaacatcatgaggaccagcaccaactgttccttcatcctctctggaacgacgacatcatcgtcgacgtcgactgctggagcagcagcaccaacgtcgtcgctccgccgccgatgcccgcctcgccgctctgggatatcgatgacgccttcttctgctcggattattcgctacctctctggggatagtatatatcatccatcagccgccaagacgatgacgactacatcaactcgatcgatcgatgcctcctaatcatgtgggagtactcagctcatctcaattgttacatccttgctacagctgctaattactgtaattactagcttgcatatagggatcgacggaggaattaatatatacatgttagtaactcgttctatagcgcaacttgcagttgcatctcaatctctgatcagtactatataaatatatatatatgtaacagctgctagctatagctagctgcgtacacatccatatgaatgtgtgtgtgttcatgcttgtactgcctcttgtagtatatgcacatatacgtgcaagtgcaacagacggctgctggctgatatattttgatcagcgcgccacgtgcacgtgcatacgtttcttcatttctggc

SEQ ID NO: 15665 - DNA, 3042 bp, Oryza sativa
  ref <308>: DATABASE ACCESSION NUMBER: AK066181
  ref <309>: DATABASE ENTRY DATE: 2001-12-06
gagtttttgcccttgatttgatcccccaattcattccatcccgcgaccgagctgggcgtcagcgccgtcgttcgtccctgctgcttccgccgtcgcatcccatcctcatcctccgccaccgccgcctgcgccgatccccatccatccatccacccagcgaccgaccgaccgagcagggtcgccgtcgttcgtacggctgcttcctcgccgcatccatccatccatccatcctgtgcattgtgtcaaaggcattgggctatatccttttgtatttgtgtttcttggttcatattgaaggactgttgacatttttgagggaaaatgagtggtgcacccaagaggtcgcatgaggagggtagtcactccacaccggcaaaacggccgttggatgacagcagcttgtactcaagcccttctgggaaaattattcaaccaggcagcagtgatttccatggttcgtttgaacatgatgggagatttgccaaagttcaacgtattgagccccgggatgataagaggccctctctggcacataggatgcctattggcccctccaactttgtggaccactcaatctcatctgatggcagattagaatcaaagcaaaataaagatccatgggacactaaggtagatgttcgggaggcaaaggctgacactcgagatgtctacagtgatcccagggttgaatttccgagcaataaagttgagactgatgtaaagacggacaatagagcagatgacaatgacataagagccgacagacggatacatgctgactacaaaggtgatgccaaactggacaaagatggtcatcctacagcaatttcaaacatagcctggaaagataacaaagaacataggggtaaaaggaatattgagcagccatctgataatgcagattggcgttttccccgccctggtttgcaaggaacagatgaatcttccaaaggtccagttcctgcagatgagcggtccaaggatgctcatgaatctactggtgagaataaaactgaacctaaaactgaagataagtttagagataaggacaggaaaaagaaggatgaaaagcatagggacttcggcacaagagacaatgatagaaatgatcgccgaattggtattcagcttggaggcaatagtgttgaacgaagagagaatcagagggaagatagggatgctgaaaagtgggatagggaaagaaaagattcccagaaggacaaggaaggcaatgatagagagaaggattctgcaaaggagtcatcagtagcaactgaaaaggagaatgcagtactggaaaaaactgcatctgatggagctgttaaaagtgccgagcatgagaataaaacagtagagcagaagacacttaaagatggtgcatggaaatcacatgatagggatcccaaggacaagaaaagagagaaggatatggatgcaggagaaaggcacgaccaaaggagtaaatataatgacaaggaatcagatgatacttgccctgaaggagatatagagaaggataaggaagcccttggaagtgtccaacgcaagagaatggcgcgatcaaggggtggtagtcaagcatcccaacgagaacctcgatttaggtctaggatgcgtgatggtgaaggatctcaaggtaaatctgaggcatcagccattgtctataaagctggtgagtgcatgcaagagcttctgaaatcatggaaagagtttgaagcaaccccagaagctaaaagtgctgaaagtgtgcaaaatggccccactcttgagatccgcatacccgcagagtttgttacgtccactaaccgtcaagtaaaaggtgctcaactttggggaacggatatttatacaaatgattcagatcttgtcgctgtgcttatgcatactggttactgctcccctacatcatcacctccaccatctgcaatccaagagctacgagcaactgttcgagttctaccgccacaagacagctatacttcaactttaaggaacaatgtccgctcacgtgcttggggtgctggtattggttgtagctttcgcatagaacgctgctgcattgttaagaaaggtggtggtactattgatcttgagcctcgcctaagccatacatcagctgtggagcctacacttgctccggttgcggttgagcgcacaatgacaacaagagcagcagcttctaatgcgttacgtcaacaaagatttgttcgggaagtcacaatacagtacaatctctgcaacgagccatggttgaaatacagcataagcattgaggcagacaagggattgaaaaagtcattatatacttctgcgaggctgaaaaaaggcgaagtcatatacttggaaacacattataataggtatgagctgtgcttcagtggagaaaaggctcgtcttgttggatcaagctccaatgcggcagacgcagaaactgagaaacaccagaatagtagccaccatcactcgcaaaatggggacagggcctcttcagaacatgaactgcgggatttgttccgatggtcccgctgtaagaaggcgatgcctgagagctctatgcgctccatcggtatcccgctgccagctgatcaacttgaggtgctgcaggataatttggaatgggaggatgtgcagtggtcgcagactggtgtttgggttgctggaaaggaatatcctctcgcccgagtgcatttcctatcatcaaactagcccctgcaagtccttcaagttgtcgtagcagccggttcatgaactaatttctcgcaacaatttaaggcaggagcttctctttggtccatgtcgcggttttattgtacaatgtacaatgcatccatgccatgtctgtgtataaatcaagaatgctcagctgctgtaggctgtgttgtgtgtagtattttttcccccttttttcataaactatttgagttctagttgggctgcttctgccccatgtcactgagatgtagctgttgcttcacaatttagctaacctgatgattattgttgaatggttgatgtgctgtaacttaattcagtgctgtgttc

SEQ ID NO: 15666 - DNA, 1948 bp, Oryza sativa
  ref <308>: DATABASE ACCESSION NUMBER: AK066182
  ref <309>: DATABASE ENTRY DATE: 2001-12-06
gagtagctttcgcagaggcggcagccaccaccgcctcctcctcctcctcctcatccgacggtgtgcaaccaagcgatggagttctccggcggcgcgaccgtgtcggcgccgttcggttgctgccgtgcggcgtggggcgccgcggcggcgggtgcgggggcggagggaaggagcaggagggttgtgccgcgcgcggtggagccgcggcggcgcgggcggtggatggtgaggtgcgtggcgacggagaagcacaaggacgcggcggcgcggcgcggcggcgtggaggtggagttcgccgacgaggaggactacgtcaagggcggcggcggcgagcttctctacgtgcaaatgcaggcgtccaagtccatggacagccagtccaagatctcctccaagctgctgcccatacccgatgaaaattcagttcttgatttggtcatcattggctgcggtccagctggcttatccctagcagcagagtcagctaagaaagggctcaatgttggtctcattggccctgatcttccattcacgaacaactacggtgtgtgggaggatgaattcaaagacctgggcctggagagctgcattgaacatgtctggaaggatactatcgtgtacctagacggtaacaagccaataatgattggccgtgcgtatggcagggttcacagggacttgctgcacgaggagttgctgagacgatgctatgacgctggcgtcacatacctcagctcgaaggtggacaagatcatggaatctcctgatggacatcgggtagtctgttgtgaaggggatcgtgaggtactttgcaggcttgccattgttgcatctggggcagcatctggtaggcttctagagtacgaggttggtggtccgcgtgtttgtgtgcagactgcatatggtgtcgaagtcgaggtggaaaacaatccatatgatcccagcttaatggttttcatggactacagagattgcttcaaagacaaattctcacatcctgagcaaggaaatccaacgttcctctatgccatgcccatgtcatccacacgaattttctttgaggaaacatgcctagcttctaaagaagcaatgccctttgacctccttaaaaagcggttgatgtctcggttggatgcaatgggagttcatattcgaaaagtatacgaggaggaatggtcctacattcctgttggagggtccttaccaaatacagaccagaaaaatctcgcatttggtgcggcagcaagtatggtgcatcctgcaaccggatactcggtggttagatcattgtctgaagctccaagatatgcatctgtgatatctgatatcttgagaaaccgtgtctaccctggagaatatttgcctggaacctctcaaagttccagtccatcaatgcttgcatggagaacattatggccccaagaacggaaacgtcaacgatcattcttcctttttgggctggctttgataatccaactgaataacgaaggcattcagacattctttgaaacctttttccggttgcccaaatggatgtggcgaggattccttggttcgacgctttcttcagtggatctcatactctttgcattctacatgttcacaattgcgccgaaccaaatgcgaatgaaccttgtcagacatctcctctctgatccgaccggctcaacgatgatcaagacctacctgaccttgtaaaaccatttcagcagtctacaagaatattaggaaatgtacagttttgtagtttgtacataacatagtgagagccagaggatatgggggttggggggttacttatcatgctagaacaacaaaacactgcaagaattttatgcatgaatttggcaaatggaatagattatgcggaatgggaacacgtgaatacgtgatgcgtgtgctggaacaacaagtaggaggaataaaacccatggattatggatcttgc

SEQ ID NO: 15667 - DNA, 1136 bp, Oryza sativa
  ref <308>: DATABASE ACCESSION NUMBER: AK066183
  ref <309>: DATABASE ENTRY DATE: 2001-12-06
gatcgctgctgctacactgctccggccatggccatcgtcgccgtcacggccggaggacggcgccctccctgccgccgcgtgccgcccgccgcttccccgcccgcgaggctctcctgccgctgtgccacccacaccggaggaatgtactatccacaatgctatccacttcaacagtcttcctcttcggaccgaaacagatcacactggccgagacaactggtggtacattcagggagtacatcgacacattcgatggctactccttcctctacccaaagagctggatccaggtccggggagctggtgctgacatattcttcagagacccgttcttcctcgacgagaacatgtcggtcgagatatcgtctccttcgtcgtcgaagtacatgacggttgaagatcttgggcccccagagaaggctgcagagagagtgctgcagcagtacctgacagagttcatgtcgaccaggctaggcgttcgacgaacgtcgaacatcctgtcagcgtcgtcgaaggtcgctgacgacggcaagctctactatgaagttgaggtgaaccaaacagattatacaaattcccattcataactcacataatcagcctgcaaagttcagtttgtttctcccactgtttgttcagagatgcttgaaaaaaaaacctgcatgaacattcagacaaattgcttctgctgctgctgctgctgtttttgcaggtgaatatcaagtcatttgccagcaacaacgagctggcggtgatgccgcaggacagggtgcagcggctggagtgggaccggcgctacctgtcggtgctcggcgtcgagaacaagcggctgtacgagctccggctgcagtcgccggagaaggtgttcaaggaggaagaaggtgacctgaggagagtcatggactccttcagggttaacaagactgcctagcagcagtaagaagcagtgctttgtcatagttgagagcagaattttttgtatagctagcagattgtctgttctctgcattattctttcaccctccttttgttatcttgtacaagattattgccatatagtaccttatgtgtaagattatatatagtacctctgtaagatgctctggtgaggagcaaaaaaaagatccaaaacttgc

SEQ ID NO: 15668 - DNA, 1548 bp, Oryza sativa
  ref <308>: DATABASE ACCESSION NUMBER: AK066184
  ref <309>: DATABASE ENTRY DATE: 2001-12-06
gggcttccaaagcaaacggaggaggaactgaggaagacgcctgggctgagaacccgaagaagcccgacgactccggaatcgggggctcgggcagtcgagctcaccgcgcgcgcgcgtcccgtctcgccgagtaacaaaaggacactatgagctccgcaagcggtgtgaacaatggtgatggaaaagaagcggcactgtttgagcagcggctatccaagattggtgaagttagagctgccctaggacaactatcaggaaaagctgcgctatattgctcagatgcttcgattgcgaggtacctggtagcgaggaactgggaagtgaagaaggccacgaaaatgctgaagaaaaccttgaaatggcgttcagagtataagccagatgagatccgttgggatgagatagcaaacgaagctgcaactggaaaaatctaccgaactgattactttgacaagagtggacggagtattcttgtcatgagacctggagttcagaataccaagaaggccaaggggcagatcagatatttggtatactgtatggagaatgcaattctgaatcttccgcatgaccagagtcagatggtttggctcattgattttgctggattctcattatctaacatatcacttcatgtgacaaagttgacagcagatgtcctacaaggtcactatcctgaaagattgggtgttgcaattctttacaatgctcctaagttttttgagtctttctggaagatcgcaagccccattcttgagccaaagactttcaacaaggtcaaatttgtatacccagataggcctgagactaacaagatcatggaagacctttttaacatggaagaattagaatctgcatttggtggcaaaaaccaggctacttttaacataaatgattatgctgcaaggatgagaggagatgacatcaagatgccattgttctggagtcctgaaaattctgctcttgcttcagagccatatgtgatggtgaacaaggacatggcacaagaaggtagttcaggtttgaagagtgaagagactgcatctgaaaagagggaagaaacagatactgaatctgaaaacagggaagaaacagagagtgaatctgagagggcagaaatagactctgtatctgggaagagggaagaaacagtggctgtatctgacaagagagaagaaaaagagactgaatctgaaaatgggaaagccgcagtgacttcatcaaacggagttgagctgacaagcttgccaggcgaaggtaaaggtataaccccggcagattgaagtgtctgttcatcgtctgatccatgaataccaccatggaaaatgcaagccaactgttgatatgaactccaacacagtgaattctcagctctcaccaagagatgaacaccaaatgttaactagaaacgctttaacacacagcaggaatgtgttgcctgacttgttttgtagtcggcaccaccatcccaaccttcgtgacctcatttgagaaccctttcgcaacaatatctgccagatgataaataacagcacgacactttgttgc

SEQ ID NO: 15669 - DNA, 1805 bp, Oryza sativa
  ref <308>: DATABASE ACCESSION NUMBER: AK098952
  ref <309>: DATABASE ENTRY DATE: 2002-08-28
acacacacactccacctaatcttcttctcctcacacattcacacacacacaccccgcagaccccggcaccttaccgagcggcggctcagcacgctgctgctacgcacatggacaagagccagggagtcctactgtccagcaacgtcggggccggctcccggccgtggccggagctgctcggctccgcccactgggacggcctcctcgacccgctcgacctcacgctgcgccgcctcatcctgctctgcggcgacctctgccaggtcacctacgactccttcaactccgactcccactccaagtactgcggcacctgccgcttctccaggtccacgctcctcgaccgcacgcagttcccggccgccggcgacctctccgtcgccgcctacctctacgccacctccgacgccacggcgttcccggggagcatggtgtactcgatgtcgcgcgaggcgtggagcaaggagtccaactggatcggctacgtcgccgtgtccaacgacgccgcagcggccgcctcgggccagcgcgtcatctacgtcgcgtggcgcggcaccatccggtcgctggagtgggtcgacgtgctcaagccggacctggtcgaccacgacgacatcctccccgaggggcacccggggcgcggccggtcgcgcgtcatgaaggggtggtacctcatctacagctccaccgacgagcgctcccctttctccaagtacagcgcccgcgaccagatgctcgccaccgtgcgcgagctggtggcgaggtacaggaacgagagcctcggcgtcgtctgcacggggcacagcctcggcgcgtcgctcgccacgctctgcgcgttcgatatcgtcgtcaacggcgtgtccaaggtcggcgacggcgcgcacatcccggtgaccgccgtggtgttcgggagcccgcagatcgggaacccggagttcaagaagcagttcgaggagcagcccaacctgcgggcgctgcacgtcaggaacatgcccgacctcatcccgctctacccgagcggcctcctcggctacgccaacgtcggcaaaaccctccaggtcgactccaagaagtcgccctacgtgaagcgagacaccagcccaggcgactaccacaacctgcaggggatcctacacacggtggccggctggaacgggaaggacggcgagttcaagctccaggtgaagcgcagcgtcgcgctggtgaacaagtcgagcggcttcctcaaggacagcaaccttgtgccggagtcatggtgggtggagaggaacaaaggcatggtgctcggccagaacggggaatggcagctcgaggggcccgcagaggagaacctgcccgtgccaccggtggtgaccgggaagatcatcgacgacgacgtcgctgccgtggccacctccagcagtgccaaggaggataagaagacgggcaaagggtctaagcttctgtctggattgattgatcaactgctttgtgtgcctgatacatgtaaagccggagctgcgtgagttgttgaagaccacatcagaaaaagactcgagagcggtggcgtcgaactgatatgcttgtgaagtagctggagcttgggagttgggagcgagctagattacaacaatgtcatttatcggtttttctttggaataaaatgagttgttttgttaggagaaagtagtatttttcctttctgcttttagtgtctcttgagaaagaataaaatgagtcctggcatcataagtaggtgggttagtcgactaggttcgagcctcaccacatctcaataaatatcgatatgtgacccctcctttcat

SEQ ID NO: 15670 - DNA, 1313 bp, Oryza sativa
  ref <308>: DATABASE ACCESSION NUMBER: AK066185
  ref <309>: DATABASE ENTRY DATE: 2001-12-06
gcgtcggaccgcctcggcggccgtgtcgccaccgacgaggtcgatgggtatcggttggatagggggttccagatcttcctcaccgcctaccaggagtgccggcgtctccttgacttcccggcgttgcggctccggccgttttatcctggagcgctcgtcttcctcggcgccggcgagccgttctacctgttgtctgacccgttccggcttcctctgcgttccctctccgccgtgttctcccccgtcggaacgctcgctgataagctcctcgtcggcctcgcccggctccgcgcggcgtccaccccggacgacgtcatcctctcgtcgccggagacgaccacggcggcgcacctggagaagctcgggttctcgccgtccatcgtggagcggttcctgcggccgttcctggctgggatattcttcgacccggcgctcgacacgtcgtcgcgcctcttcgagctcgtgttcaagcgcctcgccctcggggacaacgcgctgccggaggccggcatcggcgccatcgcgtcgcagctcgcggaccgcctgccggcgggctccgtccgcctcaactcccgcgccgcggccatcggccagtccagcgtgacgctcgacaccggcgagaccgtctccggcgagctcggcgtcatcgtcgccgtcgagcagccggaggccgagaagctcctaccgcagctaccaacgattccggcgaaacccaagaagaactccgagcggagcaccgtctgcctctacttcgccgccgacaaggcggcggtccaagaccccatcctgctcctcaacggctcaggcaaagggatcgtaaacaacatgttcttcgccaccaacgtggcgccgtcgtacgcgccgccggggaggtcgctggtgtccgtatccctcgtcggctccttcgccgggcggtccgacgccgacctcgccggcgaggtggtcaccgagctcgccgggtggttcggcgccggggaggtcgcgtcgtggacgcacctgaggacgtaccgcatcggcttcgcgcagccggaccagacgccgccgacttcgccggcggggcgcgacccgagggtcggcgacgggctgtacatgtgcggcgaccactggtgctacgcgacgttcgacggcgcgctggtgtccgggaggagagcggccgaagctctggctaaggacaggggattatccttagcctgatttgagctgagtgggccatatgggccttgtttattttaggccttccatttgtaaatggttggaataagttcactttgggttcctgtatttgtcgccagtctgattttcgcccattgatc

SEQ ID NO: 15671 - DNA, 2502 bp, Oryza sativa
  ref <308>: DATABASE ACCESSION NUMBER: AK066186
  ref <309>: DATABASE ENTRY DATE: 2001-12-06
aaaataacgcgcacgcccgccggacctaacccacgccgtgccggccgccagacgccactgctccgcccgcctgaattcaccgccgccgccctcccccacgccgccatctccacggccctcccacgccaccgaagccacgccgccgcgccgcccgcctcacctcaccgctgagccgcacttccccccgctgcctcctcaactcctcgccgccggccggtaccctactccgcttgcaaccgtcgccatcggagccgtggatccgtcgccgccctgaatttcacctgcatccgcccgcttgtgacgtgtttgattttttttttgtccccggtgattcgattcaaattcaatctgatcctttgttggttttgattttttttgtgttctatatgttgttccctgtggtcgtcctttcgccgtgttcggttgttgcaggagcggatttgattggaagttcccaagtcgaggtctcaaggaagaggtcagtttcccgtctacagtccggtcgtttgatttagtcacttgggtcggtgattgatttcagatttgagtggttgattacaaccttcaatcgatggatggatgatcatcggtttctatcagtccttacacgaggtgattcgataccctgggttgattgttatttgtaaccgctgatctggcttgtggtatgtgtttgtgctcctctagatgatgcaggaaggagagtgcctgttgagatgaaccgaattggtggaggtttgattattatggtccaggttcatggttgctttgattattagttagattcatgatgaataggggtggtggaggtttgcttgttatggttcatggttcttttgattagttcatgatggttttgaaattattctgacacgaaagtttgtggtgccgtgacaaccctcactggatttcctttggtcagatcctcaaaatgtgcagatttctaagtggtttcgagatagatgtacgagagattgtcagatggaatagcaatgctttgtttggattctgacccccccccccccgcgcgatttgatttatgcctgaaaagtctgatttgggccgttggttgttcttcagaattgttggagttgcatctcatgatagcacataacaaagatggaatttgcaacccaaacctgcctcggtctacgagctcaagacaggctttatccctatgcactcaatctttaattcatgttttctgtacttaggctactttcttccaaaataatattcttgctctctgtaggtctctgaataggagtaatttttttatggcccgtctcagtgaagcacaccaccattttctcttcaattcgtcattagaagttaaatacttacaaagttgaatttcttcccaaataaatgttctcttgcttattgcaggcctatctcataattttgcaagaccaaccttcaccgagtgaaatctttaaatcaccgccattctcttcaattcatcattagaagttaaatacctcacaaagatatatttaaatccaatctattactcactacaggtttctacataatttctatggccaatctgagtgaatcctttaaatcatctcccctttctcttcaatttatcatcagaagttaattgcttgcaaagttgaatttcttctcgaatatttgatgattctgaacaaaatctgctcgaaagttgccacaaatggtctgagagaatagtgaaataagaagaaagtaattggccgaaagaaagctctgcattcgatgtacacctcaaaataatttgagtttttgccgttccatatgaattcattgttagctgcaagtttctatactagatgaacaattcttacatgtgtgcggagtgcactaaatttcccctgaactcccctgattcacaagcatttttaatagataaataccagcacttttatgcatgtgctgcttccttcggtgttatgtatatattaaacttagaagaatttcttctacacaatacagttgaccttttattggttcatgtaaaatttaattgttctgtttgtttctttacagggaagctatgaaattatgagaagtagcatgcctaagttgactctcttctgcttgatatgatgtcctgaacatgcattgttcaggtgagcatagttatctatattgagatcccttccgcatcgtgatcgcgtccggcccacaccccggtcatggccattctgtcctctaaaccttccagataaacaatttaacaggagcaaaacagctttgttcgaaggactcaatgctaggaatagcatggggttaaggcattgaatattcctctcccatgctctggaccgtttttctgttggcggtctaagtcaggcattgctccagtattagcttttggatggctttaattttattttgtgaaatttgaatctgataaaagtacatgaataaaaacttatgttatttcttatttcatcattgtaaactatgagatcaatctagccccaggaggtgtttgacaatatttgaatgtttatt

SEQ ID NO: 15672 - DNA, 1829 bp, Oryza sativa
  ref <308>: DATABASE ACCESSION NUMBER: AK066187
  ref <309>: DATABASE ENTRY DATE: 2001-12-06
gatagcgtgaacaatcgcgcagtgggcttttttcgacttttgggctagcaagatcacacacaacacgcacatcacgaaccggaccaaacctccgccgccgcccgccgccgccgccgccgcctacacaaccccccctcgccccccgccgcgccctcctctccgtacgtggagcgcatgcaaatcccctcgcgctcgattcttcgcctcctccgacgccccatcgtcgcgccttattctgccctgcggcaccgcatctcgatcccctcccgcgatctctcctctcctccatggctacctctggtccggctcgcgggtggctaccggcgcttgcgcgaagaatcgcttcagtcacggggacgcttaaccctcctgccagtcgtgtttctcgatttcctggatctcggaacatggccagcggcagtggagtggaaggcgagggattgggtataccatacaggcgccgcttcatcccatttgccaacgatcctatccacacaaccaaagataatatcatttctatggacaagcaccttcccatcacccaaggcaaggacagtgctgcaactaaggagttcatctcttgttatggccattgccgtcctaccacgtatggcgatgaagatgcttctaggacagctgtggaggtcaccggtggtaaacaagatccaaggggggcagttcagaacctaatagatggtgaagtggcagttcaggagctaatagatggtgaagaaattgcaaggaaccaaagggccagtgaggttagtgacaacgatggatatgaagagttcaatgatcgtgccgttaactaccactgtgactgtcatgtttggacgccacttattgcaagcagccaccgtgacggttctatatacgataccaggggcacctttggatctgggtggaaatgggattatcgtattgcagatcgtaacgagactcggttggaggcaatgatgttatcacatcccacgaaagattgctacatgagggatggaacttgcatatggcatcctgcaaatagcatgttgcaaattttctcagtaaagttggctaaaactcctgtagttgatggctcaattgaattgtatggatacattgctgtgcgggaccttcaggatccattacttaattatatagtcaaaattggcagggatgatcccatcattgtggagcagggttccctcatcgaaatgactggccctaagcgagggatcgacttttcttgtgctgttctagttgaatatgacatgagaatcaagacaggagaacgagaggaagatgatctacaactgattgatggtgcaacagatcttgaccatatattgacatcacatgtaccagtgagaaatcgcatttatggagattgcggcgcagttgacataactcaagcgaatcttttgtatgcatttgaggcgactgtagaagtcgtcatatcagaagtgcagactagttttgatttgtgtctcagctgttttaccagtgggttacatgaggaaattcggctctttgatggtgcgatcagtgagtcacgtgacttgaggaggtatgtgattgctgtcatggaacatgagtgtatggatttgaagttcaaggtaggtttagggtctgggtgtttcgctgaacattgtcgatccttcaaagcaactaatcatggatgtgccagtgaacaaataaagattgagttcgcctcaatctcggtgaaggtcacttggtcggctatggagttctagaagggtacttagcgtttggacattttttttttatttgttactccctcagttattgtaagactttctagcatgttcatattcatctggaataagttc

SEQ ID NO: 15673 - DNA, 1266 bp, Oryza sativa
  ref <308>: DATABASE ACCESSION NUMBER: AK066188
  ref <309>: DATABASE ENTRY DATE: 2001-12-06
gacttgttgcaatctagagagcttcatctttcagttcagacaccaagaacaagaagcaactccaccaccatataggtatctctagctctagctaggtagtagcatctaggacaccaagggcattggcaatggcaggcttctcacacctcccacagcagatggagcatggcctcatcaccaacaatggcttcctcttctgccatggcagccatggaggagcagcaaccaccacagctccagccatccctgaagatgcctcaatggagacctcatctgtggttcttgacacctctccacaggacaagaagaggaagcccagggaagaagacactgccagcctcaactctgctcactccaaggaggcaaaggagaatggcaggaagaggggagggaagaaacacagcagggatcagatggaggaggaggcacctcaggggttcatccatgtcagggcaaggagagggcaagcaacagatagccacagccttgcagagagggtgaggagagaaaggatcagtgagaggatgaggatgctgcaggctctggtccctggttgtgacaaggtcactggaaaggctctcattttggatgagatcatcaactatgtgcagtccttacagaaccaagttgagttcctttccatgaggattgcatctctgagccctgtgctgtatgggtttggcatagacagtgatgctttcagtgaccactctcagaagatggaaggaatgttccatgaggcagttgcaataccagcttctgtcctgaacagaggtagtagcccagctcaatctcatgccatcatggacacatcaaacacctctcctacaccctacacacttcaagtccagggaggcagcaacaacaactctctctcccaggacaatggcagctacatcatgcaaacagtaggggagccaaggcaagaactgttcaatcaagtggtgctcaataattacatgtgctctttccagtagggaggagagggtgagagacaaaaggctaggagaagggaccctacattgacaataggagggaataataatatgattcgatggtttgtggaagcaccagatgagtttgagatgttggatcgagtccatccccttgtctggtggcatgcatgcagtaattaaagagttgtactagagctaggatcaatttaattagaagtagtagtctcttctttgtcattgccattgtactctacttagacaaaaacaagcgaccatttgttcatatgaaagggtcactgaatttgctgcc

SEQ ID NO: 15674 - DNA, 2250 bp, Oryza sativa
  ref <308>: DATABASE ACCESSION NUMBER: AK066189
  ref <309>: DATABASE ENTRY DATE: 2001-12-06
gaacctgcaagagagctaatctcctatatggtcttagctaccgggatctataccctgcaactgtcatcagctgggcatgaagaacagcaggcggccagctatatttatttcagcttaattctcaaagggtatatatactttggtgaagatcgatcggtgcatggttgattagagagccaactgaatgggatttcgctcagtttgatcctcatcacagtaggtgcttaattggagggagtatgaaaagctggcttgcttaattgtgcaccatgcagatcaagagcagggaatgcaagaaaatgcagcatatggtatgtaaaatgcacgatgctggtgagtaatgttttaatgccccttatttgttactttggttaattaatttctacttaattttatccagttttgcctgatcagtaccctactttaattgtttcactatataatttgcacccggttattactatattgttgtagtgtgtctatcttaccattaataagatactccctccgtccctaaatatttgacgccgttgacttttttaaacatatttgacctttcatcttattcaaaaaatttaagtaattattaattccttttctatcatttgatttattgttaaatatacttttatgtatacatatagttttacatattttataaaagtttttgaataaaacgaacggtcaaatatgttttaaaaagtcaacggcgtcaaacatttagggacggagggagtaagaagtataaggctagtttttgtaacatatatagggtatccactatatatccctctattcctttgcaatagtactgaactgctatgcttatactaggacattaattactttggttacacagttgggaggtgtcagtttagtccagtggctgtagcacaatgttgtcttttgaggtgatttttttcatcaagtttattttgcatgatactccctgatcattaagatttcttagcaacatttatgaaaccacattaaaaaaaggacgtacgcataggcagatatatagcccgtgcttcacttgaagatttgtcattcatgcctcaattttcactagctaacacagaacgtttatgtgtacaataatccatctctcttttatggtttttatgtgtgtgaccacgttcttactagatgcacgaaaattatcattttagagttttacagtttatggaatgcttgtgtgtgtgtgttgcaaatgctcagtttatggatgatctagcaacagctaaaatgatgctacggattaatattattgtttttctatctgaaacaaatagatcatcaggcaatacacacatcaattgaggaacaacagctagcacacaacttatttcatgaccacgttcttaattagtttcttactagatgcatgaaaaccatcattttagagttttacactttatgaaatgcatgacagatttcaatcctagtgatagtagaaaattttcaaataagctagctggtgcaaaatggtttctgcggccgctatgcatgtcattcccattccccagaagttgatattgttaactgttaggtgcaaacgttgcaagcaaagcgcgcatgacacacacagccagagggcttcatgcatgttattaattacgatggaacaaattactccgatcccattttagcgcatgaaaagatggtttttgctaaccagccatcttaaaatggattcatttgcaattgaacagtataaatttacatattaattgtattgttttatgctctacttccttctcacggcgagagtcctgctactatactgctggtcagtcggaccgagccatgatccggaagaccggaagggagtcattcatgatctccctcttaaaacaattaataaggctagcttgaagcttctgatcattaattaacctacgatccgtctagctatactaagctactcttcgctaatctgcttaacaactttcaggaagtttttttcaagtatgtactatggattgaatggctgcttatacatatgtactgtgaagaattaccgtgtatatgtatgcaggggcagatatactttgggggtggcgggggctcaagcctctactgttagtaccaggactatgagagttctacgaaacctccactaaattttttattttgccatacgtatatgagaagagggttatagttttatttaattagtttgttcagattccttgttattttttcatggatctaccaccgtgtttatgaataaattttggtactccc

SEQ ID NO: 15675 - DNA, 807 bp, Oryza sativa
  ref <308>: DATABASE ACCESSION NUMBER: AK066190
  ref <309>: DATABASE ENTRY DATE: 2001-12-06
gaaaccttctattcctcctcctcgccaagccagcggaattttcccccaaatccaccgcgtcgccatggccgccgccgccgcccgcctcctcctcctcgccgtcgtcgccgcggtgttcctcctctcccccgcggcagccgggcgcccctgcggccacgcccagacgctcctcatctccttctcctccgtctccaggcccaaccccgaccccaacaaccccactcccctcaccaccaccgtcgtcaccgtcctccgcgtccgccgcctcggcccccaccaccccctccagatcccccgccccgatcccctccccgccgcctccgacgccgcctcgtccgtccaggagcgcgccaaggacatcctcgtcgtcgtctccggcctcctcttcggcttcggctgcggcgccctcaccgccgcgaccatgtacctcgtctggtccctcctcgcctccacctgcgctccttcctacgacgaggtctacggcgaagacgacgacgacgagctgtccgactccgagagccccaagaaggccggatacgtcatcatccacgacgccgaacagtacgtcggcggtaagaactaggggtggggaattgggctatctcgccgatggccaatttaagaatttgtgataaatgatcgcgtggatttgcggggtatatatactactattagcacctatatatgtgttgcgtctgtctgactcagtatgtgtgtgtgatttcgaaaagaaacaaattatgaatacggtcttgatgttttcttacataatttaaagtgaaactgaagtgtccttatttattgacc

SEQ ID NO: 15676 - DNA, 2598 bp, Oryza sativa
  ref <308>: DATABASE ACCESSION NUMBER: AK066191
  ref <309>: DATABASE ENTRY DATE: 2001-12-06
tggagggggaaaaaaatcacaagagaggaggagaaaaaaaaatcgcagcagcaaaccctcctcctccgccatccgccgccttccctcctcccccacgatctccggcggcggcggcggcgatggcccggaagaggaagacggacgcggcgccgcggctggacgaggccgaccggacgctctactccaccttctgcggcgccgccaactccctctcccagctctacacccaggccatggcccagcagaagctctccttccaggccggcgagcgccactccctcgaaaaactccaccagtggatattgagaaagcatgaggaagagtcgaggctcacggcggctgatataatgtctcatatccagcatgagttggattatggaggtaatgatccacatgtttcccccagagtacatcagcatagtgcaaatccgtttgcaaactcaagcatccaaccctcagctggttcctatggtcaagcaacagtaggatttgcgcctagacccagcatcagtgatcagtcaaagaatacaattttctcaaatgctttatcaagcccggtccgtcggagccttcagagctatcatttaacccaaggatctggtaatggaggccgagggcgcgggagataacctcgccggagcaccgccaccgccgctgtcgatcttcttccccgaggcaaagccaggagtctagacaaactcagcttcatgagttcaagttcaggaaaagcactggcatccagcatctcctattcagcaggaaagagcagcattttcttgctctgcctctttgcaggatacttgggaattcctggccgaaaattccacttgctcaagaccgtttgcagcactgcatctccttccatcattggaagttgtggagggaaccttctttagactactttagcacaagtcttcagtttctattagtgtggaagcttggcctgcaaaaccagcaaccttagctacgtagtaggcctttggatgatggtttcttctcagacatcctctctgacaagaactatcgcacaggaccccgagctcttcacagcaaaaataattctcccaatgggtcccccggatgttatctctgaaaatgatgagtttgatttctctgatgtttttggcaccactccagttcagacgccaacaggcatttcggtagctggtccagacagtcctgcacctttggctgagtccaatgagggggtttacaatgatcctattgtcatcatcaagcgatctcattctcttgttggtccaacatcacttgttagccagtccctgcgacttagcaatctcactctaaataaaacagaggggtcatcagaacctgcagaagaaaaggaaaggaacctagggcagctcagtgatgaagagtttgacaatgccacaacagaaaatgaaggtattgggcttgatgactttgaaatcttgaagcttgtaggccaaggggcatttgggaaagtctttcaggtgagaaagaaaggtacttcagagatatacgcgatgaaagttatgaggaaggataagatcttggaaaagaaccatgcggagtacatgaaagccgaaagagatatattaacaaaagttgaccatccttttgtagtgcagctcaggtactcctttcagacaaaatatcgactttatcttgtcctggacttcataaatgggggacatctcttcttccagctctacaagcaaggattgttcagggaggaacttgcacggatctatactgctgaaattgtatctgctgtagctcaccttcacgacaacgggattatgcatagagatctcaagcctgaaaatatccttttggatgctgatggccatgccatgctcactgactttggccttgccaaagaatttaatgagaatacaagatcaaactcgatgtgtggaacagttgagtatatggccccagagattattcttggtcgggggcatgataaggcagctgactggtggagtgttggaatcctcctctttgaaatgctcacgggaaagcctccgtttgttgggaacagggataaagttcagcagaagatagtgaaagagaagctgaagcttccatcgtttttgtccagtgaagctcattccctcttgaaaggactgctccacaaagaaggtggcaagcggctaggaagcggtccgggcggcagcgatgagataaagaggtacaaatggctcaaaccgatcaactggaggaagctggaggcccggcagatccagccgagcttccgacccaacgtgagcgggctcacctgcatcgccaacttcgacgagtgctggaccagcatgccggtgctggactcgccggtggccacccctgtcgccggcggcgccggccacagcagcttcgccgggttcacctacgtcaggccggctccgttcctccaggatgtcaagcctccctcttcctctaggctgaaagactagctagcagccagtgcgagtgaagaaacggatgaaccaagagcaaggggaaagaggcgaagggtaggaagttactactaaaatatctgtaaaaggacaactggtccatgtgaatgcacttccggagctaatctacccaggagatatgatccatttgccc

SEQ ID NO: 15677 - DNA, 1979 bp, Oryza sativa
  ref <308>: DATABASE ACCESSION NUMBER: AK066192
  ref <309>: DATABASE ENTRY DATE: 2001-12-06
ctcccccatcttcttcttctctcccgcactccaaagtcgaaaccctcccaaaaccctaaaccccccatggcgccgcccgtccccactgccgccgctcgcctcgtcctccgccgcctcctctccacggcggtcgccgaggcggaggcggcggccgtggctcccgccgccgagaaggccgcggcgaagggcgccaagacggcggcggcggcgggggaggagaaggacgcgcggtcgctgtaccggcggctctcggcgctcgggggcgcgggggaagggagcgtgtcgcgggtgatgaacaagtgggtgcgcgaggggcgggaggcgcgcgcggcggatctcgccaagtacgtcaaggagcttcgcaagtacaagcgccacgcccacgccctcgagttgatggaatggatggttaacactaagggtatgaacatgtcatacactaaccatgccatacgtttggatctcatttataaagtgcgtggcattgaagcagcagaacaatactttgctggcctccctgatccaggcaagaaccataaaacttatggtgcacttttgaactgttattgctctgctaaaatggaagacaaagcaacagacatctatcgcaagatggacgaactaggaatctcatccagtactcttcctatcaacaacctgatgtctctttacgtgaagataggccagcataggaaggttacaagcctgtttgaggagatgaaagtgaagaatgttaaaccggataacctcacatgctgcctgctgatgagtagctatgcagcattgaacaagatagatactgttggagaggttctaaaagaaatggaagaaaaaaaagtggctctagggtggtctgcatatagcacactcgcttccctctatgtgaatgctaatatggttgaagaagcggaatctgctttgaagaaactcgagagtctcatcgatgttcaagctggcaggcagccttttgatttccttatgagcctatatgcatcagtaggcaatctgagtgaggtcaacagagtgtggaacctgataaaggctaattttcagaaggtgactaacaccagctacctcggcatgcttcaagctctttataaactcaatgacgatgatcgcatgaagcagatttatgaggattgggaatctaattatgaaaattatgatgcgaggctgacaaatatgatgacccgagcacatctaagaaatggcttgaccaaggaagctgaattactatgggagaaggttaaggaaaaaggtgcagaatttgattccaaaacatgtgagttgtttctagagcattacatggggaaaggggacatgacctccgctttgaactgggttgaaaatatgaccaaacttcccaggaagaaatcgaagctagatcaggagaagatcagctgtttcttgaagtatttcgaagagcacaaggatgtggaaggtgccgaaaggtttctcaactgcttgagaacgtcaggatgcattgatggcaaggcatatgagtccctcctgcggacctacttggcggctggcaagacaagccgttcgatccgccaaatgatcaaggaagataagattgagatatgctatggcatcgggaaattactcaagaggattgccgacaagggacgctgaaatgtttatcctcggtaattttactttgtcggtgacacgtgattcttcggcgagcggcacaaagcagattcgtttgagtgaactgttctcccttcttcctactgctccatgtagaggatgatatacctcatggctaggatgctgttccagccttttcttgcttctttttttcaagaagcagaggcatgctagggtaaagggttttttcttcaagtgcaacgtgtagtcttgtctgaggaggcttttctccaacacttcttttttgcttactttctgaacgaaatggcttctccagacatacagtactgaagcaagaatcctactacagaatcgttgctgtttcc

SEQ ID NO: 15678 - DNA, 2101 bp, Oryza sativa
  ref <308>: DATABASE ACCESSION NUMBER: AK066193
  ref <309>: DATABASE ENTRY DATE: 2001-12-06
gcccgacgcagaaacagcatccgcaaacgtgcccccgtctatccactcccctcctccccttcccttccctttgtggaggccaggccaagcctcccctcccctccccgctcctcctacgcagcgccgcggcggcggcggtagaaggcggcggagctctccaccctcccctccgccgcggcggcggccgtgttcctctgcggtggagaggccccccctggtcgtttctccgcgccggctcggcatctctccggaggaggaggaggaggaggagggaggagtaaggtgtggggatggagatcgaccgggcggtgcgggggagcagcgaccgccgcctgcggaccaagtacgacaacgccgtctacgtcgtgcagcgagccttcgcgctctacccgtttgaggaagttgccttcagctttaatggtgggaaggattcaacagttctgttgcatttacttcgggctggctactacctccacaaatcaagctctgatggtgaagtcgaaatgaatactatccaaaactgtcctgtgcgcaccatctattttgagagcccttgtgctttccctgaaatcaactcattcacttatgaaactgtctcaacttatggtttgccactggaaactatccgctcggattttaagtctggcctagaaggcctattgaaagagaggcctactaaagcaatttttattggttggtcaagagcagttctcgcctagttcacctggctggcctcctttcatgagggtcaatcctatattggactggtcatacagggatgtttggtctttcctgttgacctgtaaggtgaaatactgcagcctctatgatcaagggtatacttccattggaagcatatatgatactgttcccaatgcgcttctttgtgattcaacaactgggaaaagttttaggccagcatacatgttatcagacggaaggcttgaaagagctggcagaacaaagaagaatattagttctgtttcaagcaatggtacaaacagtactgaggtggaacagacgatctcacgctcagcgtcgatcattgtagttggtgatgaaatattgttcggcacagttgaggataagctaggtgcaggcttgtgcaagaagcttcatgcaattggctggcgagtttctcatgtagcagttgtttccaatgaaattgattctgttgctgaagaagttgaacgttgcaaatctacagatgacatggtgtttcttgttggaggacttgggcctttacattcagacatttcgctggccggcgttgcaaaagcatttggagttcgtctggctcctgatgaagagtttgaagaataccttagtcaactgataggagacaattacactggtgatcgaaatgagatggctttgttgccagaaggtattacggaattattgcatcacaaaatgctaccgttgccattgatcaaatgcaaaaatgtggtcattctcgctgcaactaatgtggatgagcttgaaacggagtggggttgtcttctagacacacaagagagcggtttagtgatggctaaatcttttgtgtcaaagcatctctgcacgtcgctattagatgttaaaattgccccagtggttgcaaaactatgcatagatttttctgatgtatacataggttgttatcggatctcaagatctgggcctttggttgtgagttttattgggaaggacaatcagagggtagaagcagctgccgagaagctgacgaatagctttgaagggcaattctcccaagttgacagttgcaaataagctttctgagtacacacttcgatagtcttcccgtgctcttcctgctggaagttctgaaattgtgcagggctaatgacgcgatacggtgctcggatggcttgatccaatggccggaatctggactctggagctccacatattatttaggaaaggaaacatagaaattttgtcctagaaatttagaagtgaattactgaatcaacagcagaggtgctctagcatgaagctgatatagaatggcggctttccacgcccgatattttgaccgggctaagggctcgtaatattcttttggaattaaactcaaattagattataatttatagcc

SEQ ID NO: 15679 - DNA, 2347 bp, Oryza sativa
  ref <308>: DATABASE ACCESSION NUMBER: AK066194
  ref <309>: DATABASE ENTRY DATE: 2001-12-06
ggttgtgttccaaatagaaacttgaagtatcatctttgtgttttacagtttatattaatgttttctctcaactctgagcaggatagcaatgtttggaaggatctattccttgcttacaagactcttggtgttgtttttggtggcctcgtcacttctcccctctacgtttatccctctatgaacttgtcatctcccacagaagctgactacctggggatatacagcataatgttttggactcttactttaattggtgtggtcaagtatgtatgcatagctctcaatgctgatgatcatggtgaaggtggtacatttgccatgtattctttgttgtgtaggcatgctgatataggcatccttccttccaaaagggtgtatgcagaagaagatccactgcttcacagtcagtctgcaatagccagaaggcctagtaggctgggaaagttctttgaacagagcataactgcaagaagagttttgttattcgtagcagtacttgggatgtgcatgctcattggagatggcatacttactcctgctatttcagtactatcagcaattgatgggataagagggccatttcctactgttagcaaacctgttgtggaggccctttctgcagcaattctcattggcttattcttattgcaaaagtatgggacttcaaaagtgagctttctgttttctccaatcatggcagcatggactttcaccactccaattatcggcttatacagtattgtacattactatcctggcatcttcaaagccatttcaccgtattatattgttcatttcttcctgagaaataaaaggcaaggttggcaactgcttggtgggactgttttatgcatcacaggtgctgaagctatgttcgcagatcttgggcacttcagcaaaaaggctattcagatagcatttctgtctagcatatatccttctttggtgctcacttatgctgggcaaacagcataccttataaacaatgtcaatgactttggtgatggtttctataaatttgttcctcgtcccgtttactggccaatgtttgtcgttgcaacactagcagcaattgttgcgagccaatccttaatatccgcgacattctctgtcatcaagcaatcagttgtcctggattacttccctcgtgttaaagtggtgcacacgtcgcaacacaaagaaggcgaggtttactccccagaaatcaattacattctcatggtactgtgtgtcggtgttatactaggatttggtggtggcaaggctatagggaatgctttcggtgttgtggtcatcatggtcatgctcataactacagtcctactcacccttgtgatgatcatcatatggagaacaccacttgtgcttgctgggctgtacttcgtccccttcttcatcatggaaggggcctatgtcagtgcagttttcaccaagatccctgaaggaggttggcttcctttcgcggtttccaaacccttgcaatgatcatgttcggctggtactacggtcggcaaaggaaatttgagtacgagatgacaaacaaagtgagcttggagcacctcggcgagctcttggcaaggcctgaggttcagagggtccctggcctctgcttcttctacagcaacatacaggacgggctaactccaatcctcagccattacatcaagaacatgagctcactgcacacggtcacaatttttgtcaccctgaggtccctgctcgtcgccaaagttgatcaaagcaaaaggatcctgataaacaggcttggaccaaacggggtgtacggctgcaccgttcagtacggctacgccgacaacctcagcctcgagggcggcgacgacctcgccgcgcaggtcacgagctgcctgcaatggcacatccagatggacactgatggccgccggtcaccggaggaagagatggcgcagctggaggcggcgaggttggccggcgtggtgcacgtccggggcaagatgaggttctacgtcggcgaggacgccggctggtttgataagatcatgctcggattctatgagttcttgcatgggatctgccggtcggctctgccggttcttgggatgcctctgcaacagcgagttgagatcggcatgctgtacaaggtctgatgagctgttgatcgattgaatcactagtgttgtctgttgccttacgatgttgatcgattggaactaggaatcagacggttagaagtgtaagatcaggaaattgtgttactgcgttatgtaaactgtatacattatacgtatagaaaaattcagcacgtcgtactgacatggttcgcatgttgcatcttctaaaaactgaagaaggaatcgcgtcaactttc

SEQ ID NO: 15680 - DNA, 1028 bp, Oryza sativa
  ref <308>: DATABASE ACCESSION NUMBER: AK066195
  ref <309>: DATABASE ENTRY DATE: 2001-12-06
gagctcctctttcgctttagccgcagctgcttcgctctgctttctccgtagggtttatccctttgcttctcctcgtctccctccccctcgcacgcaaaggcacaaagcccggattccaccgccggagccgacccgcttcgaggcgaatcgagagttagctttccagccagcaatcgaggatgtcgtcggtgcagctctccggtgccggagtcgccgcggtggccttcaccaagaatggcgcgtcttccttcgacgggctccgcctcgcgccgccatctgtgcgagtctgctcctccaggcgcccgtctcgtagcctcgtcgtcaaggccgccacggtcgtcaccccaaagtatacctcgctcaagcctctgggagacagagtgcttgtgaagcttggtgctgcagaggagaagactgttggtgggattctgcttccgtcaaccgcacagtctaagcctcagggaggtgaggttgttgctgttggagagggaagaactattggggataagaaagttgaggtcagcttgcagattggggctgaagttgtatattcaaaatatgctgggactgaggtgcaatttaacgacaccaaacatcttattctaaaagaggatgatatcattggtgttcttgagactgatgatgtcaaagatatgaagccccttaatgaccgggttctcatcaaggttgctgaggctgaagacaaaactgctggtggccttattctcactgaaaccactaaggagaagccatcaatcggaacagttgtagccgttggtccaggccctcttgatgatgaaggcaagaggcagccattgtcagtttcagcgggcagcactgtgatttgtttcaattttgagttcagaatagacggtagcaggtggtaatggttgccatgtggtgatcttcactctgcggagatgctgtctttgataatcctagaattcgaacgcaacaatttgcagatctcctacgggatcaacattccactgtgactgatttttatttataaaagtttgttttgtttc

SEQ ID NO: 15681 - DNA, 2570 bp, Oryza sativa
  ref <308>: DATABASE ACCESSION NUMBER: AK066196
  ref <309>: DATABASE ENTRY DATE: 2001-12-06
ggtaggtaggcaggtggcaagatcgatcgagcgatgacgtccgtgacctcagatttgctgcagtcgtgttcggaaaccatgatttcattcgtccacaacatgacggcttcctacgccgacaagagcaacgagtcctccgtggtgtccacctccgtcgtcatgttcatcctcgccgccgtcttcttcaacctcaacctcttcagcggcgtctccgacgtcagcgccgtgctcaaccccaccgtccgcatcttcctctccagcgcgctcaacctcttcctccccgtcatgtcctacctcttctccgaggccaagcaagcgccgctcggagtcggcgactccactaccaccaccagagacgcccactccgatgacctctcgctgctggcgcgtgtcatcctcacatggatgctcctcgtcgagctcctccgcaagaaggtggaggccatcctcatcaccaccggcatgcacgtctactccagcctcatcagtcacgccaccagcgtcgcctggctgggcaacctcgtcttcttcaacctccaggccgccggcaagaaggcgctgttcggcgtcctctgggtgctctgcgcggccaagctggtgcagcgcgtcgccatcaccgagatcgggaagcgctccttcgcccatggcaagaacgcccgcctcatctcctcctacatggcgcagctgccaaagctgctcgaggtggatgagcatgtcgccgccgacggcagcaggatggagcggtgcaacttcgccgtgatgggggaagagaacatggtgctcaaggccggaccacacggctacgagctcgacctcggcctcgccgccgccgtcgtcaccgtcgggaaaatctggcagaccaaacaacacccaaggctcaagaggctctgcctctccttcgctctcttcaagcttctgcgccgccggttcgagaacctgccgccggcgaccatgaaggagaccgacgagtgccgggacctcatcttggacggcatgtgcaaggatgctcaggccaccggcgacgtcccggcggaggtggcgctgttccaggtgctcaacgacgaggtgaacttcctggccgagtactaccactccgtcctccccgtggtgctcgcgagcccctacttcttcgtcgtcaactacctctgcttccccgtcgtcgtgttcggcctctgcgtcatgaccatcgtcctctgcggcaatggcaacgtcttgtacgccttcaagagcctaaccaacgacaactatgccgtctcatccggcatactctcgctgacgaaatgcctctggaaaaacgtcgtcaggtctccgctggtgttcttctccatcgtcgacgtctccatctgctacctcctcttcatcgtcgtcgtctacgaggaggtgtgggagttcgtcgtcttcctcctctccaactggttcatcgtctctctgctctgcaccttctccgccaagccccgccgccgcgagagccccaccttccgtggctccgtccgctgcatcctctggctccgccgaaacctcagccactaccctagcctcatcaccatcaagcagttcaccgtcctgagcacatgctgcctgtcgccgaggttgcccaccgccacgctgcccaggcatgcgaagctcgccatcctagaacgcttccgcggcggcgatcctctcagcaacggcggcgccgtgctgacgtcgatgggcggtaggcaccggcggttctcgcggctctcgtgggcgtgccagagcggagccgtcgcggaggtgatcctcacctggcacatcgccaccagcctcctggagacgaagcagcagcagcagcttccgacaagtgccagccggagccggaggacggcggcgaggctgtccagatactgcgcctacctcgtcgccttccggccggagctgctgccggacgaccgggaaggcacggagcgcatctacaaggacctgaagaagggcatcaaggcggcgctcggcggcgcacggggatactacctctcgtcggagcggagccggcacgagacgatccgtgcgctccgggtggacgcctccgccgccgccgacatgacggtgctcgagaggggcgccgtgctggggaagcagctggtggaggacgacgaagccggcgacggcgcggtgtgggagatgctggccgacgtgtgggttgagctcgtcgtgtacgtgtcgccgtcgcgcgcggaggagcacgccagggggcacgaggcggcgctggcgcagggcagcgaactcgtgacgctgctctgggtgctcgccacgcacaccggcatcgcccgcccggaccacgacggcgaaatcgaccagccggcggcgccggcatagcggagctcgcttgcattgcgcgcattggcgcgaacaccaagtaattaatgcggtgtactcggatgcttacgtctacgtgtgccctgtggtttggacgacattgctttcccggccatgtcttgttcggtttaatttccatctcatgtggaatctctctttgttatttgtgctctattatatttccttttgcaattgatgttaaacatgttaattaatttgtatattttggcactcct

SEQ ID NO: 15682 - DNA, 801 bp, Oryza sativa
  ref <308>: DATABASE ACCESSION NUMBER: AK066197
  ref <309>: DATABASE ENTRY DATE: 2001-12-06
gttcttctctcccccttttctcttccccgttcgaacgcctcggcggcagcggcggccgggggccggagtggcgacggcggccgcgccaccgcctgccctgtctccaagctggcctaccatcgcgcaagctccgccaggggctccgccgggggcgcggcatgggcgcccgcgcgcagcccacgccgtcgtgggcgcgggagccactgttcgagaaggccgtgacgcccagcgacgtcggcaagctcaaccgcctgctggtgcccaagcagcacgcggagaagcacttcccgctgcggcggacgagctccgacgcctccgccaccgccgccgcggccacctgcaactctgcaagggcgtgctcctcaacttcgaggacggcgaggggaaggtgtggaggttccggtactcgtgctggaacagcagccagagttacgtgctgaccaagggatggagccgattcgtgagggagaagggcctccgcgccggcgacaccatagtcttctccggctcggcgtatggccccgacaagctgctcttcatcgactgcaagaagaacaacacggcggcggccaccggcgacgagaagccaattacaagcggcgaagcaacacgcgtcgtgaggctgttcggcatggacatcaccggcggcggcggcgattgccggaagcgggagagggcggtggaaatggggcaagaggcgttcttgatgaagaggcaatgcgtggttcatcagcgtactcctgcccttggtgccctgctgttataacatcaaatcaattcatatatacatcataaatcttc

SEQ ID NO: 15683 - DNA, 1975 bp, Oryza sativa
  ref <308>: DATABASE ACCESSION NUMBER: AK066198
  ref <309>: DATABASE ENTRY DATE: 2001-12-06
gattcctcgtaacgattggcactgctttctggcgtgatattacacctttctcgtctctacttcctttggtcattttgtctctgtgttccatgtgttaaattctgggcttgtcttgccacagtacatagcattagtcattagagtagagccttaaaccaagaaactaagcaaagcttgttagataaagtgctgcagcattgcatacacatgcctttccgaagcccttagcttgaataagcgacatgctgagaacttgctacttgctagcattagcttgaataagccatgcatgttattatgatctaattgcagacatgcttggcttcatgcattgaacaggtatgctttggatgtgaatgtcgagcgggttgatgatgttctactgcacaagaggttgcttgaccaggcccgtgaaccaatgaatgggctggtcttcgatgttcgtcgttcgcaggctgctactctggatggaagcactgaagttgagcaatcaacttcctttaagcatgaagtacaagatcctcagtgctcatcgttcacatcgagagaccaaaggtgtttccatgaaattatatttgcatgtgacgataagcctaagcttcttagccagctaaccgctctacttggggaacttggccttaacatccaagaagcacatgcattttcgacgagtgatggctattctcttgacatctttgttgtcgatggctggagtcatgaggtcgatgttctacgagatgcattaaggagaggagttgaaaagataaagtacaaagcatggccattggttcagtccatgcctactaggacaggtcacgagctaatggaggattctcctccagctgattttgtccagattccagctgatgcaactgatgtttgggaagttgatccaaggcttctaaaatttgaacgaaaattagcatctggatcatttggtgatctataccatgggacatactgtagtcaagatgtagcaatcaaagtactcaagcctgagcgggtcagcgttgatatgctgcgtgagtttgcacaggaagtatatataatgaaaaaggttcgtcacaagaatgttgtgcaatttattggtgcatgcaccagaccacctattttgtgtatagttacagagttcatgcgtggaggaagtattttcgactttctttacaattttagaggaacttttcagctccctgatgtgttaagaattgcctctgatgtatccaaggggatgaactacctgcatcaaattaacattgtccacagggacttaaagactgctaatcttcttatggatgaccaggttgtcaaggttgcagactttggagtagccagagttaaagaccagtcaggagttatgactgcagaaacaggaacctatagatggatggctcctgaggtcatcgagcacttgccctacgatcagagagcagatgttttcagtttcgggatagttatttgggagctgctgactggaaagcttccttatgaagatatgacgcctcttcaagcagccgttgccgttgtccaaaaggatctgagacctatcattcctgctgatactcatcctatgcttgctggtctacttcagaaatgctggcagaaagatccagctctaagaccaactttttcagagattcttgatatactaaattctataaaggaggctgttcgaagttctggacatcagaagagacactcaggtcgatcttattccaggcagagacgaagcggttgatgcagcaattttcctttttttttaaaaaaaaaatcttgtttcggtttagtttctgaaatgcggcaggttttgtttagcgttccacaccctcccttttgttatggtcatttccacggcgagcaatttttacttggttgtatctcagcggtaacgttggaatataatctggtgagtttcttgtatttttttttcatgtcgtgagctggtgtaaacgattgttgattataatcctttcagttc

SEQ ID NO: 15684 - DNA, 4538 bp, Oryza sativa
  ref <308>: DATABASE ACCESSION NUMBER: AK066199
  ref <309>: DATABASE ENTRY DATE: 2001-12-06
actgccgccgccttcatcgctgggctcgcagcaatgtgcctctgccggtgaggcggccgccgcggcggcggcggcgaccgacgggcggcgatgcggaggagacggtggagaggagtgattccgttctactcccgggcatcactctcctggagcttccgttgctccggccggcgctatcatgccaccggggtttccgactttccctcccagaaggctttccctccccgtctccggccaactctggtctccggccatctcctcgtcggcgggggcaacctagcagtggactagcggaaggatcggaaggccacattcccagaggtttgcggctgtctctgttattgggaatctttacagcaacagtcttctcaccaattttgcactgaagaacagacccataactaccaattccaagaaaaattgcatctcggtcattgactacacgatgaatctgtgaaggcctgtactcggtgaacctaatcatctcataagacctggaagcttgctcctccatccaccagcgatgtttggtataaattgatactatggtttccgttctcctgagttcttccctgagtttctggttctccttgatggcattgttcgccctgaatctcaccaattatgaacagagatagaatgatcaggcaaaagaaacaatagtatattcaggctgactaacagacctccaagatcgccacaccttatggcttgttgccgatgttgggaacggcctcttccaagaaccatggctcaccaaggttcaaactgccgatcttcgacgatttcggctggatgaagctactgcttattggctgctgtgagtacactatggctgaatcttccaaggcttgcagctggtgaagattataaaggccaactgggggcaaggttggtccgttagtgggatggcttttcagtgccaacatctcaaagcacctgggattttcaatgttttttggtgtcattccagaaaagattaccagacaatggtggatcagtcgatcactgagtttgtaaccgatcttttacatccatcactttcagacaattgtaaaggctaactactactgtactgggaggaggcgtcgccgtggtggtggcagagggagaatggagaagggattccgatccagttccgggggtcattctcgctggagatgccgttgctctggtctgccctggagggtttcctcccagaagcggcttctccggccaccttccgtcgggcagcctggctcgctctggtttggcggatggagcagaggcgcagtgtgcactccgccgtgtcgcgagtggccggcgcagattccttctgggccggcgagccatccagacaaggctttcacagtttcactcaagtactcaaccttgactatgagaggcactgctcttcatcggcttgatgtgtgttcacacatcagctcatcagctgcgaggtccggacactgtttcccttccggatcactgcatctcaatcccaggacatatctccagcgtcttttaacaggtatttctgatgttctacctgatcctgttgtgttaccagactcaggctcctattggtgagcttcatctgcaatctgcacgccagcagcggactgggccttgttactagactcagactcctcttcttgagcctgatctgcgatctccacgtcagcactgaagggagtgtggacgttgttgccaggctcagactcctcttcttgagcttcatctataatctccacaccagcagcagaagtttggacattgctgccaggctcagactccccttcttgagcttcatctgtaatctccatgtcagcagcagactgagcgtggatgtcgttgccaggctcaggctcgtcttctcgtgcttcatctgcaatctccacatctgcttcagcagcttgctgcagcacctgctccgctggttgattctgcacgcctgcttcacgagcttcaattccgttttgggcatcttccaccatcgcatcatcttcgacattgtggccaccctgaggttcttctgctgcaggctgaggctgaggctggacgttggcatctccaggcgcatcgtcctgatctcgccacaggctgctcttctcgatgccgcagtaccagagcaatccccagatgaaggtgatgagctcccctccgtactcgaggcaaatcttgtgtgcctcagcgttccagctgggcgcaatgtgcacgagcaaatcagcccatacacccgccaggatttgccaccgctgctgatcgtctggaattgtttcaagcaattgccttcccagtaccgcgcctttctctacgatggtcccgttcagttttttcagttcagcagcttcgggtgagaacaacccattgagcttgtcatactttgtcagcaaggagtcgcggtcattcataatatcagaagcgccaagctgtcaggcaacaggtcaggctgaaaaaccaccaagtgcgcgcagtatcgtgacaagctgtttgcaacaatgtagctagttcggagttgatcatcaccgagaatattttcagcaacgaggtacggctgaggagtgcagcagcagccgcagagaaaaattttcaggtacgtgaaggcggagcgcaggagccctggtttgctcaggtcaatgcccctgtctcgggcgagcttgatctcgcacatggaggtcgcgatgtgccaaaccagaatgacctgggagcacgtgtacaggtcaagcaacgcccatcggaaatcctcaagcaatctcgcggcgctcaacgatgggacgtctcggggaagctcgcggccgcccaagccagcgagatccattgagcgcaatgcctgaagaattgcaggttttacacattctgggatcttgatggcggtgccaggcttttgcccttttaccctctctttgatgacgcctagagtagcacggtacatcaggttccagagcgacgggctgtaatcaaatgactgcaagaagtcgtactggtcgatgtatccatgccaagggtcagaaaagatcttacgacttaaaaaggaacttaacgttagaaaggaacttaacagcttctccatcgtggcgtttcttatccacctgcatctggaccgcgtatactcgcacacaaggagaagccttgtccagtctgatagcaagtaagtgatcatctcccagatctctttgaacatcatgaaggacatgaacacccatgtgattgtcacctccacattatggccgtgcacgacattgacggggtccggaagatctttcttgaccctattgacgcccgaggcgagccagagggcgagtcccaaggccgcgagagactgaagaacactcaaggagagagaagcaaggccttgccagaagacgataggatagagggtgtagaagtagtccttgaggaaatctccagctccattatcctgaacaccctcgcagggttctggtcgacatgcaatattcttgtcactatcagattccgcgacatggagaggctgtctgcgtccagcctcacgtcttcgagcctgcaccggagaaacctcgacatggaaaaggccaggcacagatccttgcagtcgtctccgtgaacgctgttggcggactgtagcaccggcccgtcagatcgccaaatcttgtccagtgtgaccagcaagttttcatcggtgacattgaggtagagagcatatcgaggcctcagtaatttgatcttctgcttggactcgccatgggccaagtatttgtatccgtccatcgtttccgcgttgtggacaccggatgccaatcctcccctcccaaagttgttacgcatgtactctggaaggagctcttaactgcggccatgccacagggataacagcgcaaggctctgtgcgatgaaccggtacatggaccgcagtagcagaacacaccaaatcgaccagaggggcctcacaaacatggagcctcgggtgcgattcaagaacgctactcccagaaacttgatcacatttcccagctcagtgatatgtcgtacccggtcaggtataccgtacctggagagatagccgatgctagcatgaagactcaccagcacaattgaccagacagggaagagctcattgctgaaaggcgcagcttgcatggtgcccaacagatacagcactatgcggtcagagatacgatcgaccttgtccaaagtggacatggtgccagagccgcgagaccgggcacggtagatgtccatggtaaacatcagaatgaacgccaccgtaacaaacgacaccagtgattcgatgcgaatcaagacgtacacgtcctcgcgcaacgtaacgaaccaggatgaaatgacggcacgagggtccaccatattcagagttgtgttattacgttcttccgggttcctgcacgcggccacaggcaatacttgtatatatcaacctggatgttaatttagatactagtagtccataacccatgcattcgtatatgatgaaggcttatctactttgtatctcagttttgttgaatttcagtttataactagtatggcggtccgtacatattgccggttaatattgttcg

SEQ ID NO: 15685 - DNA, 1490 bp, Oryza sativa
  ref <308>: DATABASE ACCESSION NUMBER: AK066200
  ref <309>: DATABASE ENTRY DATE: 2001-12-06
gagtcgtcccctgcatttccccatctcctcctctgagcaactatatcgagtttcgactaccatctcagcttcggtctcgtattctcgtggatcatcggaaagatgatctctacggaagaggactctgattcttttcaggatgacagcgaggaactgcaaatgcaggtgacaaagaagacgttgaagcgtgtcatatcactagccgaaaccttcatcgccatagcaaccggcatcctcgcggcagctttctcggcaggcaaagatgtccacctgcaccgccacgtcctggccgccggcggctgcttcctcgtcgtgacatacctgtccgctctcctgctcatctacatgaagctgttcttgtcagatcacaggcggctgcgccgatggcacgtccggtccctgcagctcctgtgcgtgaccagcggcgcgtcgctcgtcgccacgaactccctgctcctcgtcctcatcggcgaaggcaatggcttgctgtcgctcaacctgctgcccgtgcagggcatcgtcggcgtgctcgcgtaccacgcgacgccgacggaggggagcgcgcgcgacgaggcgttcgaggcgcaggtcaagagcgcccgcaaggtcgcgctgttcgcggcggccacggccttcgccgtgcagaccacgctcgtgtttggcgcgttcagcaacgccgccctgcaggcgatgggcggacgccggctggacctctcggtgtcgttcctggcgtcggcgctcagcgtgttcttggtcgtggcgacgtgcatgccgctcgggttcaggaaccagggcgccagggacaaggtgctgtccatcgtgaggtacctcaagaaaggcgtcatggccgtgctcgcggtcaccgcggtgactctcggccaggagttcctcggtggcgccgcggcgctcgcgctcttcccggagatcaccgtcgccgccatgtactacgccgtgagcatgcccgccgacgaggcggccgcggccgctgaccgcaagatggaggtgcttccgaccgtcgtcgtggcgacgttcggcttcgggatgctcggggcggcgtacgcggcgctgttcggcacgccggagtacgacctgtacaccaaggccctggcgttcaccctgctcaccgccgtcgtgtccagcctgggccgcgtggcggggccgctctgcaacgcccagcgtgacaagagctcggcggcgtgggtgacattcctcagcagcatcctccccatcgtggagatgctggtcgccgtcccgctcgccgccaaggtaatggttgattttctcgccgttcctggtaatggctgattttctcgccgtgcactcactagcacttgatgtcttgatcacttgtacaaattcttcgaacacgatacgtgcatactctgacacgcaccatgttgttgttgtactttactgactttgtacaatgtcatgtacttatagtagtggacctctcttggacaccctgaagagcacatattttttgtgtg

SEQ ID NO: 15686 - DNA, 4060 bp, Oryza sativa
  ref <308>: DATABASE ACCESSION NUMBER: AK066201
  ref <309>: DATABASE ENTRY DATE: 2001-12-06
agagaaaaaaaaaagggaaattcgaagtccgcagccggaggcccccacggcggcggcgctatggcgatctctccgcctccgccgagccctagctccggcgacccgatcgaggccgcgagacacgccgccgcggccgccctggcagtgcccgcacgcctatggggctccctcctcgcccgcctcccttcgctctcggaccgccgcccccgccgccgccgacgccctgctcttccgctccccttccgcacagccgccgcccattccgcccgggctaccggtgagacgcccaaagcttttggcatcctagaagatattgtacaacacacgctgtgtagtttgcatggtattcagaaaagcttactcttttggcagtccaaagctgagggaacaaattcacagaaaatgtattttatgatctttgaaaggggaccaagggcctttgttaaagcaacatatcagacattgactagactaaggagcaatgagagtccaacccagtacattttgcactctgcatctgatatggtctcaacaaaacttgctgtcctgacaaacatgcaacactgcttggctgcttttcttgctgaggtttattgcgaagttgacaaattcaaagaaggattaactgaaaattcagataaatcgcttcacacactgtttgctgttttgaatactgtcttctccaaattggaggtatcactccaaaatgtttgtgaggggcatactctactgttcgcactcgatggaagcccatctgaacttctctttgaaagattaccagaaattgattatgataactcagagtggacagaggcctcctcaacagatgctatatgttttatctaccaaaacctccagaagctagataaccttgtttgctctcagctctcaaggcataaaaaaccaagacatatgaccatatactggttgccctacacatgtggagcgttgggtctctcggcatgttctctgtggcttttgcgacacagtagcttgatgggaagttctgacatcgacaactgggttcaaagtgccaaagagtcaatagctggattttgggatgtgcatgttgagaaacctgtaggatactttctatttatgtccttctattatttatcttatgcattttaaatgatgctagtgtaagttaactgagggtgaatcaaggcattctagttaaagtcttttctcgttattccgacattgacatatatgagatgttctctgaggtacaggaggataagattttgttaatctattcatgcaaatatttgtctaacaaaaaggaaaaccagataaagggaaagaaaagcatgctgccttgtgcatactagccgtactgttttcttatagtataagcatatatgatagagtatagaaacaatttcatgtgtttgtttactgcagcacttgcacttattaccatgaacatccttaagtttacatgtgtatataaggcatataactaactactatctttgttgacaattataaggcacacacgtagtttcaaaattttggacattgtaattttttaccaataaataagtaatgtaagatgcaacattatatagttgtgtgatacaaaaatggtaattttgaatttttgtttgcaataacttatgatcatgattttgtagttacacacgctatattgcaaaagattcacagtcataaattcattttggcagaccacaccaagtcaaatcgcacacaatattatataaaaatcaacagatagtagagtaatatgcaccaacatctgcaccgaaatagtctaaatactattccttgtggaaccattgaatgcaacatgatataacttcagagagcattagtgtaggagatcaagtgtcaagttttagtggggaacttctagttggatttaatatagctgcaatttttttccacacctttgttgtggctgaattttgatattgttcttaaaatttggaaatcaattatgttattgtgattgcatcatgattgttttattctcatttgatgatcattagatcatttccatcagaggtgagctttttgagacattcaaaaacagaggtaaacatgtaatggatacacaagaggtccaactgaatgaagaagtattgcgcaggttattccctgatactacatctctaatatgcaaatttaatggtaatcatatcacatagttttttctgccactcgacaaattagtaccatattgcatatctaatattgcattttcatcatgttcatctgtttactcagatatgaatactttagatgatatttacctgtggtttcaagaattttaagtcgagtatgccagtatgggggtttcaataatgcagcagatatgcttgtaattttgatttgggatacccaccaccatattttgaagtgctttccaattattttaggcataaatagtggggtagtcactatgagtatttgtcttgtgtgacatgaagtagatgtggtggcacaagagcacagtggtaccagcttagaatttctgtttcctttttgttatcttttgtttactactgttaggattctgtcctcgtcctcaagataccaagtaagtagctgctatgctgagataagatatgttaggtcctttctctgtataaagggtcagacaaactgcacctgctttgaggaatcaatcaatggaaaaaaaatcctaaaatatctctcactccttgcttccctcgccatgcaacagctacactacagctagtcagtcatgcagtaggtgtctagggacatgtcctgaaaacttcccactacttccattcccgttttaacccacagtaaacaatatgaaagtattgtacaggtgtgatgattgatgaagccattgatgacatagtaaatactgtacaaaagagtggtgacgcctaaacaaaaagattccccaacccagcaccaagattttcttcgtttatctacttttttgttgatattattggttttgactaatgttttttcatcctggagtgctgtaactttttcagtaaaaaaatttgcaatttcttttgtcttgaacaaaaaattacaaactttaattttcttgaatatgcaaaacttcagctttgcagccatttttttctgagtccattagaggagcataaattatattttgcattttttaagcccactggttacatattggatttgtaggatgatgcttgaattttgtcagcaaacttcaaatgagaagctgccacaagatatatcagatcaagcacttatggagaatttcatggagagatatgagaaggaatggacccatcctgttaagaatcttttcggtggagagttagcatatgccatgcttatccagcttcagaagcgcacagtggatatcaagcaggcaatgctggaactggatcagattcttaaaggaaatgcgataaacttcgctattcttgcagctttacctgcatttggtgtttcgcttttgctcctcactgtggtgcaagcatggattatgaatgaccaaggcgccgagggaagaggcaggattgcacggcgccaaagaaggctgctgcttcttgatgcagagagaaaacttatggagtttaaaaattgcatgattaatggaatggaggaagaggcatgctgtaagttcggattaacactgtacaaccttgatagattatacagagctgttgaatcacatgcagaagaaacaggcgagtggtcaagattaagagaagacattttggatctggcgaaacctaagatgagtatgacagacaagctggtggttctttcacgactgaagggaacgtatgactgctttccatagccattagggggtgtttgatgcatctgaaatttttcatcatcctttttttttcctcgggtgatgattggtgaacttactgtggttcattttgagacgatgaatgcgcaaatcctgcctaggcattcagtctgatgcacctgctggtaggatttccatgaagattttgataccgaaaatacgatagagaaatggccttgtgccgctcctaatgtctagtacttatttcttatgatgtgaatggatgatctttttgatggc

SEQ ID NO: 15687 - DNA, 1308 bp, Oryza sativa
  ref <308>: DATABASE ACCESSION NUMBER: AK066202
  ref <309>: DATABASE ENTRY DATE: 2001-12-06
tacatggaaatcgtggtttttctgaggtaatgtgctggaggaggaagaagaagaagaagaagaagcagctattgttgctgctgctgctttctgggattccgaggaggcgatatgcttcgcaacagatcgaggagatcagtcggtgccaagcaaggaggcgtcaccgccatggcgcagcctgagccgccgccgccgtcatcgcaatcttcgtcgtcgtcttcctcctcttctcccgtgttcccttccccgaggccgttcatggcgctcccgcacccgccgcaggctgggttcttggacggcgccgccgaggggccctcgtcgtcgatgagccccacctccattcttgagaccaagcagttctgctgctcgtccgccatgccgccgttcctgtcggagaggagcctcaggaaggcccacgtggagatggccgccgcaccgccggagccggccggcgtcggcctcgccgacgtgctccgggagcaccacgggggcggcaaggccggcggcggcaaggtggtgttcgggtcgcagctcagaatccaggtgcccacggggagggccgtcgagctggtgtcctccccgatcgagttcggcgtcaagaaccgggacgcccacttggcggcgatgtcgccggcgaggaggttcctgccggaggtggtcagctcgccgtccgcgcgggtgttcgccgccgccgtggtgtcgcccggggagatggccatgtcggaggactacacctgcgtcatctcccgcggccccaacccgaggaccacccacatcttcgacgactgcatcgtcgagagctgcggcgatgtgctcgtggagaaggtggccggcggcggcggcgacggcgacggcgacgcggtgcgaaccaatgggttcctgaactcttgctacgcatgcaacaagcagcttggacatggcaatgacatcttcatctaccgaggtgataaagcattctgcagcagtgagtgccggtaccaggagatgcttttcgacgaggcggtggacaatttgcgctaggctgttgaacgaaatggtcgttccacatgagtatttctatggaggaggaagaagacaatagtcctaaataactgagatgagatttgttttctttctttttttgtttttgttttctccacttttgcgagattggatgctgtttttggccatggagaagggggaatgatttattagtcttttttgcggattaaagacctttgcccacttttgtaagatgttgattattgattgcttggggcatcatgtttttgtgactttcgagttagttgcaatctgatgctttgctct

SEQ ID NO: 15688 - DNA, 2642 bp, Oryza sativa
  ref <308>: DATABASE ACCESSION NUMBER: AK066203
  ref <309>: DATABASE ENTRY DATE: 2001-12-06
gggcctctgtcgtcagtttgcccgccgccgccgccgcctccgcctccgctgaccgcgagcgagcagggcgccgtcgttcgtcctgttgcttccgcggttccgccgcatcctgcccaagcttgttggcaccatggatgaatcacgaaaaagagccgcatctactgcaaatgctaaaagttcatcccttggtgaagattttggcaatgattttctttcatcttggaaattaccaaaatcaggaaatgacacgattgactttgacgttgagtcagttccgaagaatagcaagaaattcagctttgacaacctggatgattttgggcttgatggagcctttgacaaattgtcgtcatttaaaatgggcatgtctgatctagatttctctggtcctctcaagaaaaaggtgaagcccaacaactcaaatggcaacgatctttctgaagggataaaagggactgaaaaggacaacttctccttttcctttgatttcaatgggctgggcaagttcaatcttgatgctaacttgggaattgaggagaatggtatgagtatatttgtagaaaaggtcaaccctgtctcttcagagggtgacaaggatccaagaaaaggtctttcagttaagggctctgatgttctgggaggtaacattagtaaggaacaaaagcaaacacatgatgcttgtactctgaggcctactcatttgggaagctttagccctgcaagaatggaccaaaataaagtagatttgctctcaactgatacacatgaagagaaatctaatgagacacacccatcaagagcagctgttaacaagccttctcagaatcttccttgcagttctacacctggtgaagatcctacacacgtgactacaacagcagttgctgagaactgtagagaagctcctttggtggaacttagtaaagttcatatatcaagggggaataatgatagtgggcaatcagttagttcacaattcatgaacaccagcaccacgtgcccctccatctcaagaaaattgacggcccaatcagattcccaaaatgaccagaatgagattgtgggggaaagtgcatgtcttaatgcacaaagtcctgataaccaaaggtttagaggaacttcaatgaagcttctgaagaaaacatcatgtgaaacaaagaaggctgaaaaggggacttcaggtccaaagagtctctcttcatcaatgcagagggatatgagaaatgtcaaacccgcatcattgaatgaagcagggagtttgtctcttccgccccagtcttcaattgttaaagcaagcaggcctcctcaactaacttctgaaacaaccttaaatcaattaagtagtgccaataacatggtaaaaaagatgaatacacattctactgagttgaaaaggggaagcacacaagctaatgcaagatctgaaaggcctaaaattgcttcgtcaaaaacattctgcaagccagcattacatgagctgttgaccacctccatgaatgccaaagatcataagaattccaaacttagacttgagtctcctagcacaggcaatgtttctacactgaatgctcctagcagcccagcacatagcaatggacataagaccgttgcgagtcggtcactcttgggaagtaccaatgtttttgatgcaggaaaaggcactcctaaagttgacaatagaccactttctcaactgaaagcagcaaaaattactaaagcaggcaccataagttcaaagtctgacttgcttctggagaaggatatgatggaaacgagcgggaggaagggttcccctgtaacaacatccaataacccaaagtcctatggtgaaggaaaatatgtgttgcctagcccatccatgatgcaaaagactcctaaggaatcagcttcagatccaaaagctcctgctatgctgaagcacatcatgaaatctccagctgtgagaacatcaccagaaactgtttcagagttgggaaataaaacaattccaggaagtggaactccaaaagcacgcatggataatgccattgcttcagcaatatcatgtgagatgggggaaatttctgaactagagttgcctgcgctgttagaaaatgatgtaaatgtacaaaaagctgaggcttgtagaaaggagcttgaagatttatgcatttcgttgaaaaggaaacatgaagaagccaaggagctagcagtgcgggctattgttaacaacaatacaatgctgatgttaaaccatccaatgtttgaggataaaatttgtgctcttcagaaatttgctagcaatctgagatccaagaaggttttattcgaggatattagtgccattgatgctcattaatgtgagactaaaatggagtgactgtgcttcacccaggaagaacaccggtactgtaaatgcaattggtaggcgatgtacccgtcgacagcaaggcgtctgtgttgactttatcaatctataggatggatttgccggcccagtcttcgaagatactcataggggtagagtttgcgtgcgttcataggggtgagtgtgcgtgcgttgtgagtgtctgcattgtactgtgtaattctcaaaaaaaagtttatagaagaatctaaaatatcaaattaattttattaaatctaacattgactatactttc

SEQ ID NO: 15689 - DNA, 2974 bp, Oryza sativa
  ref <308>: DATABASE ACCESSION NUMBER: AK066204
  ref <309>: DATABASE ENTRY DATE: 2001-12-06
ggtgagttatccgtcagttcgccggccgccgccgcctccgacgatccccatccatcccgcgagcgagcagggcgccgtcgttcgtcctgctgcatccgcccgcatccatctgtaggatcaatggagacgaagttatcgttttatcaggacagcccgccaattcccatcatttctgctgttaagatattgttgttggttgaagattgtcattaggaacggtgttgtgttgtgggaggaggtcctttggatgagacaaggaggagccaggaggtcctctgaaatttccttccctcgcagaaaaggtgcacaaataaaacaaacaaaaaggaagtctgtatccccacgaccccacccatggcattcccctccacctcgtcggtggcgtatcccagaagtctgtccccactgcgccgctgccccggattcctcgccctccttgttgccgtcctccttttcctctccttccagctcatgattcatgttccctccatcagattggcagtgtccggatggctcttctccgatcaccagacgtaagagttaagaacagccacagcgttctccgtcccattgcacttatttaagattctaactttgatgttactatcttgggttcttgaattgtcagtgggcacaagggtcccgggagctgtcctggatgccacaatggcatggataatgccgataagactattgcttacacgaatcaggatggtcggatcaggctgttcaaagttaccacaagagaattcttgtcgtcctctatctggaagaatcctttgttgccgaaagataccgagccggtagctgaaatacaagagattgcggaggagcagctactagccactgggtcagaagtctccaatctttcaagcacagaaactttggaaactagaactgatccaattaaattaaagagagaggttgatttcctatttgccttatatcgtaactattatcaatgacgaactttggaaactagaactgatccaattaaattaaagagagaggttgatttcctaattgtcttgtatcataactattaatgatgacagatattttacctgtatattatgttcctttcttgttcctattcgattaactcttcaccatctcagcatatctgatataccattatgattcctgcaggtgttccgacgtaaaagaaaggagcataggattcaggagttgcttcaggtggacaaggaggctgagctccatatgcgaaatgtagcgacaaacagatcgaggaacttcagtaacaaagtaagagccagctacaacatatggaggctgcagtttcaccatactaatacggattcaaccctgagacttatgaaagatcagataataatggccaaggtgtatgccacaattgcacattcccagaagcaacctgacatgtacgcgttgctcatgaagtgcataaaactatgccaggaagctattggggatgcacacatggattatgaacttgattcgagtgctttagagcgagcaaaagcaatggggcatgccttgtcttcagctagagatgttctgtacaactccgatgaagtatctagaagattgcttgttatgctgcagtctacagaactaaatattgatagtgttaagaagcagaactcattcctggtgcagcatgctgcaaagacggtccccatgcccttgcactgtctgcatatgcagctgacaaccgattattactttcgtgatggtatgatcaaggaatatttccatgatgccgctttgaaggaagaagaagataaagcaaagcgtgaggataggtcactataccactacgctatattttcagataacgtccttgcagcctcagtagttgtcagatcaactgtgacacatgccaaggaaccagagaagcacgtgttccacatcgtcactgatagacttaattttgcagctatgacgatgtggtttatacgtcatcctcctctacctgctactgtccatgtggaaaacattgacaacttcaagtggctcaattcatcatactgttcagtcctacgacaacttgagtcagctcggctcaaagagtactatttcaaagcacatgatccatcatcactctctgacggaaatgaaaatctgaagtacaggaaccccaaatatctgtctatgcttaaccatctaaggttctacatgccagaaatacaccccaagcttgacaagatattgtttcttgacgacgatgttgttgtacagaaggacttgacaccattatgggacgttgatcttaaagggatggtaaatggtgcagttgaaacctgcaaagaaagtttccatcgcttcgacacgtacctcaatttctcacacccaaagatcgcagagaacttcgatccacgtgcttgtgggtgggcttttgggatgaacatgtttggcctgaaagagtggaagaagcaaaatatcactggaatataccattattggcaagatctgaatgaggatcgcaagctgtggaagctgggcacactgcctccaggactgattactttttacaacctgacatacccattgaatcgcaattggcatgtgttggggcttggctatgatccagctgttgaccttgccgagattgagaatgcagcagtagttcattacaatgggaactacaagccctggctagaccttgctgtctccaagtacaagccctactggtccaagtatgtagatcttgacaattcacacatccagcactgctacatgagtgagcaatgaaatgaagtacgtgtaatccttcacccagtttttatttatttagtttctttgtgcgcacgtgtgagtttcgtagggcaagtttttcgccaataggaagttaggcatagttgtgtatataaataacatatttcagacttgatgatcttgtcattcttaagctcaataaccggttcacgtacatgaattgtgtcaggtggtttacatcttgcagcataatagttattattttgttcatttg

SEQ ID NO: 15690 - DNA, 3354 bp, Oryza sativa
  ref <308>: DATABASE ACCESSION NUMBER: AK066205
  ref <309>: DATABASE ENTRY DATE: 2001-12-06
gatcttctccggctcagatccgtccgtcccccggagcgccaggccgccgccccgctcccctctctcctctcttgcgcacgacgcagccgctccccctcacgcgatcgctccccgtcgccgccgccgccgccgccgccgccgcgctcgctcgctcgcttcttctctctccctccccgcgccggcggggcgcggttctccgagcccagctgtgcgtgtatcgtttgatgcccataggaagcccccgctgacgggtagagatgaatttcctctaccggacttcgcagcctgttgcacccgagcttccgcggattccagagcaagatcagcaaagggatagcctacaaaagccagttacaactctggagggccttattgccgatgatccatatcacccctcccctgaagatgaagatactgataatggagatgtagatatcggtggggactctgcagatgcagattcaaaaaattcagttcctactggaaagcataccgatgttttggatgacgaaggatggatcacaattccgaacaaggagcttcctgataactggaatgacctttcagacatgttgcagttacagcctttggaccgccccttcctttttcctggtgagcaggttcatatattggcgtgcatgtccgcttcgaagcaagaaacacaggtcatatctccctttagaattgctgccgtgatgtctaagaatggaaattctttgcaatactccacaaataaatctagtcatgccacagaaaatggtgatagtaatgtaaagaatggagagaatggttcccaggttgttgaggatgacatgcaaagtgttgaactcaacagcgaaatgtctcctatgacacaagatgacatgcaaaatgttgagctcgacaacgaaatgtctccttcaaaacaagatgacatgcaaaatgttaaactcaacaacgaaatctctccttcaaaacaagatattttggagaccgaatctctccttcgattggaagatcacaagcaacaaattgaaagtatgcttcaaagattcaaaatgtccaatttttttgtccgaattgcagagtcagatgaacctctctggtccaataaaaaactagctgtatcaaaggtgccaaaagagcaatcatattcagacaaccaggaaaacaataagggttcaaggggtaatgcttataataccatttctgataaaggagtttttgatggtagcacatctggaggaatcgctcgtggtacagcaaggtgctatgctctgcaaaatggagacatcgtggttgttttgcaagtgaatgttggtgttaacaaaatggaagctccagtgctagaagttcttcaatttgagaaatcttcatcaagcaattatataaccaagaatctggtcaatggactttctagtggtgatgaggatccatgtcaggagctgctaagctggctgctccctttggatcgcacacttcctccgcgatccttatcacctcctactctcaatcctagtgcatcacacaagcaatcttattctgcttctggttctcaaattttttcattaagtcacttcagaagctattccatgccttcagcctcctccactcaaccacccaacattaggccaccaccaatttctgaaagtcaagaatttgtgcctgaaaagcctgcgaaaacacctgatattataaatgatggacaactttcctttagaggagttccattggagcctgaacggtattccgtacgttgtggtctagaaggtgtatatctaccagggaaaagatggcggagaaaagttgagatcattcaaccaattgaggttcactcttttgccgcaaaatgtacttcggaaaatcttctgtgtgttctaatcaagaatatttctccacagcatgtgaaagatatagttgtattggtagatgcaattacaattgtctttgaggaggcatccaaaggaggtgctcctttgtcactcccaattgccagtattgaggttgggcacgggcatagcttaccaaatcttgcactcaggagaggcgaggagcactcttttattctcaagccagcaactatgtcgtttagggaccggaggaccaacaatgatgcacctctgactttgtcactccctaagatgaatggaactgccacaaatgtttctttggctaaggttggcgagaccattggctctcttatggatcagtatgctgtacttgtatcatatcgctgcaattacacagaatcaaaacttttcttcaagcaggccaccagctggcgaccctgtgttgctagtgaccttatgatctctgtatcatcagaactgtctttgcgaaatcctatttcgagtgctcgagttcctcaactcccagtgcaggtcttaacccttgaggctactaatatgacatcagaaaaccttaccgtaacggttcttgctccagaagcgtctggttcttcttcagttgtatccttgaactcagctccaaccacaccaaatagttcgtatgacaatcttaatgagtctgtgagaggatctggcttgggtaaacatcgagctggttttcgaagaatgaattcagtccttgctggctcaccaaaagaaagtgacaatggaggaaatagaattagcacttctggaggctgtactcatctgtggttgcagagtgcggttcctttagggtgtattcctgcacgttcaagcaccaccgtcaagcttgagctacttccattaacggatgggatcattacactggatacacttcaaataacgataagggagaaaggtcttacatacataccagagcactccttggagatatatgcgtcagctgccaattcaacgggaagttcatagagtcaatatcagagtgtcaaatggtgcaattactgtcttggtgaattggggtctggggtctcaacctctgcgcagagtgtgaggtcactggatcaagtgtattgttgctcatttgtatccgatttttgacgtagaagctcctacagcacgatctcgaagccaaataacgctatttgtacgtgggaaggattttgctgcctacagtggagaaatgggcacaatgatctgtctatagactataaattgggtttccaaatccattcatacacgggggttgctgagctgctagtgttgtctatacaggctcatcgaaaatctgtaatgtttgtgttgcatagttcagattccatttttgtggtgttcatttttgttccgtgtaaacctggacagtgcccatcttttgttcgacaatcgacaggcagatgtatcatgcatatggtgtagcgaggaaggagaaattcgcagatgtatcatctttgctcgtggttcatactgaattgctatactagcgcattgc

SEQ ID NO: 15691 - DNA, 1982 bp, Oryza sativa
  ref <308>: DATABASE ACCESSION NUMBER: AK066206
  ref <309>: DATABASE ENTRY DATE: 2001-12-06
tgcgacgacgcgacgcccaactcctcacgcttcccttcccttcccttcccccatccatcctctcctccgactccgacctcccgcaaccgcagcgccgcccgatccgccgccaccgccaccgccaccgccggcagctcgatcccccgcactcgggggggttttggaattggcgaatggtggcgaacgaggtggttgcggcggcggcggtggtggaagaaccggcgcccgcgtcggcgggggcggttgacccgatgaggctggcgtcgcggtggcggtcgccggcggagtggggggccgcggcggccgagatggaggcggagccggcgccgtccgagctcaacaccaccaacagctcgggcctcttcgccgtcgtctctaccgaccggatgtccgtcaggtacctcggcgtcaaccagcacggccacgacgtcggcgtcgtgcaggccaaccgccccgcccccacgcgccgcgccgtctactacttcgagatgggcgtcaagaacgccggccagaaggggcagacctccatcggcttcaccaccgagaatttcaagatgcgccgccagcccggctgggagtctaacagctgtggatatcatggcgatgatggctatctttaccgtggtcctgggaaaagtgagtcatttggtcccaaattcacttctggtgacacaattggtgctggcatcaactatttctcacaagaatttttcttcacgaaaaatggatctctagttggatcctttcaaaaagaaattaaaggcccactatatcctaccattgcagtccatagtcaagatgaagaggtgacagtaaactttggaaaagaaccattctgttttgacattgagggctatatttttgaagagaaaatgaagcaacaatctgtcagcgacaaattggatttgcaaccagacatcagtcattggattgttcgttcatatctcctacattacggctaccaagatacattaaattcttttgatatggcaagtgaaactgatcctccatccaatcatcaaaatggttatggggaacctcctgaaatgtatggtcttagccacagaaaattgctgcgtcagcttatcatgagtggagatattgattctgcattcaaaaaacttggagaatggtatccacaggtgataaaggatgaaacatcaattatttgcttcttactccattcccaaagattcattgaatttatcggggctggacaaatggaggatgctgtaaaatatgctcgctctaacctggccaacttcttgacacataaagcttttgatgggttgctaaaggagagcgtggccctgcttgcatatgaaaagcctgccgaatcgtgcattggatatctgctagactctccacagcgggaatttgtagcggatgcagtgaatgcagctgtcctgtcaacgaacccgaacatgaaggaccctgagagttgcctttactcatgtctcgagaaactactgaggcagctcacagtatgcagcttcgagcgacgtgcattcagcggagaccaaggggatgcattcttactacataaagaagtgcagtcctgcgatagatccaggtgttcctaggcatcaaagcattcaagttgcacctgcatctgagcagtgaactcagagatgagactttgtgcccctcttggaaggaaagggattcacctcggagcggagatgtagaccatgatccatgcgcaatcacagatactttgattcttgaagtttcgcagtatactctccacaaggtgaacgcctaactgctgggaaatttggcagcagctccttccctgtaatctgaaaacttacattcacacatggccttaaacatctctgtttccataaactcggaagctttgagctggtagacattctgaatgtgaaatgagaagagaaaaacaataagatttgtgtaaatgaaatcgagttgccctttaaccttgtggttcattctaattcattgatacattcaattgc

SEQ ID NO: 15692 - DNA, 1594 bp, Oryza sativa
  ref <308>: DATABASE ACCESSION NUMBER: AK066207
  ref <309>: DATABASE ENTRY DATE: 2001-12-06
gctctctctctctctctctgctcgactccctctcgccgccgccgccgccgccgccgccgccaccgacggcaagcgcggcgacccgaccgcccgagacctagcctccgccaccgcagagcagcttgggggggggggatggagaaggggggcgccgagtcgtcgatcgcctgcgctcgctgcggcaagccggcgtcgcttcaatgccccaagtgcgcgcagctgaagcttctgcgggagggcgctgctttctgcacacaggattgcttcaaggaagcatggagctctcataagtctgtccacataaagctagatgcattgacactacaacagactccagagggttggcaatattgtttgaaaaaagggcggacacgcacatcgcagcttcctcgttttgattggacaggtccattgagaccatatccaatatcaaagatgtgtgtggtaccagataaaattgagaagcctgattgggcgcttgatggaacccccaagattgaaccagatagcgatttgcagaaaagagtagagatcaagacccctgagcaaattgaaaggatgagagaaacatgccgaatcgcaagagaagttttagatgcagctgctcgcataatcaaaccaggaattacaacagatgaaattgatagagtggttcatgaggagacagttgctagaggtggatatccatctccattgaattaccatttcttcccgaagtcatgttgcacgtcagtcaatgaagtcatctgccatggaattccagatgccaggaaacttgaagatggtgacattgtaaatgtcgacgtaactgtgtattacaaaggagttcatggtgatttgaacgagacatattttgttggaaatgttgatgaagcttccaagcagcttgtccgttgtacctatgagtgcttggataaagctattgcaatagtgaaacctggagttcggtttcgagaggttggggagataataaatagacatgcatctatgtcaggtttatctgtggttaagtcttactgtggtcatggcataggagaattgttccactgtgccccaaatattcctcattattcaagaaacaaggccgtgggtataatgaaagctggacaaacatttacaattgagccaatgataaacacaggagtttggcatgaccgtctatggcctgatgagtggacagcagtgactgcagatggtaaacggagtgctcaatttgagcacacccttttggtgacagaaacaggagttgaagttttgacagcgcgattaccgtcatcacctgatgtctttccatggttgaagccgtgacgccattgctccaggcattatgcacaaactagcaagtgatacgaatacaatgtggtcaatgggacaacacaatttttcaatttactctttttatcattcagttgcccaactctccgaagcagatattgtcccagtgataatacctgttagttctgacgacttgctgcaaccactgttcacctagcaagttgtttctggctgtgttaagtattttgattgatttgttcgagtgacatgaatcataatttgaactggaaatgggatttatccaggagcacatttgtcg

SEQ ID NO: 15693 - DNA, 1984 bp, Oryza sativa
  ref <308>: DATABASE ACCESSION NUMBER: AK066208
  ref <309>: DATABASE ENTRY DATE: 2001-12-06
gactcgaggctcgaccctttcactgcctccactccagttacagcgtggtttcaccaccacgtctcgtagaggattagacgagtaaaacagcgggcgtacggacggccagcgatggcggtgctcccgccgccggtgagggttgcggctgcggctgccgccaccacgttcgggctctcgacgtcgccggcggcggcgacgccagctggttgccgtcgttgtggtcctagaggccgcgctgccgtgcacgtggccatcagcgcgagcgggcgggcttctttctcgcgcggtgcggctggtgatggcggcggcggccgaccggccatcaccgtcgccggtgacccgcccacgttcgtcaccgcgcccggccgccgcatcgtcgccgtcggtgacctccacggtgatctaaaccaaacgagggcggcgctagtgatggctggtctcctgagctcggaatcggatggccatgtatggacaggagggcagacggtgctggttcaagttggagatatccttgaccgtggcgaagatgaaatcgcgatactatctctcttaagttcactgaatatgcaggcgaaatctcaagggggtgctgtgtttcaggttaatggaaatcacgaaaccataaatgtggaaggcgattatcggtatgtagatccaggagcatttgacgagtgcatacgcttcatggagtatttggatgaatgtgatggcaactgggatgatgcttttctcaactgggttaatgtttgtgaaagatggaaggaagaatatccaatgtcacctaatggtgactggcgtccttggaactttgtcaagaagcagaaaggtattgctgctagatcatcacttttcaagcgaggtggcccgttagcttgtgaattggcgcgacatcctgttgtgctaagtgttaatgactggatcttttgccacggcggccttcttcctcatcatgttcatcttcattctacctgcagtcgaatatggtatcgagcgtatgaacagagaagtttcggtttggatgaaaagttcaagtggagacagtgatgatgaattagatatccccttcatagcaactagaggttatgacagtgtagtatggagtcgtttgtactcacaaggccctacggaaatgacgcgtcattcctggaagctatcttctgtggttgctgaacgaacactgaaatctgtgggagcaaaagggatggttgtagggcacacaccccagactcgtggagtgaattgcaaatgcgatggcaaggtttggtgtgttgatgtgggcatgtcttatggtgttctctattcaaggccagaggtcctagaaataatcaatgacagaccaagggttttgaagaatcggagggactcatacgacgagatggaagttttagacttcatataaaaccttaagaaacctgcatgtgcaggcatgtataggaaaaattctttttctggaaagctactgtactggacaattttggatggacatacaggagtggaagtactagagggacagatgacttgtatacacaaatgggaattgatctgccttcctccatgaacatccagaaagaaatacccatgctagcttctgtagactgtagaaaactgccattgagtacttgcacgcaaggaagctgaaggtcagaagcttatctcaacaaattggtggtgcttgtctataccagcatacaaatttccccatgaggaatttctcatggccctcgtcaagtctaactcaagagtccagacatggcaggaattattaaagcagtgtaattaactggggaaggcatgtataactgattaattgtatattcatagcattctcatacatctgtagaaaacatgtgctatttcctttatggtggccatagcacacccagacttgtagcattcaaacaaacagaccttgtgaagcatcggtagcattatttcatctctagcatacagcacaaaaattcaacagagatacatttgacaaatg

SEQ ID NO: 15694 - DNA, 2279 bp, Oryza sativa
  ref <308>: DATABASE ACCESSION NUMBER: AK066209
  ref <309>: DATABASE ENTRY DATE: 2001-12-06
gagcttggctcgcctctgctccgcttcgcctttgctccgacccggtcggcctcgccgccgtcgccgccgccaccgcatcacgcgcgcgcgcgcgcgacggcgcgagcgcacgggtgaggtgagagaggggtagtagagcagcagccgcccccgaccgcccacgcccgggccgggtggtggagcacaccgtggcatgattgggtccatggcctcctgaccccgcctccctctcctcctcctctgctccccttttgctgctgttgctgcttcctactctcactctgcttctgctgctcaatccacctgctcctctccttctcttctctctcccgagcggccgagaagaggcgaggggagaagggaggacttgattcttgcttgttgttgatccattctttcttgctctgctctgctcttgtgtggtgtgtgtgtccaggcttgccgcattaaaggagaggtggtttttgttgaccctgtttagcagcagcagcagcagcagcgaccaagatccgtctcgtcggggaagatgaggagatctgcatctctactccgagtccttttggttttcataaccatggttgggactcaatggtccaatgtatccagtacatactgcaaggacatggcatcaagcgtatatcgaccccacagtgtcacaataactgaatttggtgctgttggggatggtgtgactctcaataccaaagcattccagaacgcaatcttctacctcaattcatttgcagacaagggtggcgcacagctcttcgtgcctgcgggaaggtggctgacagggagttttagtcttatcagccatctcactttgtcactggataaggatgcagaaataattggatctccggattcatccgattggccagtcattgatcctcttccatcctatgggcgaggtagagagctccctggaaaaagacatcagagtctaatttttggaactaatctaacagatgtaataattactggcgctaatggtaccattgatggccagggagccatttggtgggattggttccacagcaacacactgaattatactaggccacatcttgttgagttgatgtactccaccgatgttgttatatccaatttaaccttcaagaactcaccgttttggaatatccatcctgtatactgcagccaagtgcttgtccagcatgtcacaatcctagcgcccctgaattcaccgaacactgatggcattgatccagattcgtccacaaatgtctgcattgatcattgttatgtcagaaatggagatgatgttattgtcataaaaagtgggtgggatgagtatggcatttcctttgctcgtcctagcacaaacatcagtatcagcaacatcacaggagagacaaggggtggtgcagggattgcctttggaagtgagatgtcaggtggcatatccgaagtccgggctgagggtctccgcatcgtcaactcaatgcacgggatcagaatcaagaccgctccagggcgtggagggtatgtgaagaacgtgtacatatctgatgtgagcatggacaatgtttcgatggccatcaggatcaccggaaactttggtgaacatcctgatgacaaatatgatagaaatgctctcccaatgataagcaatattacaatcgaaaatgtggtcggcgtcaatgttggtgtcgctggcatcttggaaggaattgagggggacaacttcagcagcatttgcctgtccaatgtttccctcagtgtacagtctatgcatccctggaattgttcgcttatcgaaggttattcaaactctgtgatcccagagtcatgtgagcaactcagaacagattgtggacagacaccaatttgctatgatggtggaagttcttcagcaatacatgcacaggcagccagacatagattgtcgagtgccagcagattgctaaatcctttactgaagttggcgatgctgtagagtaggtagagagatgctctatttatttgctgcagaggggcttttgcttcgtgggatgcgtcatgtacatctgattcttgcgattgttttttttttattagcacgatgtttgcttcttgtatatagttgtgggagatgaatgttggtgtaccatgcatgtttttgtcaccatctttgatttgtgatgtatctgttccatagccttttgttgggaagaaaacagtatgatcctccttccaatatgtccagttttgtggatagggtcatcaaaattgtaacttgtaagttgagtagcaacaagagagaagagtcagttttaatc

SEQ ID NO: 15695 - DNA, 886 bp, Oryza sativa
  ref <308>: DATABASE ACCESSION NUMBER: AK066210
  ref <309>: DATABASE ENTRY DATE: 2001-12-06
gactccactccacccaccggattgctaacttgcttcctccgtccgcggccaccactttctcctctcctcctcagagcaagatcattcaagtataatcctgcctcctactagctataatggcagcagctgcagcatcatccgtgtccctccccggggcgagggctctcccgacgtggtccagctccgtgtccggcgactcgcactcgttggcgctgagctcgtgggcggcgcggcctcggtcggcgcggccactgcgggcgccggcgaggatgggcaacgtgaacgagggcaaggggatcttcgcaccggtggtggtggtggtgcgcaacatcgttggccgcaagcgcttcaaccagctcaggggaaaggccatcgcgctgcactcgcaggtgatcaccgagttctgcaagaccatcggcgccgacgccaagcagaggcagggcttgatccgccttgccaagaagaacggcgagaagctcggtttccttgcctgatcgacatgcccttcctaattcctactagctcatttgattggtgtggatttcctctctgaatgaatgaatttcctgtagctagctagccagccgcgccttcctccctgcgtataaatgtgtcttgtgcgtacgtatacctcctcttctgaccttcaattccatccatccatgccatggcggcatgaacgaatgaattagtagtaagtaatacgcgcatgcatgaacgaatgaataatatactatataatgcgtgtatacagacactagcgctggctagcatgtatgatgatcatgatgtatatgtatgagactgagactgtatgtagccagttaagcgacatcattgccgtcaagctccaatcggatggatctggatctcctagtcaatcttt

SEQ ID NO: 15696 - DNA, 1817 bp, Oryza sativa
  ref <308>: DATABASE ACCESSION NUMBER: AK066211
  ref <309>: DATABASE ENTRY DATE: 2001-12-06
gagggcctctcgatcggatcctcctcgggagtcgggaatgcgaagctgagtgtgacgcgtgcacgactctcgagggaggaattcccttggtgatcgtgctggagttcgtgggattcgtcgagcttttcgatcctctgctgaaaaaaaaaagtcgttctctgtcagttactcgtttcgtttcaattgggtgagatttttttcctggctcgatttgtgcaggtttgatccaaattgagcgccctgaggatttggggcgtgtttatggaggattagatcgagaattttggttgtttctgtgagatggccgccgattccagcatgggattccatcaggggatcacggcctcgatgtacaaccatcacatgctctccttccaatctaacagcgacttgggcggtggcgccggcgctgcggccggtatggtgatggccccgaggagcatgaacgggactagtagcagcgctgggctgttcgtctctccgaacaccggtgtgctgggcaacgcatcggtggccggcccgtcgaggagctcgtcgggggatgcgttcagtagcacggtggcgcccaagtacaagttcgtcactggttcgccttcagattggaatgaccgtgagctgaacacactgaaggaagggcttgtgagatatgctcgcgaaccgaatatcatgaagtacataaaaatagcagctatgctacccaacaggactgtcagggatgttgcattgcggtgttggtgggctacaagtaaagatagaaggaagaaacctgatggattttatacagggaaaaagataagagacatgaagccaatccaggacaagatggttgcatctgcctccatggctaattttcacctggcacctgcaaacactgtgacccctttctcaatatcgatgcaacatacaaatcagcaatgtcaggttcctaaggaagttcctgtcgtggatagtgcaacacagcatctcctggaagaaaacaatcatttactcaaccaaatcgccacaaatatcgaaacattcaagacgggagagaacacggatctcttttttcggacaaacaacaacttcaaaaatattttaagcagaatgagcgagacgcctggtatcatgggccagatgccccaattgccagtgcaagtaaacgaagaccatctgagttcacttcttcagctggacagaatggttccttcgtatggcgtaacgcaaacctctcatatgaagcaagaaccgcgaagctagtataaacatacacgaaaacaaggacttgaaaaggaaaaaaaagagcagatggctggagctccgccgcccaagtttcgtgtaccatgaagaaggctaagttgccgcaccgagtgagcgagcgccaggaacagtcccggcgtttctttcttccagcgagattgttttccagtgatctgattgtctgcccgcctgcctacctgcccgagttgaaagctgttgaaagcaccggaaattgaggcctgcagctgcttgcgggggtatgcgcaacgggcgagcgagttgctgttgttgtacctggttgggtatccagcgaaatgaatacaccagacacttgattcgggagtgagtaacacgcacacaagtgactgtaaatatttggatggctggaggtgttcccctgtcctgttttgttctctctgattggtcgtcaatatatttttcggaagggtaccttgtatgtttttccactttggagagttaggagggcaccttatgtattattgcatagttggaagatcgtgttgataaaaccaacaaaaagatggctttaggttttgaatagaatgcccattgcattt

SEQ ID NO: 15697 - DNA, 1895 bp, Oryza sativa
  ref <308>: DATABASE ACCESSION NUMBER: AK066212
  ref <309>: DATABASE ENTRY DATE: 2001-12-06
gggggcctggtggtggtcggggctctgacgcggcggggcggcggaggtggtggtggggagggcgagagatggctgcggcggtggggagggcgcgggggttcgcggggctggtcgtgcagggggaggacacgccgttcgggtcggtgtggtggtgggcgtacgcggggatatcctgcttcctggtgctcttcgccgggatcatgtcggggctcaccctcggcctcatgtcgctcggcctcgtcgagctggagatcctccagcgcagcggcaccgatgccgagaaggcccaggctgctgccatcctcccagttgttcaaaagcagcaccagcttcttgtcaccctgctcttgtgtaatgcttgtgccatggaggctcttcctatattccttgacaggatttttcatcctgttgttgctgttatcttatcagtaacgtttgttcttgcttttggagaggttataccacaagcaatctgtactaggtatggattggctgtgggtgctaactttgtatggcttgtacgcatcctcatgatcatctgctatcctatttcttatcccatagggaagctcctagattgtgctcttgggcataatgaatctgcactttttaggcgagctcaacttaaagctcttgtctctatccatagcaaagaggctggcaagggtggagagcttacccatgatgagactacaatcataagtggagccttggacttgactgagaagactgctgaggaggctatgacacctattgagtcaactttctcattagatgtggactccaagttggattgggaagcaatcggcaaaatccttgctcggggtcatagccgtgtgcctgtatactctggaaaccctaggaacattattggtctcctgctggtgaaaagtcttctgacagttcgtgctgaaacagagacaccagttagtgctgtttccattagaaggattccaagggttcctgcagatatgcctttatatgacatactgaatgagtttcagaaaggaagtagtcatatggctgctgttgtgaaggctaagcccaaaattgtaccactccctgacaaaactgaaccaaacagggaagtaagtggggcaccacagctgactgctcccttactatccaataatgaagaaagggtggaaagtttggttgttgatattgaaaaaccacagagcaggcaggttaatggaaacaaaccctgttccatgcagcagaatgagatgccatatgcaatgtctcggtcatcagaggatatagacgatggtgaggtcattggtatcatcacacttgaagatgtatttgaagaactattgcaggaggagatagtggatgaaactgatgagtatgttgatgttcataagaggatccgagtggccgccgccgccgctgcatcttcggttgccagggctccatcaattcggagattaacgggtcaaaagggcacaggtacgcagaataggcaaggacagccaactggaattttgaagaaacctactgaaggtgattccaatccatcaaaacatcaggtgaaccttgttgaacctcttttggaaaataagaggtaactttagatgtatgcatgaatatagcgatggaacgcaaaatcaaattcagaaggcttggctaacagtaaatatgagcgaactcgtaaattcggatttgttgtcatggtctcatggaccttagcgttgaattttgtgtttatggatgatgaaagtagataacaattccggaatcttttgatacatgacagtagcaacgaatagtactcttggaatctgaaacgttgacctggaggactggaacggtagtggatatggttacattaggaataagtacatttcaaaggctaattgttcatgcgaaatatatattccagatgagactgc

SEQ ID NO: 15698 - DNA, 1430 bp, Oryza sativa
  ref <308>: DATABASE ACCESSION NUMBER: AK066213
  ref <309>: DATABASE ENTRY DATE: 2001-12-06
ttggggtaggagagagagacaagaagaagaagaagaagaagagagagagagagagagagaggaggcggcccgtccggcgtcgaggtgggcggcggcggatgggggactccggcggctccgtcgtgtcgatcgacgtggagcgcatctccttcggcggcaaggaacatcatatacataccaatcatggacccgtatctgttgcggtgtatggtgaccatgacaagccggctcttgttacttatccagatattgctttaaatcatatgtcttgcttccaaggattgctcttctgccctgaagctgcttcattgttgcttcacaatttttgcatttaccatatcagccccccaggacatgagttgggggcagctccaatttcgccaaatgctcctataccatctgttgatgatttggctgatcaggttgcagatgttctcgatttctttgggttaggttccgtaatgtgcttaggtgtcagtgcgggtgcttacattcttactctcttcgcagcgaagtatagggatcgtgtactaggtcttattcttgtttctcccctatgtaaacctcccacgtggactgagtggttttataataaggtggcatccaatttgttatattactatgggatgtgtggactggtgaaggagggcttactgcagcggtacttcagcaaggaagtgcgggggtgctctgatttacctgaatctgacatagtgcaagcttgtagaagtttgctagatcaacggcagagcatgaatgtgtggcgcttcgtacagacaatgaacatgagatatgacttgacagaagacctgaagcagcttcagtgtaggacccttatttttgtcggcgagtactctcagttccatactgaggctgttcacatgacatcaaagctggacaggagatactgtgctctagttgaggtccaagcatgtgggtcgctcataacggaggagcaaccacacgcgatgcttatacccatggagtacttcttcatgggttatggcctgtacagaccaagccagttggactgtagcccgcgcagccccctcagcccattctgtatatcacccgatctcctgtcacccgaaagcatgggagtaaaactaaagccaatcaagacaagagtcaggcttgaagtgtagcatagcacacaggtaaataagggtggtgcagaggggtgtcgcttagggctgacatggtgtgagtttaggctaacctgatggtcggtttactgagttataattttttggtgggtaaaacaagataatttttatactgtcatgtagatataggaaatgctaggttggtcaggtctggtggggtggggttgtattccattaatttgtagccataaacctgtaaattgttacacattgtttatcaaaagcaaaggaaaataatagcagaaaggtgagctgttggtgacc

SEQ ID NO: 15699 - DNA, 3466 bp, Oryza sativa
  ref <308>: DATABASE ACCESSION NUMBER: AK066214
  ref <309>: DATABASE ENTRY DATE: 2001-12-06
ggcgtgccctccccgctcccgtctcgccctcccctccctctccctctcccgccgaagccgccgagcgccacctccgcctccccctcgcgccgccgcctccacctccgttgccgtcgcgtcgccgccgcctccgcctctacctccccctcgcgccgccagctccgcctctgcctcctcttccttcccctctgcctcgcgtggccgtcgccgagtgcgccacctctggctcacgccgccgctgccgtcgtcgctgtagaggaggcggatccgacctccatgtgtttgggggacgcggatctgactgacgcaacgtcgtcatccgctgtcgtcgccatcgccgagcgtcaccgctgcatcctccgccacacctccgtccttcaccgccaaagaccgctatgagcggtcgacctggggtggaggcgtggagccggccgccatcgccgcaacttcatggcataggggacggttgtccgtcgatttgaggagtgagaggcggcaacagcaataaagaggggagaggcctgccggcggctgtatggtggagaagcgccgccgcagcccgcatcccctcctctcgcccctccctctcccacccgggcgattcgcaagccgccgctgccaccgctctcgaccgccatcgctgccgtctcatgggctccaggaaccgccggcgggggtgatcttgacctcgacctcagccttggctgcttcaatggttgcatggggataagtggagctccgtcctggaagggtggaggcgggagatgctctgaccatcggcggctggcatcagcatcagatccaggctgcggtggcgcggatcgaacgtagaggcgtgatctgatgacggtggtggagttgcaaccaaggtcgatggggatgtcgagggcgttgctgatgaagaagcaccccagttaatgatatggctcgcttctctggctcgagggcgttgcggatgaagaagccccatgctctggctcaggctccgctacggggttaccataccgtagattatattgtcaagatgcacaggacataatgaataagttcagcacgccgcagacacgtcgtggtcaattcctcatcggaagtattgcttggtgcttgtgtattttttccgcatagaaataagatgggatggattttttttctccacagattattttatatgtttctaagaataggaatatgaagtggaaaatatggcatgtgttctgtatgctaataatctaatagagtggatcaggttggttcgagtttgtttgcaaggcaaaccaacattacctacatagatggcaccgtgataatcatggaattgtttcttctcctttttacatgatcctgtaaatgaaaggaaggtactactgatttattggatgatctttcgtgacttgcggctaaaatgatggtgtagttttaatctctgtattcccgtttcatatcatagaaaaaaagaactaatgtggttaaaaggtgagatattgtatttttgttgaatgtttataatctctaataggtttatttttctggttttgaggcttgtgggcctaatataccttgagacagtggcccatggctgataaccggaaatgagtcatgacttactgctgggacttatcgaagatcctgttttgagataaatatgatttcatttcaggtggaagttctgttattctaaaggaatcagcatctgccttctagaggtgaaaaatgtatagtcctaattactaaggcattgtttgatgtctgcccttctagaggtggaatgtacaatcctggttgctagggcataggatgatgtttcttttatttggcttgtcctgtgtttatctggttaaatgtcaagaaatgtgccatgtgctattgtctcccatgaaacattgaaagaagaagggtttataaggcggccctatacattaggtctttagatgtagtatcctttctttgacaagctctgatggcctacaaaaaccggctctcacaccattaggtaatgttatgtttccattaattttactgggatattgcattacttgggataatcacatgcatttccatggcaatttaaggtctagcaagaaaatagtttactaaacggaccaagatagaatttcaagtcttacgagtaaaagttgggatgatctggtttaatgctataatttgtatgtaccaaataattccgtagacatcctgaatacctaagtactttaaacattttcgtatgaagagttgttaggtctgctagcagcagtacgctattacttcaagttaatcactgcatgaatttctgtttatgggaatcttgagatttacaatacatttgaatgcttacattatatgtagctaaataaacccaactaatggagggtcagttcatttatttatcatgcaagattgttagtttaactatgtcagatttgcatagggttcagggtttagggacctcattaataacctctaccaccatctgaacctaaagattttgcatgctctggttgcagcttcaaccattccttgggtttgcttcttataattgatgtataatttatttttgatttggtattattttctatagtgacaacctgtactaattacagatctaatattgtgcctcaacctcacatgttgaatatgttggcttacgtcagttagacctctacgtagaaagcatcaatggttgtgaggcctactgatttctctctcactctaagtccgagaaaaatattgtcgtgttgatgctacttccaaatttgagcatactaagatgcactgatgaacatggtactgttacattactctaagatgtgatttcaggctcatggttcttcgtatggtataagttgcaggtattgaagtgctgggctggaaattctcacaaatgctaggacacccagcagcactgccacaacaagtcagcaatcaaagtctccatgcgcatgtgcatgctggtaacctctaccactatgtgcatacataataaattaaatttacttttgccacttgaaacctataaacacaggcaactattttttttctttttcatttccaaaggtttgtttcagtgttaaccttggtattttttttcctatcaaactatccaagctgaatgagtgcaaggatatttttgaggctttgtacaaattatttatgatctacgcacctacttgaagccacatgttgaaattaatatattgatgttgtatcatcacagaggcggtctttcttagtcttcaatattttcttagagctaaacggttatattttttttggtgtctacttagcaacaatgccatctcttcagttattgcaactgacagagcatggacacaaccttttgtctttgagaaggtgtgctgttttaacattatatttctaaattttagtaagccgatcatttagttcttatctcatgttccttattctttacaaatatcaacatgagagctcttgcagttgtttttggtgc

SEQ ID NO: 15700 - DNA, 4515 bp, Oryza sativa
  ref <308>: DATABASE ACCESSION NUMBER: AK066215
  ref <309>: DATABASE ENTRY DATE: 2001-12-06
ttgatgccctgagaaagaggaacttcgttctccatcgagcccaagcgccgccgctccgccgccatcgccgtcgccgtcgacccgcccccgcggcggagaggaactgcaagccctagcgcatgcaagatctgtcaaacaagactacatgatatgatccaggagctagcgaaacaccttccagaacatacaaatgaagagttctatgtccgagactaaagtttgtgctagtgaatatctgacggccgaggtggagcggctctgggtggtctacataatggaggtcagagctattaccctgttacatgcttggccattaagtgaaatgacaaagcagttaattaatcatagattttatacatataagcacaaggcaccaaggtaaatggattgtcactggtagatgcattgcacaatgtctccaattcctaccataaaaatttgcttaaagcaaaaagtgccaatctcacatgctcctttgattatagtttcgtcccctttagcctctctatgtactatatacacctgtgagcctatttaatagaaaagaaacaacataaataaagctattctgttggaggctcaaatatgttaatttaacatgccaaaacctcatctgaagtaaggtattcttgtagttaactcaatgcatctccttgcttcacctcattaccaaattaagtaggctaaatactgcacttgttttttacttaacacccaatatcaagcaaggccctgatcaagccaacatcactctaacacgagagtaaggtatcaagaactcggatgttagttgaaatctttttgcagttccgattcaccttaaattgttcattacatcactctaacaagattagctacatgatggaagacctacagaaatactactaccgtcaaggatttatgtgtgtcgtctacatactggaggtcagatcgatttattactttgttaccctgcttattatctactagacttcaccttcaatcaaatggtcaaagcagttaattataatcacatattggcatattgcacacctagagcacaaggcaccaaggaaaatggtttgttagctccaatttataagttctgaaggtacatgctttgcaaagcatgtatccaaatcctactgatcaatatctgcttaaagcaaatgtgccaatctcacatgctcctttggttttagttttgtgaacctttaccctctctaagtatacaatgtgtggggctactgtgcatttgttcctttgagcttagtataatacacctgtgagcctatttaatagaaaagaaacaacacaaaaaagctagtctgttggaggttcaaatatgttaatttaagatgccaaaaccccatccaaagtaaggtattcttgtagttaactccactgcatttctttgctgcacctcattagttacctgcacttcttatttacatcaagcaaggccctgatcaagccaacattacattaccaaattatgccctccaaaaccacaattacactctgagaaatacaatcctcatttcttggaaatattttccatattcctcagttcattgagcaaccgtttgtgagcagatatggctgaatcggctgtttctgcagcggttggtagcatcagcaaccttgctgcccaggagacctcactgttatgtggagtcatggatgaagttgggttcttgaaagctgagctcgagcgtctccatggcttccttgaagatgccaagcacaagaggaggtctggggatgcaagtgcagctgttcttgtagggcagatcagggatgcagcatatgacgccgagaatgttattgaagcatcagagtacatggtgaagcgaaacaagctcaagaagggtttcatgggtgccatttcaaggtatgctcgtttaccaactgatttgatagccctgcacaaaattggtgttgaaattcaatggataagaaggaagatcagtgagatattttacagtgcaaaccgtttaaaaatcgttggattgggtaatcctaccacagacataggtcatgctgatgatgagtttccccaagattatgatattatgtatcaaaattttgaagatgatgatgtagttggatttgataatgagtacaatgagatagtagagaagttagttgaacaggagaacgagcttagcgttgtttccatagtagccatgggtggtgcggggaaaactacacttgctagaaaaatctacaattcaactagaatcagaaatcactttgacacaactgcttgggtgactgtatctcaaaagttcaaaggcattgatttacttaaagatattatgagacagataatgcccaacaaacttgagtctagagaaattgatcagatgcaagagttggaggtgggaaaaaagatccacgaatttttattgaataagagatatgttgtagtgcttgatgatgtgtgggcaacagatacatggaatcaaataaatagagtgggtaaagtctttccagatgcaaataatggcagtagagtattgttaaccactcgaaaggaagatgttgcaaatcatattgaaatgtcgacctacatccatcctctgaagctcttagatgatgagaaaagttgggaactttttagtagaaaatctttaccatcatacaaaaggtcttcactacaagatgttaatgagtttgaagaactagggagaaagcttgctagaaaatgcaacggattgcctcttgcacttgcagttctggggggttatctgtccaaaaatctaaacatacaagcatggtcagacatatttaagagccggatatcaacaaaaaatggacagatgatgcgagacatactagctcgcagttacaatgatctgccaaataattatatgaagtcttgcttcctttatattgctgttttccctgaggattattctatatctacggcggaccttgttgaattatggacagctgaatgttttgttcagcctagaagaaaatataagccagaagaactagcatacaagtacataagtgagctagctcaaagaagcctcgtccaagtagttgatagaagcacagcacatggatcgattttaagaataaagatccatgatattttgcgcgattggtgcatcgaagaagcaacacaagatgggttttttttgtgtcaccgacaaaaatacaggtcgagctgaagtatcatcatttaataccatgacattctatcggaattcttttcatcacttctttgatgacaagatactccaggcaacagcttataaacgtactatacttggctttagtgtcccatcgatgttcctactgaagctgaagtttctgagagttcttcatgtagaaaattcaacgataaataatttctccatggcaattagtgagtgcattcacctcaggcatctaatattgagaaattgtgtaagtgttagactcccaccttcaattggaaagcttctttacttgcaaacaatagatttgaggagaacaattttggagtcaattgtaccagagtccctgtggaatattgcctctctaaagcatgtttatcttagtggaggattttacccaacaaggaatggcaaacaaaaagagcttcggacttttcatttggaaacatcgtcgttcaattacttcagaagttctgcgagtgctattgtgaaatttttgggccaaatgactcaactggttacctttgttttggacttctctcgcaccgacatacccgtggagatgattaaaatgcttgcaaatatgcctgatgcagttgaaattcttcttcgtagattcgatgtgctagataaactgcctgggagtacactcttccctcaatgtctacggcagctagatctttttgctaatgtcattaaagaagacccgatgccaatcgtagagaagcttccctgtcttgtggttctttctttgagtgggtatcaaggccggacaatgtcctgctctgcccaagggttccctcggctacagcgcttggatctttcagtgttctacacagaggagtggatcattgaaattggggcgctgccaagactctcatttgggtcttcattggtttgagaatatgaggaagctgcctgatggattggggcaacttccatccctcaaggaactagttctgaaagatcccttgatttctgaagatgacatcacttgcaaagatctacgagggaaaggatgcaaggtgacatacaccagatacatgctatcgggagggtttttttagagggagggaggtacaccagatacatgttatcaggtgacatacaccagatacatacaccagagaagtagcatattaattgatctggattttatttaagggagggaggtttctccccgttcctgcgagctattctctgggcttcctgcctataagaaggtgacatgtcatcgtttatgaggcagtaatcatgatgtacgtacaagatgaatgtttattacaactagaaaaaatgcccgtgcttgcaacgggtgaagtttattttaatcttattattattatatggtttagttaagatg

SEQ ID NO: 15701 - DNA, 1262 bp, Oryza sativa
  ref <308>: DATABASE ACCESSION NUMBER: AK066216
  ref <309>: DATABASE ENTRY DATE: 2001-12-06
ggagcccgattggcagtttggcaccagcaccagcagcaggagcagagacaggtgagaggaggaggataaacggaggaggccgcgatgggaaccgtgctggactcccacttcctggcgctcacggccatcgtcactgtgggatatcagctggtgttcttcatcatcaccgcgctcctgcggttcgataaagtcactgatttcgcaggaagtacgaatttcatcatacttgcaatcctcacgctagctttgaagggagcatggcatttccgtcaggttgtattgactgtgctcgttgtgatttggggtcttcgcttaggactattcttattaatgaggattcttcaatggggagaggacaaacggtttgatgaaatgcgcgataacttgggaaaactagcagttttctggattttccaggctgtttgggtatggactgtcagcttgcctgttacaattgtgaacgcaagtgacagcgatccctcaattgaagcccgtgatattattggttggatcatgtggctgatcggggcaggtatggaagcaatagctgatcagcagaagcttacgttcaagaattctccgagcaatcgtggaaggtggtgtaatgtgggtctttggagttatactcgccatccaaattactttggcgagatattcctttggtggggaatatttgtagcatctactccagttctctcaggagctgaatggctcgtgatcctcggacctgtattcctgacgctcttgcttctcttcgttagtggaatcccacttctggaggcttctgctgataagcgctttggacagaacgaagaataccgcacgtacaagaacactacaagtcctcttatcccactaccaccagctgtgtatggagccctgcctggatggttcaagatgggcttcctcttcgagctcccgctctacaatcgtgtaccgcaacgtgatcctgtcagctgatgatatcagtgatctctagcgattgttgtgtacaatgtgtgtagtataagatacttcctccgtttcacaatggaagtcattttagcattttccacattcatattgatgttaatgaatttagatagatatatgtctagatatattaacatcaatatgaatatgaaaaatgctagaatgacttatattgtaaaacggagggaggacattgttattgtcgataagtgatttcttttcgctttggttattagggcagtgaaattgtatccacgtgaaaacattacgttcccttcagctctgtttct

SEQ ID NO: 15702 - DNA, 1360 bp, Oryza sativa
  ref <308>: DATABASE ACCESSION NUMBER: AK066217
  ref <309>: DATABASE ENTRY DATE: 2001-12-06
gactctctcactctgtctcctctctcattatcctctcgcgctcgagtgtgtgtggcgagtgcggccggcggtggccatgaacagtggtgggcgcggatggcagcactgagcggctcggcagcggacgcggacggcggtgggtgtagcccgcggcactgagctgttcggtggcgggcggatccacctcggccagcctcgcaatgggcggtgggcggcccggttgacggtgaaggcggcggctccctcaacctccccatgaagcttcgatggcggcctgaagcgacgacgatgatgaggaggcggccgggaggggcgccaccggccccgcgcgcacgccggccggatccgcaccgtcctggccaacgacgatgacgaggaggaggcggacggcgccgccagccccccgcgcatggatctacgccgtcccgctgccgacaacgaggaggcaacggcggccgggagcggcgccgcccgctccgcgcacacgcgcgccggccggatccgcaccgctgccgtcggattctagggttcctttttttcgaatttttatttttttggaattttatttttccatgcgggcgacataacccgaccgcacacgaaatccgattatcccgtgtggtctacttaaactgaccgcatgtgaagattattttttccgtgcggttaggctgcccgtatgcggaaatatttattttcacagacaccagggtgtagggtgtagacgggcaagacctccgcatggaaaaaaaactttttgaccgcacgaaaaaaatccttttagtagtagtgagctagtcaaagttgtctgttatttgaaaacagatcagtgcaatgctacacaatgctccaattataatgttaattagaatgcataagtttatacaccctacctccaattttttgccactgcaggaaaaacaaagctaagaatacatctagcaacttttctctgtggatgggaaacgcaagggagcagaaaattaatggtaactaatatctgtgacatgtaattttatttatctgttcccttcttgccaaataaaattatctggatataattagttgggaagttgcatctgttggaccattacaagccccggaacatgacagggcatctcagtgtctgcatcagctcattagcagatctgtctgaacctttggatttttgcagaacaaactccaaacgctgaaagatggacaagtaacctgccagatagcaaactagagatgacgggccaacagaaagttgtttagaatacctgtttcagctattgttaagtagaacaagcagattcagggaacattttcccagtttcaactttcaagtatatcttggtgccacacttggcttacatgc

SEQ ID NO: 15703 - DNA, 711 bp, Oryza sativa
  ref <308>: DATABASE ACCESSION NUMBER: AK066218
  ref <309>: DATABASE ENTRY DATE: 2001-12-06
ggattcccttctctcttctctctctcctccatttattctggctcattagctgcagccgtgcaagcgagcatcgtcctgttcctcgcgtcgggggaatcaagaatcggtaggaatcgatcgaggggttgagtggtaggtgctcctaggaggcggcaataatgctggaggggaaggcgcgggtggaggacacggacatgccggcgcggatgcaggcggcggccacgtccgcggcgtcgcgggcgctcgacctcttcgacgtcgccgactgccgcgccatcgccggacacatcaaggcggagttcgacaagaggtacggggtggggtggcaatgcgtggtgggcgcaaacttcggctgcttcttcacccacaccagcggcaccttcatctacttctccctcgagcgcctctccttcctcctcttcaaggccgccgccgccgccgccatcgccgcctcctaatccttccatgcccggagatccattcgccggcgaactacggcgtcgagcgatagcaagagaagagaccaacttatgtacgtacgtaagaatgtaatgtaagctagctcagatgcgccccatttgtacatacaccatgcttgtgcaatctttgccttctccttcttgatgctgctcatgttcttggtcaccgtggacgcctacgccacagccttgtatcaagcttccattttcagttttacagcgtttcatcccc

SEQ ID NO: 15704 - DNA, 1796 bp, Oryza sativa
  ref <308>: DATABASE ACCESSION NUMBER: AK066219
  ref <309>: DATABASE ENTRY DATE: 2001-12-06
ttctgctgttgaggttttagttcacaagggtgagtctggagtagcttggttttctgccaaagttcttgatataaacaatgatagtgcatgtatcagctacgactctcacactgaagaaactgatcttcgcaaagaatgggtgccattgagacaggaaggggagaaggcacctcaaatccgccttgctcatcctgcaactgtttctagatttaaaggaactaggaagcgccgtagggacacatcaggaaattactcttgggctattggtgatcatgtggacgtattgattgaagatagttggcgagagggaattatttctcgcaaccgtgatggtgatgaaacaaagcttaccgtacaattttcaggaaccagtgattccttagttgttgatgcttggaatcttcgcccatcacttgtttggaacgatgggcagtggatagagtggtcccgagggaagacggttgattgtaataagggtgattctcctcatgagaaacggcaaagaacaaaaggtaatgatcatgtacctattggtggagcagcagcaggcccttctatggatacgagcacaaatgctgcagcaaaaccagaggagccaaagccattggctttatctgatagggacatggttttcaacatcggaaagagggtagttgagagtaaaactgatggtgttgctttcaagcgacctggacttcggaaagaaggatcacgggtagttggtgttccaaaacctggaaagaagaaaaagtttatggaagtaagcaaacactatgatgcagatcaagctgataaaatttctgagggtaatgcatctaccagacctgtgaaacatttggtgccaaatgtgccaagaccacgggaaggtacttctaaagttgaccagaaaggaaagaggataggggagatgagatcgagagtacctaaatctacaaagtctcaggatggtgcaactaacatcattcctggcaagggacctttatccatgtctgccccaagcactggtgttttcgaaagtagtcatacatttataggaagtacaataggttcttccaacaacatgaacctctctgtagaaaagaatagttctgtccatggcgttggccttagatctgaagattcttctgtttctgaaccacacatccaagctgcatctgctgctcctacttccaggaagaatttaaccactactgatcgagctaaaaggaaacttgttccttctatggataattcgaacaggaccacaaacaaaacatctgaaattccagggaagagtgctgattctactgaacccagaaggtcgaaccgccgaattcaaccaacctcacggttactggagggtctgcagagttcccttatagtttccaaagttccaggcgaaaagggtcctaggactaactacagaagtgcttcctcaagagggcgaaaccttggctgagaaaaaggctttgctgcgctgttgttgggataattctcgtttgtacataactggttagctcgatggaggcaaaagaggataggattggagtaaagacttccccggagaagatgtgctcaggtgtattatatgctagcttaagttagtggggtttattttttggatttgtactggacacttgtgttatgtgatgtagagtagacattaatcatccaaaaaccaccgtttaatctgtatggatacagcgaaagagaaattggacacggtttaaactcatcgtctgtggtaaaccatttgacggatgtattaaccttctccgtccttttgtggaattgatggattgctaccttttgtttcg

SEQ ID NO: 15705 - DNA, 1580 bp, Oryza sativa
  ref <308>: DATABASE ACCESSION NUMBER: AK066220
  ref <309>: DATABASE ENTRY DATE: 2001-12-06
ggcatattactcgtcgccaccgcggtcaccgcccctctcctctattgttttctcgattcttcgcagggaaggggatacgcgcaagaaaccgcgagccattccgcgcaggtcgtcgccgcggtcaaatccggcggcggcggcggcggcggaggccggagggctaaacgggccgcccccgtccggtgagatccttgagggggtcctccgccccccttgtgtggcttgggggggggggggggggcgattcttcgcgcgggtgggtgctcgatttggatgagaggagcgcgacggcgggatgggcaccccctcgcagggctcggcggccgtggcagcggctggggtcgacctctgcgtgctcgacctggtgcccgtcttcgccaaggagatgatcgccgggggcgtcgccggcgccttctccaagaccgccatcgcgccgctcgagcgcctcaagatattgctacagactaggacaaatgaattcagttctcttggcgtcctcaaatcattgaagaaattaaaacaacatgatggaattttgggcttttacaagggaaatggtgctagtgtattaagaattgttccttatgctgcattacattatatggcgtatgaacgatacaggtgttggatcttgaataactgcccctcacttgggacaggacccttagtagaccttttagctggttcagcatctggaggaaccgcagtgttgtgtacttatcccttggatctggctaggactaaacttgccttccaggtcaatagttcagaccaaatcagtagtggtttgaagaggacaaactttcaaccaaaatatggaggaataaaggatgtttttcgaggtgtttattcagaaggtggagtgcgagctctctatcgtggagtaggtccaacgctcatgggaatacttccttatgctggtcttaaattctacatatacgaaggactgaaggcacatgtacctgaagattacaaaaattctgtcacattgaagttgtcctgtggtgctgctgctggattatttgggcagactctaacttacccactagatgttgtaagaaggcagatgcaggttcagagtcaacaatatcacgataaatttggtgggccacagataaggggaacattccaaggtcttatgatcatcaaacaaacgcagggatggaggcaattgtttgctggcttgagcctcaattacatcaaggtggtaccctctgtggctattggttttaccgcatatgacacgatgaagagtttactgaagatacctcccagagagaagaaaatgtcaggtcatggttctaattgaagtttctatccatccgtaagaaacatggagcagggcaaggttctctttcaagattttatcaagtgccttttgtgaagtcacaattgtataaagcctctgaggttcaatcttgtcaagtagtaattgtgttaactaacaagcttacatattcttccgattcattattttcattcattacatccaccagatgtggaacgttgtaaatttgtagggtgctaccacaacttttaggatgctacaaaaggtttcaaaattccatacgggttttccc

SEQ ID NO: 15706 - DNA, 1172 bp, Oryza sativa
  ref <308>: DATABASE ACCESSION NUMBER: AK066221
  ref <309>: DATABASE ENTRY DATE: 2001-12-06
gacggttataccccgaacttttaggatctgggaacgggcggccaagggagcggcgtcggcgggagaacggcgaaatcggccagcgacaggtggaaaggagtcgccgccgcagccgcagcaggtcggagccgaggagaggtgggcggacaacaacgagcgacgcctcgaggccccacacggtggccggggagaaagaggattgtggaggctgatgtccaggagagagggctgcctgccttctggatccgaaggcccatcctctccccagccgatgacgccatgccggcctcctcatttgattgatgcatcctcatcatcagccaaagcggcttgcacaaggcagcgaagttcagatgtgcttcgatcgggtcatggtgtgctccacttcgcagtaacatatatgtgttcctgaggtatgtgaaacaataaactgttccataattttttatactaaaaaaataacttagttcttgcatatgtggtgttactgtcatatatctttaatgagtggagaaaaaaatcaaggtgaaagactgaaacaatgcctataatattccaaattcacattgctttgtattcggctgtgcctcattatattcttcatgtatagaccactgttatgtgaaatcttgatggatcttggacttgatatctggattaatcttgttattttcaagtttgtatattttcaataggtgcagtgtgggatactgtagttgaggcacgggttgatggcatgttgatgagccaatcctgctgctccaattgacagcttcaaggggtacatcaagaagaggatttttattaaaatgtgctaattttttgatgttatgaaagtgactaacagtgatctccacatgctaggcactttctattttattggcttataatctgtgtcatttagagtcatactgaatgtaaatcgagacttctcgttgaaaccacctattggagacactggcaaggatacacgagcagggccataaagattattatgcggcatggcacaggactagcagcagcgtcggcagggaggtgactgagtctggtgccggccatatccatcattgttggtggtgttgtaattttttatttgtttttgtgcattctacaaatgtatcacattgcgtgtgtgatcagacagccgttgtaattctaaatccgttcaaacg

SEQ ID NO: 15707 - DNA, 3233 bp, Oryza sativa
  ref <308>: DATABASE ACCESSION NUMBER: AK066222
  ref <309>: DATABASE ENTRY DATE: 2001-12-06
tttgttgcatttcattaataacaggtacactgatagtgctggcttgagtggtccattcccttcaacgttctcaaagcttaagaacctgaagctcctgcgggcatcagataacgattttacaggaaaaatacctgattatattgggagcttgactaatttggaagatctgtaagagtaatttttaactttttatcacatcaatgattttatcctattcacaagacaagtggaactgcaacagaaattttctgcatatgttgtttccaattgaattcgaactgtagcgtgttttttttcttttaagtcatcactatgaacagaaatgtgcatacctgtatgccattactctggtcccaacagtgtcttaatatgtagaggttactttttctaatattcaaataaacttggcattttcatacttttttcttaaattatgaactcacagggctttccaaggaaattcttttgaaggaccgattccggaaagtttgtctaatctaaccaaattgacaaccttgtaagtactttgttctatggcaacattgccatcccctcttgtcatgatgactgatgtgctaaatacaaatgagcagacggattggagatattgtaagtgggagctcttcatttgcctttgtcagtagtctgacgtctttgaatatcctgtatgtgacacttaaattctaactatacatcttgcaattttatatattgacaaagtaataacttgctaataccgaatactttttacagtgtattgaggaactgcaggatatctggagaccttggagcagtagacttttcaaagttcacaaaattagccttcctggacttgagttttaacaatatctcgggcaaagttcctcaatcaattctgaatctacaaatgcttacagacctgtttcttgggaacaatagcctaaccggaggactgccagatgggataagcccttcactaaaaaacttgtgtgtaaacaattcaacattgcagtacagctaaaattagaatgatgcatttatttcatatttgcagagatttttcatacaaccagctcactggaagctttccctcctgggctacccagaacaacttgcaattgaatttggtggcaaacaactttgatcttggcagcaccaacaacggtattctacctccagggctaaactgcctccagaaagacactccatgtttacgaggttctccagaatattattcctttgcggtagactgtggtagtaacagatctatcagaggctcagataatactatgtatgaattggatttcacagaccttggcagctcatcatattacgttaccagtgaaacaagatggggtgttagcaatgtaggaaaatatttccagtctccaaatgacagtaagatcatatatagcaatgagaagattcagaatgcagtggtttcagaactactccaaactgcaaggatgtcaccatcgtctctgagatactttggccttggacttgagaatggaaattacactgttctgcttcaatttgcagagttaggttatccagactcaccaacttggaaaagcttaggaaggagagtttttgacatatatatccagggtgacctaaaagaaaaggacttcgatataaggaagatggctggtggaaaatctttcactgctgtttacaagagttacacggcaactgtgtcgaaaaacttcctcgaaatccatctgttctgggctggaaagggcacttgttgcattcctattcaaggttactacgggccattgatctcagcattaagcatcactccaaattttactcctactgtgcgaaacggtgtacccaaaaggaaaagtaaagtaggtgcaattgctggaatatcgattggtgcctcagttgtaggattagcagccctatttggaatatttatgttcataaagaagagaagaagacttgcacaacagcaaggagaactgtacaacctagttggacggcctgatgtcttcagtaatgctgaactcaagttagctacaaataattacagttcccaaaacattcttggggaaggtggatatggaccagtctataagggtatgctacctgatggaagagttatagctgtaaaacaactttctcaatcatcccatcaggggaaaaaccagtttgtgacagaggttgcaacaatttcttctgtgcaacaccggaatcttgtcaaattgcatggttgttgcattgacagtaatacacctttgttagtttatgagtaccttgaaaatggaagcctagatcaagcactcttcaggaagaatagcttaaaactggactgggcaactcgcttcgagatcattttaggaatcgcaagaggactaacttatcttcatgaggagtcaagtgtgcgcattgtgcatagggacatcaaggccagcaatgtcctacttgacaccggcctcaccccaaagatatcagactttggactcgctaggctctatgatgagaagaagactcatgtcagcacggggattgcgggcacatttggttatctggctcctgagtatgcaatgagacgtcatttgactgaaaaggttgatgtttatgcattcggggtggtcgcattagagactgtcgctggtcgatcgaacactaataactccatcgaggaaagcaagatctatcttttagagtgggcctgggacctgtacgaaaaggagcaagcacaaagaatcgttgatccaagacttgaggatttcaataaagatgaagttctcagagtcattcatgttgcgctcctctgcacacagggctcaccaaatcagcgaccgccaatgtcgagggtcatggcagtgctcactggagatgctgaggtagttgagatggtgacgaaaccgagctacatcactgagtggcaatatagagatggaaacagcaccaactcagaatctaccacctcagagttcagcaggcagaaggagatcgaccctctcaccatgtcgccaacaatcaccggatctagtcatgatggaaggtgaatgctgcaacctgcaggtgatcttggtttgaaatgattgtatgtaaatgtaagacggagctaatagtggaacttaattattctgaagtatgtatgatgataaaagtatttactccttgtaatttgtaacaggtcaaatagagtagtatcctagtatatatcttagaaattaatcaacgtattcgcatgtttatgagcacattctgcagcaaaatagtaaaaactgtccatg

SEQ ID NO: 15708 - DNA, 1593 bp, Oryza sativa
  ref <308>: DATABASE ACCESSION NUMBER: AK066223
  ref <309>: DATABASE ENTRY DATE: 2001-12-06
gagctgataataatctgctagtgaaggagcatacccatacatttgtaaataaaggaggcacgattggtgaacttgattttcggtttcctgtgggagctccgttacatggtatccaagcattcctacgaactaaccaactcaaggtttatgataaagcaagaaatgccgttgctcttgctctaagcccagttgttcgagctcttgttgatccagatggtgcattgcagcaagtacgggatttggatgatgtaagtttcagcgattggttcttgtcgaaaggtggtactcgagagagcatcacaaggatgtgggatcctgttgcctatgctcttggtttcattgactgtgataatatcagtgcacgttgcatgcttaccattttcactctgtttgccacaaaaacagaggcatctttattacgcatgctaaagggttcacctgatgtttatctgagtggtccaataaagaagtacataacagacaggggtggtaggtttcacctgaggtggggatgtagggaggttctctatgataagtcacctgatggggaaacctatgttaaaggccttctcctatccaaggctacaagtagagagataatcaaagcagatgcatatgtcgcagcttgtgatgtcccggggatcaaaagacttttaccttctgaatggaggcaatgggatacatttgacaacatctacaagttagatggtgttcctgtagtcacagtacagcttcgttataatggatgggttacagaacttcaagatttggagaaatcaagacaactgaaaaaggcagttggcttggataatcttctctacactccagatgcagatttttcatgtttttcagaccttgcactttcatctcctgctgactactacattgaaggacaaggttccttgatccaagctgtgctaacccctggcgatccttacatgccattgccgaatgaggagataattagcaaggttcaaaagcaggtcttagaattgttcccgtcatcacaaggcttggaacttacatggtcgagtgtggtgaaaatcggtcaatcattgtaccgcgagtcaccaggaaatgatccatttagacctgatcaaaagacaccagttaaaaacttcttcctgtctggctcttacacaaaacaggactacattgacagcatggaaggggcaactctctcaggcaggagaaccgcggcctacatctgtggtgcaggagaggagctgctcgccctccgaaagaagctcattgtcgacgacagcgagaaggccaggggtaaggtcgaggcccttcagacaagctgagcttcctcaaatgacacatgctggagtgagtggattgctatgcccaaaacaaaaacagcttcctgggtgtagtaggcgatttccgcagcgactctcatgtaaatcctacttgattgagcatttaggtccaatctgctgctgccctttttgccttgacacgatcgttcgttcgcccgtcaatggtgtgttcttcgttattgtgaatttgtgattgggaaccaaaggtggcatacgggattacatcaggcagcgtgtgttttgttcagcttaaccgatcattgaaccc

SEQ ID NO: 15709 - DNA, 4018 bp, Oryza sativa
  ref <308>: DATABASE ACCESSION NUMBER: AK066224
  ref <309>: DATABASE ENTRY DATE: 2001-12-06
gactagtagttatgtcaatgtttgtggagggaggatggagcagatcaggatcggcagacacagagcggagcgcggagggagggaggatcggggcgatggggattgccggcggtgaggatggatggaggcgccgccgccgacgcagcgcggccattggtggtataagctgcacagtaagaagagcaaagttgacaatttgcctcgaaggaaaccagtgatatatgtggatcaatgattaacatgagacagatactgaacttatggtaaagaactgcatataccaaggaccaacaaagtcttccagaccatttggaacgagaagcctgatggaacagtgcaacgagatattaagatccagaagggctccacaatcagagggatggtgcctgatacactcgaagcaaactcagattttggataaccacgggcaagttgatgatgatgaggtgataatcgattccccactcctcccttatcaaatttcccatgattttctctctcaattcgggtctagtttgccagatttaattgatttcaatgatgtcaagccggcgagcttcctccggttgtttttatcctgaattttgtggacttgctccaattttgagaaaaatggagagagaaaatctagtggatcaaaaaccctcaaccaatttttggtagatcgagaaatatttaatctgatttggtgttgaagatcggctctagcatccccggctatttttatcccaaattttgtggactcgctccaattttgagaaaaatggagagagaaaatctagtggatcaaaaaccctcaaccaattttggtagatcgagaaagattcattctgatttggtggagaagatcggctctagcatcgcagggcacaagacgggactgtcttttggatactgaaatgccccgtacccgtgacatttaactttttatttttgccacttttaaaagggttaattggatccatgccattataaatttgcaggtttggaaaaataccattactatacacaaaattgaaagcatgccatctatctatctattatattattaaaacagctttgaaaaggaggcatcacgtttgctgtggaggttaaaaattccaacattaatcggagaaaaagaaaaaaagagttcaaatagaaatacaataaaaataaaaaaagagctgaaattcggaattaaaaatatgccatattgaaagaggagtccatataggaactcaatacgtgattaattaaaatttggaataaaaatacaataaatttcgaaattagaaaaagaaacaaagaggacttcgagtaggaatacgatttaaaaataactgaaattcgaaattaaaattaagcaatattgaaagaagagtccatataaaaacccaatacgagattaattaaaattcaaaataaaaaaatagaaaatcgaaattaaaaaataaaagaaaagtagagttcaactaggaatacgatttaaaattagctgaaagtcggaattaaatataagcaatattgaaataagagtacatataagaacccaatacgagattaattaagattcggaatgaaaaataaaataaaatccgaaattgaacaaattaaaaagagagttcaagtaggaatacaattttaaaacgactaaaattaaaaattaaaaataaaatattaaaagaacacaatacattattagttaaaattcgaaataaaaaataaaataaaatctgaaattagaaaaggaaaaataagatttcaactaggaatacaatttataaataactaaaattggtgataaaaaaataaagactattggaagaaaagaccatctaaaacacatgacgtgattaattaagtaatagacctataaaggagtagggtggtggcggttaatgggccatctaaaaactattaataaaacaccaaatataatgatggcgggcaggtagtgaagcaaccggtcaaggcggtttgcgggacttctagaaagtaaaaaaaaaaaaagccccaatgataatcatatctgatttttaaaatctcaatgacaataaaaagaagaggcagcgggcgggttgtatgggagtacattggcaaagctaccatagaaagtaaaaaaaaagaattccaacgatagttatgttcgatttttagaatcccaatggcaataaagaatagacggcggacgggtcgtagaggagtatagtggtaacgtttgatgggatttctaaaaattataaaaaaatggcaccacgttcgctgtggaggctaaaaatttccacattaatcggaaaaaagaaaagcaagagtccaaacagaaaaacaataaaaaatagctgaaattcggaatgaacaatatgcaatattgaaagaggagtccatataggaacccaatatgtgattaattaaaattcggaataaaaataaaataaatttcgaaattagaagaagaaaaaagaggacttcgagtaggaatacattttaaaaataactggaattcggaattaaaattaagcaaattggaagtggagtacatataaaaaccccatacgagattaattaaagttcaaaataaaaaaaataaaaaatcgaaattaaaaaataaaagaaaagaagagttcaactaggaatactatttaaaattagctgaaattcggaattaaatataagcaatattgaaataagagtatatataagaactcaatacgagattaattaagattcggaatgaaaaataaaataaaatccgaaattggacaaatgaaaaagatagtttaagtaggaatacgattttaaaacgactaaaattgaaaataaaaaataaaatattaaaagaacacaatacattattagttaaaattcgaaataaaaaataaaataaaatctgaaattagaaaaggaaaataagatttcaactaggaatacaatttataaataactaaaattggtgataagaaaataaagactattggaagaaaagaccatcaaaaacacatgacgtgattaattaagtaatagagctataaatgagtagggttggttattaagtaatagacctataaaggacatctaaaaactattaataaaacaccaaatagaatgatggcggacaggtagtgaagcaaccggtcaaggcggtttgcaggacttctagaaagtaaaaaaaataagccccaatgaaagaagagatagcgggcgggttgtacgggagtacattggtaaagctaccgtagaaagtaaaaaaaagaattcctacgattatgttcgatttttagaatcctaatgacaataaagaatagacggcggacgggtcgtagaggagtatagtggcaatgtttgatgggatttctaaaaattataaaaaatgaaatccaacgagacaataaattataaaaactataaggtccaattttaaaaggttcgggcttcggaaaagtaaaaaaaataaaccccaatgatgatcatgtttaattttaaaatctcgatgagaataaagaaggaaggcagcgggcgagccgtattggagtacagtgacaaagtcgctgacgttttgacggaacttctagaaactaaaaaaattaaacctaaacgacaattatgtttgttttttaaaataccaatgacaataaagataacaggcagtggacgggccgtagaggagtataatggtagcgtttgacgggaattctataaattataaaaacaaaacccaacgagacgataaactctaaaaactataagatccaattttaaaaggttccaaagagaatgaatagaaacagtgatagatcaagcaagcaaataaagaaggatatgacagaagtaacgggtagcaactggtgtaaaattaaaaaattagaaacacgggaatgatagggtttggtctttcaaaccttatcatataaaatatataattttgtataggtgttagccgcgcaattgcgcgggccacccagctagttatattattaaaggaatagaaaaaggagcctccacgttcgctctcatggcctagaaattctcacattaatcg

SEQ ID NO: 15710 - DNA, 1465 bp, Oryza sativa
  ref <308>: DATABASE ACCESSION NUMBER: AK066225
  ref <309>: DATABASE ENTRY DATE: 2001-12-06
ggcaatctccgctgcttccctcccatcgctccttctcatcggcatcggcatcgccatcgctattctccgagtatcttctccttaccttggcggcataaaagaaggaaaatctgtctcctccgctccttgcgccgccaagacgagtcgcagctgaacaaaacaagggaggagaggcgcctttctgattcatctttctctcccatcgggactacttttgtctggataattcttgcgttcgttcgttaaccctagcttctcttctagatctggaagagactcttcttttaatttcagaatacaagtaacagtttgggggttctcaagttggatccgcccctgctcccatggtgacatccgatgaagatgctaagaaggcgtatgctgatttcgagaagaaggtcaagaggacgatctatattgatcatctttcccctcaagtcacgagctcagtaattaaagcagctcttgcccaatgtccaaatgttgtcgatgtggagttcattgttaattacacagtcccgtatgacattccttctgctgcattggtggaattggatgacgaaatacaagctaaggctgcactagacttgatgaatgatttccctttcataattggcgggatgccaaggcctgtaagagctatatgtgcaaagcccgagatgtttcgggagcgccctcctcaccctggcatcaggaaagagttccggtgggtaaaacaagaagatggaacagagtatcaaggaatgaagaaattgaggatcctagcaaaaaggcaagaagtagaaaatatggcactcataaagaatcaattggaagaggagaaggagctggcaaagcagcaacaggaattactcgatggaaattacaataagtacgacatgctggagaatgtcgtacagaacggaaacatgaagagcctagctcagcattatggagtcagcctggccgatgagttttgacaatccaatccatgagctgctcgctcactcataagtccggtctagttcccgccttcccggtgcagcaacatgcctaataaccttttttttttctctctccctctccctctccctccccacctctctctctcggcctttagggcagtgataaatcatgtcaatgtgtgagatgaagtaataatccaatgactggtttgaggcacgcattaggcgtgatcaaaggcatatcctttgtgtaaagatagttgcctgcctgctataatttatctggaggggctattgacaacagcactggtttcttccttgtgattctctgacgtcctgcgagatggttaccataatttcagagactcgtggatgtattgataagttatttcgaggaggagaaggcgtctgttgtaggcctgactgaagttagctgtagagtgtatggaactggaagtcttaaaattttggccttgtttacttccttgccattctcaactattcgaaattttggtgatacc

SEQ ID NO: 15711 - DNA, 1213 bp, Oryza sativa
  ref <308>: DATABASE ACCESSION NUMBER: AK066226
  ref <309>: DATABASE ENTRY DATE: 2001-12-06
gagccaagccagccgcccaaaccagcaaccaaagaaacagctagagagagaaagaaaccccggattacggattcctccctcccccaaaggccaaagcctcccaccgccgagccgccgccgccgccggctttcttgtttctagcttcctttgatgatgaacgctctcggtttatcggtggcggccaccagcaccggctcccccttccacgacgtctgctgctatggcgctgggattgcagggaacatcttcgctcttgtgctcttcatctccccgctgccgacgttcaagaggatcgtccggaacggatcgacggagcagttctcggcgatgccgtacatttactcgctactcaactgcctcatctgtctctggtacggcctccccttcgtctcctacggcgtcgtcctcgtcgccaccgtcaactccatcggcgccctcttccagctcgcctacaccgccaccttcatcgcattcgccgacgccaagaacagggtgaaggtgtccagcctgctggttatggtgttcggcgtgttcgctctaattgtgtatgttagtctggcgttgtttgatcaccaaacacggcaattgttcgtcggttacctcagcgttgcgtccctcatattcatgtttgcgtcccccttgtccatcattaatctggtgatcaggacgaagagcgtggagtacatgcccttctatttgtcactctctatgttcttgatgagcgtatcgttcttcgcatatggagttctactgcatgatttcttcatatatattccaaatgggattggaaccgttttgggtgtcattcaattggtgctctatggctacttcagaaaaggatcaagagaggacagcctcccattgctagtcacacatacatgagcacaccaaggaacaaggtcctgcaagcaatttgcctgcctttgtttcttggaaaatcatcggttctcttatcagttatcacatattggattttgtgttggtggtggtgtttactgttcttttgtaaaattgttttgtggtttgaaatgtacaaatagattttggtataccatattgaaagtagttttccagctctgttgctagctgccacatcatttcttggttcttggatacctttgtatatcagaaacaaaaatcgtcacaatctacaattggagctgtaagaggtgaaatttatctagctaaatccgaaagctagcattaacactt

SEQ ID NO: 15712 - DNA, 3205 bp, Oryza sativa
  ref <308>: DATABASE ACCESSION NUMBER: AK066227
  ref <309>: DATABASE ENTRY DATE: 2001-12-06
ctccttttactattctaggcttctagcaaagcttcgccaatcgaggcgacgcttaaaatgggagagccccggaggcgcgcgcaaccgcaccacgctcgccggcgccaccgcgccacgagttccacggccgcggcgtcgtcgtcgtcgtcgtctacggtccatcaccgcccccgatcgatgcaccccgtgccgccgccggtggccgcgcctcctcccgcgcgccgctaggtctcccgcacgcgcctgcatgcggtattgcggtggccgtggcggtggttgactgaccccatggcgtcgcggcaccggaggggggctttccccgcgggggcgaaggcggcgcccgaggccgaggcggccaaggagagcgtcgccgtcgccgtccgcttccgtcccctcagcccgcgggaggttcggcgaggggagaagatcgcgtggtacgcggacggcgaaaccgtagcgcggagcgagcagtccaacctcgcgtatgcctacgatcgagtctttggaccaacaacaacaacacgtcacatatatgatgctgtggctcaatatgttgttaatggtgccatgaagggaataaatggtacaatatttgcatacggggttacaagcagtggaaagacacatacaatgcatggtgatcaaatatccccaggggtaatacctttggctgtgaaggacattttcaatataatacaagagaccccaaatcgagagttcctccttcgtgtatcatacttggaaatatataacgaggttgtcaatgatctactaaatcctgcagggcagaacttacggattagggaggatcttcagggaacaattgttgaagggataaaggaagaagcagtgttatctcctgtacatgctttgtcccttattgcagctggagaagagcttagacatgttggatccactaacttcaatctgctaagtagcagaagccatacaattttcacactgacaatagagagtagcccccgtggtcagtctaacgaagcggaagcggttaccttatctcagctgaacctcatcgacctggcaggttctgagagttcaagggttgaaactgcaggagtacaccagaaagaagggtcttatatcaataaaagcctgctgactcttggaaaggtgatatcaaaactgactgatgagaaagctactcacattccatttcgagattcaaaattaacgcggttgctaaagtcatcattgagtgttaatttgcacagttactccagcatcaagcaattctgaagagacacataatacattaaaatttgcccaccgtgcaaagcacattgagatccaagcaacacaaaataagattatggatgcaagatctctaatcaagaaataccaaaatgaaattcgtcaactaaaggaagaacttgaacagctgagaaggagtattcgtactggaacccctatagaagacaccatgcaaaagaaacatcatttgttggaaacaaaagaagattgtaatgtcaagcttcaatctagactggaacaaggagaagaagctaaagctgctttgcttgagaggatagaacatctaacagaactaattctggtttccgcaaaggcaagtcggactactaaatcgtctcactgcccaaggcgaagacattcttttggtgaagaggaggattcggtgaaaaatttaaaagctcccccaaggaggagacggaaaatcagaaaggacaccttaactggctgaatctacggaagtgtgatagtggttctactaatctgacaagttcggatggtgaaaaccctagttcgaccaaatcattacctgccctttccacacctctggggatcggattttttaatgtcacatcagaacaaaggatgtcagattatatgcttgctgagaatgtaccggctaatctgttatgtgttggccatagagaatttccttctgacagccttcctgtccaggaaacacctttggttagtagaaagacttcagatcatgtggacatattgagagagcaattcaatattttatcaggggaggttgcactccatcaaagtgttctaaagcgcctatcagaggaagctggaaaaaatgcaatgaatgaacagattgagatggaaatgaaggtggtcaatgatgaggttaagctcaataagcagaaaatagcatctttagaaaggcggatttctaattcaatgtcaaatagtcgaggcatgcatgataatttagaactctcactgccttacattgaaatacctgagcaactcaatgagaaagcgtttcaacttgaggcaagtgagtgccaagagtttctgttgtcagaaagaaccacatttcagcacaacacaggcattgtccaagaaacaggatctcaagctcacaaaggaaagccattgcccagtgatgtatctgatgaatttctgaaaaaggcgtcacaggcagagattgatgaactgaagcagagggtatctgaactcactgaagccaaatctcaactagattcttgtaaccataagcttctagaggaaagtacatatgccaagggcctcgcctcagtgaccagtgttgagttgaaggcactatcagtaaaagtcaccaaactgatgaagcagaacgagaggcttagcagcgagttggcatcaggaagaaaccaaagaagaggaagccatggtccgaggggagctaggagggaaagccacacgaaacgatatgaaccagctcgcagaggagacatgaatgctctggaggccatgctgaaggagaaggaccaaagacaggcagaacttcatacgaaaattgaggagtcaaaacagaaggaagccttcctggagaaggagcttgccaatatgtggactgtactggcaaacttgaagaaaaccaggggaattgaccaagaagattttgactccaaatacaatggatcatgggcctgaaagcactgaagcaggtcgtggtagaaaaacaatcttccaatcgtctgctcttcagcaatgtataggcagctgtaccagataagcagggtgctttttttgtactccatataagcagctgtacctgggttcttctccagtctgaagtttgctgtctgtatactcctgaaataagcttccagcgtgagtaagtgcttgttgctggaatattcactgctaactgctcccgattgatttacaaattacaaatgtgtgaatatatgtaaagtaatgtaaactattttatttgtcg

SEQ ID NO: 15713 - DNA, 3129 bp, Oryza sativa
  ref <308>: DATABASE ACCESSION NUMBER: AK066228
  ref <309>: DATABASE ENTRY DATE: 2001-12-06
ggtatgagcgccgcctcctcgccgccgcctccctcctcctctccgccgatgcgcagggccaaccaccccacgccgccgcccaactcggagtcggagtcacggccgagctcaagccgcaccaggtcgatggcgtcgcgtggctcatccgccgctaccaactcggcgtcaacgtcctgctcggtgacgaggtcggtctccattttcttttccttccccgccgcgccgagcttcttcaatactccatgtgcctgctcatgaatacgaggaggatcgactccgtcttgttctatgctgtttcacctcaccttatttcatcaaacacttttccgcaccaccatttttcgttactgttaataatgtgtaatcaagctcatgtcatgtgactgctgttttttcttatgtcggacggaccatggccagatgggacttggcaagaccctccaagcaatctctttgttgagctacctcaagatccactccatctcacctggaccatttttggtcttatgtcctctaagtgtcaccgatggctggctctcggaattcaataaattttgtccttctttgagggttatccagtatgttggtgataagttgcaccgtcgtgatctccggagaatgatgtttcaggatgtccaaaaatcttcatcgtcatctcattccactgagttaccgtttgatgtcatgatgacaacctatgacatagccttaatggaccaagaatttctttcacaaattccttggcactatgttgtcattgatgaggcccaacgtcttaaaaacccatccagcgtactgtataatgtccttgagcaacgctttatcatgccaagacgtctgctactaacgggcacccctatccagaataacctttctgaactatgggcattgatgcacttttgcatgccctcgatttttggtaccctggatcaatttctttctactttcaagcaatcaggtgattcattgacaggtggcgaaactaataaaacggacaaacagtttaagatccttaaacatgtactgagagcatttatgctgagacgaactaaagctttactaattcaaagcggaattttggcattgccttcattaactgagttaacagtgatggtacctctgacacccttacagaagaaactatacttgtcagtattgagaaaagagctgcaaacactacttacatttactggaggattgtcccgccaccagtctctgcaaaacatcgttatacaactgcgaaaagcttctagtcatccatatctattcagtggcattgaacctgagccttatgtggaaggggagcatttggttcaggctagtggaaagcttgtcatgctagatctcattcttaagaagctccatgaagtaggccatcgagttctgctatttgctcagatgactcaaacactggacattcttcaggacttcttagaattgcgtcagtacacctatgaacgtctggatggttcagtgcgtgctgaggaacggtttgcagcaataaaaagtttcagctctcaacctaccaagggtgttgtcagagatgataatcagagtggagcttttgttttcatgatatcaactagagcagggggtgttggccttaatctcattggtgctgatactgttattttttatgagcaagattggaatcctcaagctgacaaacaggccttgcagcgtgcacaccgcattggacagttaaataatgtattatcaataaatttggtatcacaacgcacaattgaagaggtcatcatgcgaagagcagaaagaaaacttaagcttagccacagcgttattggagaggaggatgcaacttatgggaaggggaaatatgtagaaaatgaagctagcgacatgcgctcgattatatttggcttacacctatttgatacttcagatacgactgcagagacaatgaatgatgacacagcttcggagactatcaaagaagagactatgttgaagctgaaatcaatgtctgaaaaagtagtgttgatgcgtagtcatgaaccttcagaaaaggatgaacgggcattcgaaatcaatccaaatatgacagacaacagtggggctgttgttacgagggtatctgattccgttaatgttgatccggattttaatgaagccgcatacttatcctggcttgagaagtttaaagagtcttcgcattctaaggaaaataccagagctgaactagaaaggcaaagaatagcacctgaagaaaagttcctaaaacgtgaagctattaagaaaaaggtggaagaaaagagattagccaaatgggaatccttggggtaccagacattaaagatcaaagatcctgacatcttaccgaaccagaatattccagactctggatccgtccaacttgtatatggagattgcactaatccttcagtagtttgccctgcaaagcctgccatcatattcagttgtgttgataattcaggaacctggggacatggaggaatgttcgatgctttggccaatctctcaacatgcattccagatgcttataatcgtgcttctgaatttgatgatctccacctggcagatcttcacttgattcagttagatgaagccaagtgcaaccggagtttagatgctcctctctgggtcgcgctagctgttgtgcagtcttataatccaaggcgaaaggttccacgaagtgaaatttccatacctgatttggagctttgtttatcaagagtggccttttcagctgctcaacattccgcgagcatccacatgccccgaatcggtctccaaggtggaggtggaggtgggtcccaacgatcagagtggtacaccatagaacggctgctgaggaaatactcgtctcttcatggcgtcgacatctttgtgtactattataggcgagggaacaagcactagttggcagcttaaacaatagagaatggccatagtacataaggaagtgcccctcaccctgtagactaggaaatgcctgccatctgtaatatgaatgcaatgcatgtactctgaaaggaggaggagtagtagtaggagaagtctcttgtgtaatgtctaatgcctcgcgtcagttagctacgaaaaatgtttgtctgaacaagtgaaccgaaaacgaaaaatgtttgcctg

SEQ ID NO: 15714 - DNA, 1538 bp, Oryza sativa
  ref <308>: DATABASE ACCESSION NUMBER: AK066229
  ref <309>: DATABASE ENTRY DATE: 2001-12-06
gtgggagtcatcattcccacaccgccggcgagcaagccgattccgccgccggaggaacggtggctgcatggggtttcttcggctcagaggactggaactcgtcatatctcgacaagtgcaagcagatcttatgtatagcagctaacaagtggtatgaacaaaacattggccaatgggatatctcaacagtctgaatattaatacagaagctatatttttctgaacttggaggcggcatccttgactgggaatcaagtttcaacccagtgatgtaagtagcaaagaccaactagtgatctgtcgaagctatccttcttgggctgtgttttcccctcttgttgagaatgccatttgttctggtggaagtctgcaagcttggtgtttcatgctggtgtcaggatgacatatggacattctgaaataaaatgaaggattggtgtagctatattccttgaggaatcttgaatctgtctttgaaggcttgaagctgtgtaagactgcattgtcgattcggcaaacttctgggcccttggtctttgaatctgtcttgaggaatcgctgatctgcaactacctgggtccatgatggatgtgtagagagaagcagtgtcggtcgatctgggctgagcctgcttcaatgttttaattggcttcttttttccagacagacatcaattgcagtgacagttcacaaacctccatctatattcaccatagaatcaatccaatcacagtaacttgcacagatttacagttaatcaaaatacactgcacttctacaagtaaggtctcatcttccagacaagatgtctggtgtcattgtgcccaagctattccctgaccacgggtactgtgcgacgtatgggtcgaccccttcattgtgcattattgccagcaagctggagttcagggttgccggtgtaaactccggcagcggtgcatctccatcaaggtattgcatgacctgccgcatgataggccttgctccgggtattgggtgtgagcacatcagcccaagtgtcaacaccaggcatgcctcatcgacgttgtagatgccgtgcagcttcgggtccactgtctctggcagcgaaccctggtgccagtgctggagaacccagtcaaccaacatctttcggccgtggtgcgcactgttgctgatcggccaccggccacaggtgacctcaagaaggaacgtgccgaaggcgaacacgtcggtgagaggggatgcctttcctgtgcgtgccagctctggggctatgaatcccatggttccaaccaggagcacgttgcttgctttgatgtcacggtggatgacaaccttgtcccacttcttatgtaggtagaataagccagaagccacgtctttgatgatttgcatcctctgagcccaatttaaaacagttggtttcttgtctccaccgacagtgactcatgttttgctaaaatgctgatagtggaccattctaataccattttcttttgtaaaaagatgccacgaataactacacaaatatggactatggccaactgggcttgcgc

SEQ ID NO: 15715 - DNA, 2182 bp, Oryza sativa
  ref <308>: DATABASE ACCESSION NUMBER: AK066230
  ref <309>: DATABASE ENTRY DATE: 2001-12-06
gggtgttgattggaattgatctagcatataatttgcactctgcttttggcaattggttccctgggtcaaagccccttcttcagcaagcaatgaacaagataatgaagtcaaatcctgctctgtacgtgctgagggagagaataaggaagggtctacagctgtattcttcggaacccactgagccgtatttgtcttcacagaactatggagagatattcagcaatcagatcatatggtttgtggatgacacaaatgtctatcgagttaccattcacaaaacatttgagggtaacttgaccactaaaccaatcaatggtgctatttttattttcaatccaagaactggtcaactatttctgaaggtcatccacacaagtgtatgggctggacaaaagcgtcttggacaactggccaagtggaaaacagctgaagaggttgctgcattagttcggtcgcttcctgtagaagagcagccaaagcaaatcattgtgacaaggaagggtatgttggatcctttggaggtccatctgcttgacttccctaacattgtgatcaagggcagtgagctgcagctgccattccaagcttgtttgaagattgagaagttcggtgatcttattctcaaggccacagaaccccagatggttctttacaacatatatgatgattggttgaaaagtatctcatcattcactgctttctctcggattgtgcttatattgcgtgcacttcatgtcaataatgagaaggcaaagatgctgctcaagcctgacaaaactattgttacggaaccacatcatatttggccaaccttgactgatgagcaatggctgaaggttgaatgtgcactcagggacctcatcctgtctgattatgcaaagaaaaacaatgttaatacgtctgcgctgacacaatctgaaattcgtgacattatacttggtgctgaaatagctccaccatcacagcagaggcaacagattgctgaaattgagaaacagtctagagagacgactcagctgaccgcagttactacaaggacgaccaatgtgcatggagatgagctcatcatcacaacgaccagtccatacgagcaacaagcatttgcatcaaagactgattggcgtgttagggctatctctgccacaaacttgtatcttcgtgtcaatcacatttatgttaactcagatgatataaaggagactggctacacttacattatgccaaagaatatattaaagaagttcatatgcatagcagatttaaggacacagattgcagggtttctgtatgggctgagcccacaggataatccccaagttaaagagatcagatgcatagctattcctccgcagcacggaactcatcagatggtgacactgcctgcaaaccttcccgagcacgagttccttaatgatttggagccactgggatggatgcatacccaaccaaatgaagctcctcagctatcaccacaggatttgacatcacatgccaagatcttggagaacaacaagcaatgggacggtgagaagtgcatcattttgacatgcagctttaccccaggatcttgttcattgaccgcgtacaagctgacgccaagcggttacgagtggggccgtagcaacaaggacaccggaagcaacccacatggatatctcccgactcactacgagaaggtccagatgcttctcagcgacagattcctgggattctacatggtgccggataacaccccttggaacttcaacttcatgggagtcaagcacgacccgctgatgaagtacaacatgaagcttggcacgccccgggacttctatcacgaggaccatcggccgacgcatttcctcgagttcagcaacatcgacgagggcgaggtcgcagaaggtgatagggaggacaccttcacgtaagcaggcgccacgaacgcctatgctaccatagcctttctgctacgaacttcgcgctgtttcgagtagagatccgtaacctgtaacttgacgcaaccggtagtagcatatgatgcttgttttgaggagattgtataccctgatgtagtctgcccttgaaagaacagggtgtttgtagtttgtacaagtgcacgccatgataacagtgaagattttgcttactctcgatattgtattatgtagatctcggctaagatatattattgcatcctact

SEQ ID NO: 15716 - DNA, 2244 bp, Oryza sativa
  ref <308>: DATABASE ACCESSION NUMBER: AK066231
  ref <309>: DATABASE ENTRY DATE: 2001-12-06
ggtttgctcttctactgctcatcctcctcctctactactcgtcctctttgctctattcacagctagcaacaagaaggaggcttacacatgcatgtgcacggtctctgccggacgcatatgaatcaggcatgaatagggggcacatcagcagctcggagctcatcgacgccaagctcgaggaacgccggatctccacggccaagcactgccccagctgcggcaacaagctcgactgcaaaccggattgggtggggctaccggcaggagtcaagttcgatccgacggaccaggagttgatcgagcacctcgaggccaaagtgagggaagaaggctcaagatctcatcctctcatcgatgagttcatacccacgatagaaggggaggacggcatatgctacacccaccctgagaaacttccaggtgagagtgagagagctaaggtagctatagctcaaaacattgcaccccccgcattgttttgatacagatatattcctggctttttgcaaaactttatcgggttttttttgctttccatggagtgatatatattgtatgctgggattgtttcgccatgaattatgggtcgtggttttggattttgggatatggcatatattcccttgttgttcttgatgtgctctcccccctctctattcttattactagtgtttctctacatgtgctcttggccggtatatgcaaagagaattattgtttatggaaagttgtgcctagcctcatctcccactctctcctctctgtcatgatggtaagatgcttctgaagtttccaaataggtttctttcctctcttcctctttttcagagaggtttgttgcatctgtcaagaagcataggccacccactccacactatactcttggatctcacaaaactctctatactaccttgatcctgctaattattctgtttgtgctgatcgatcgatggagcaggtgtgacaagggacggcctgagcaagcacttcttccaccggccgtcgaaggcgtacacgacggggacgaggaagcggcggaagatccagacggagtgcgacgtgcagaagggggagacgaggtggcacaagaccggcaagacccggccggtgatggtgagcggccggcagaaggggtgcaagaagatactggtcctctacaccaacttcggcaagcaccgcaagccggagaagaccaactgggtgatgcaccagtaccacctcggcgacctcgaggaggagaaggaaggggagctcgtcgtctgcaagatcttctaccagacgcagcctcggcagtgcagctggtcctccgaccgcggcggcggcgccgccgccaccgcatccgccgtgacgacggcggcggtgcagcaggatcagcagcgcaggagggacagcggcagcggcagctgctcgtcgacgagggaccacgaggtgtcggcgacgtcctactcgacggccgggtacgccgtcgccgccgccgtcgagatgcagcatttgaagcatgccgccgaccatttcagcttcgcgcctttcaggaagagtttcgaggaggttggtataagtggtgatcaggtacactccaatcagcttgggaggtcggagcagcagcatgctggccaggaacaacagccgcaccggccgttgcttgcaaccacgacggcggtgcctgccacggccttcctgatcagccggccgacgaaccctgtatcaaatatagtgccaccagcaatgcagcatgcatctgtcgttcttgatcatgatcagttccacgtgccagcaatccttctccaccacgacaaatttcagcagcagcaacaaaagcttgacaggaggtctgccggcttggaggaactgataatgggctgcacgtcttcgagcacaaaaggagaagcttcaattcctcactcccaagagacagaatggccttaccagccatactggactcctgacaaccaggatcatcatggatagtagcaacaaggctggtaaatagtgaagatcaataccaaaagaaaactaaccacattctctttcaccttgtgtggtctctgtcttcttgaatatacaacattgctttcttgaagaatgtatgtactacggttgggagaagaaatagattaaagagatctgtatagatctgcctccatgaaaaaagggagatcaaattaactgtgcaaggacactccaagatagaagagacaaagttgttgaaagaaaaggaaagagaggacaaaaaaagtttgggct

SEQ ID NO: 15717 - DNA, 2141 bp, Oryza sativa
  ref <308>: DATABASE ACCESSION NUMBER: AK066232
  ref <309>: DATABASE ENTRY DATE: 2001-12-06
gctccccacctcgcgttccctcccctctcccctccggccatggcgtccaagcggatcctcaaggagctcaaggacctgcagaaggatcccccaacctcctgcagcgctggtaggtatcctcctcttcttcttcttcgctgtcccccaattccagggttcacgggcgattttgtttcttgtcgattcatcgacttcttagcgtgccggctgctggatagtggaatcctctgttgactctttagctttcgaaaaaattttgaaccaagggaaggggaggagggggaggtcatactgtgcagtgctgcaattttgtgtttgtttatggttttgctaccaatttcgtgcatattattatcccctgagcgggtgtggagctgcgttttgttataattctggagctgttaattgttcttctttcgcaaatttaacgcttattacggctggctggatagaaggatagagagctcaagcagagacgctggatagagggatatacggttttagaggttattgttcgttcaacctgcttagttaggagtataccttcgttgttttagtaatttgtggaagcatggggtagcatatctaggacatggataagtctcgttggcaatgataccaggccacaatcgttgtttacaactcaacaatttgtgtaactggaactaattcttgtgtaccgatgaaataataataccctcaatatgtgtgtgatgataattgttcttgtctacatgctagtgtaccccaaacaagacatgtggatgttgtagaattgttttgatatttctaactgaatgtgacaacttgtgtggcgaatattggtttcatgatatgttctgttcaaatgcattgcaacaattgagattggattggagtacctttgtatgactaacacgcgaaatacgcctaacaggccctgtgggagaagatatgttccactggcaagctacgattatgggtccagcagatagtccatatgcaggtggcgtcttcttggtttctattcacttccctccagactatccgttcaaaccgcccaaggtatacattccttccacttctttttgtgttgttcaggaaactgtttgtttttaggacttgtggaagtttattataagagcatcacttgcttcaattttatataatcttaaggcccttgagtaactgattacaagatatttgctgttagggctctgctctaagcattcatagctagggataaaatgtcctgttaatttcagtctcaaagtggagttctaactgatcctttacaaagcataatatacctgtaaatgttagttttgtaaaggtcctgattcactttggcaaatgtgcgttaccaattcaacaaactatgaaaatgcttgtttcttccaccaccataaaaaaaaatgcttcacttgagttcaacggtcactgtagctttgttctgataacaatcatttttcaggttgcatttaagacaaaggttttccacccaaacatcaacagtaacggaagcatctgccttgatatcctgaaggaacagtggagccctgcattgacagtgtcaaaggtgaattgatcctctccctctccaactaagtcaagaaaccctttgagacagcttgtgcatgtgcaaaagcttagcttctttgaagttgtcacatagaaactacttacttgagaagttaggcactttggcaccatagaaatgttaggaagttggagctctcatagtctctagggcttaacaaatgcccaacaccgtatatcacctgcgtgctaatctggttggagtaacttttgttttccagttgcacgaattatctaacgtttgacacaattttcaggtactcctctcaatttgttctctactgacggacccaaacccagacgacccgctagttccggagattgcgcacatgtacaagactgatcgggccaaatatgaatcaactgcgaggggctggacccagaaatatgcaatgggctgaacgacgtaggccgatagtgttctctagcgatatatgttatcttgttgatctagtgttcatgtcctgctacatgcctacatggggtgtaatttcttctgtcactgaatttatgtcaaattctcgattgatggtagaagttattgagaaaaatttcaattacct

SEQ ID NO: 15718 - DNA, 1835 bp, Oryza sativa
  ref <308>: DATABASE ACCESSION NUMBER: AK066233
  ref <309>: DATABASE ENTRY DATE: 2001-12-06
agtcgccctcgtagtactatttcgcttcgcctctcctctctacctccgtcgccgtccggttcctttctcttcctccaagtaaactcggtctccgccgcctcctccgccgccgcgccgccgattcgcagccatgccgaccgtaagcgtgaaatggcagaaggagaccttcccaggcatagagatagacaccagccagccgcctgttgtctttaagacccagctatacactctgactggtgtaccacctgaaaggcaaaaaattatggtgaagggtggaatattgaaggatgatgcagattggtctactttgggagtgaaagatggtcaaaaattgatgatgataggtacagctgatgagattgtgaaagctccagagaaaggaccagtatttgtagaggatctaccagaagaagagcaagtggttgcactgggacacagtgctggtctttataacttggggaatacatgttacatgaattccactttgcagtgcctgcattctgttccagagctgaagtcagctttattgagttattcagataatgtgaggggtaatggtgttgaccaagcctcccataatttgactgttgcaactcgtaatactttcggagagcttgatcaaagtgttcggcctgttgcacctctactcttcttacagacgctgcgtaaaaagtatccccagtttgcgcaacaacaaaataatgtttatatgcaacaggatgcagaagaatgctggacccaattggtgtatacactttctcaaactcttacatcagaaacaagtgaacctcctgctggtcaaatgaaggaactttttgggattgatctcgtgagcagggtccattgtgcagaaagtggtgaagagagtttagagagagaatcagtttattctttgaagtgtcatatatctcatgatgtaaaccaccttcatgaaggacttaagcatggtttgaagtcagaacttgagaaggcttcaccttcactgggtcgcactgctctttatacaagagagtcaagaataaatgagttgcctaggtacttgactgtgcagtttgttcgtttcttttggaaaagggaatcaaaccagaaggcaaagattttacggaaagttgattacccgctggaactggatgtttatgacttttgctcagatgaactgaaacaaaaactccaagctccccgacagatgctgagagatgcagaaaatgctaagtttggattaaaagcacaaggaaaggccagcagctcaaaagaaaatgagggttcatcaagcaatgctggggaatcatccagcatggatattgacaaagccgattcttctgtgccaaagaaacatttgactggcatctatgatttaattgctgttttgacgcacaaagggagaagtgcagactcaggccattatgttggctgggttaagcaagatgacgggaaatggattgaatttgatgatgacaaccctagcatacgcaaggaggaagagattttaaagttatctggtggaggcgactggcacatggcttacatttgcctgtacaaagctcgtgttatctgaattggaatgccagacaggctgatgagctgatttgtttacatttctcaagttgccagtagtttgcttgccttttgtaatgcatgagcgaacgtattattgatttttccagtttggttcaaactgagaagtaagcatgtgacttgcattggtgctggtgtttggtcggtggtcactgggactttagacgtgtaattttgagatgttgaactagaatattttacagtagtaaacaaatatatactgcaaagaaactgagcggaaaatataatttatttcatgg

SEQ ID NO: 15719 - DNA, 2506 bp, Oryza sativa
  ref <308>: DATABASE ACCESSION NUMBER: AK066234
  ref <309>: DATABASE ENTRY DATE: 2001-12-06
gatcttctcatcttcgcttaaaaacacaaacaaaacgaatttcacaaaaatcctcgagaaacatctcctcctcccccttctctctctcttcctcctccccccacatctcccgcgagatacgaaaccctagcgctcgcggcctgaatccgcagcagcaggcggggggcctcgccggatcaccgccgggcggcgggcggcgggcggcggcgggagatgagttccaggaagaagccgtcgaggatcgagccgttcaggcacaaggtggagacggacccgaggttcttcgagaaggcgtggaggaagctcgacgacgccatccgcgagatctacaaccacaacgccagcggcctctccttcgaggagctctacaggactgcttataatctggtacttcacaaacatgggccaaagctctatgacaaactgacagaaaacatggaagatcacctgcaagaaatgcgcgtatcgattgaggctgctcaaggtggtttgttcttggtagaactacagaggaaatgggatgaccataacaaggctttgcaaatgatcagagatatcctgatgtacatggacagggtttttattcccaccaataaaaagacacctgtatttgatcttggattggatctttggagagatactattgttcggtcacccaagatccatggaaggttgcttgacactcttcttgatctcatacatagagagagaacaggtgaggtgataaacagatccttgatgaggagtacaactaaaatgttgatggatctaggttcttctgtttatcaggatgattttgaaaggccattccttgaggtgtctgctagtttttatagtggtgagtcacaaaaattcatagagtgttgttcctgtggtgaatatcttaagaaggctcagcagcggcttgatgaagaagcggaacgtgtttcacagtacatggatgccaaaacagacgagaaaataactgctgttgtggtgaaggaaatgcttgcgaatcacatgcagaggttgattcttatggagaactcaggtcttgttaatatgcttgtggaggacaagtatgaagacctgaccatgatgtacagcttgtttcaacgtgttcccgatggtcactcgacaattaaatctgtgatgaattcacatgttaaagaaaccgggaaggatatggtaatggatcctgagaggctgaaggaccctgttgattttgtccagaggcttctaaatgagaggataagtatgacagtattgttaccacttcctttagcaatgacaagagtttccaaaatgctctgaattcctcctttgagcacttcattaacttaaacaatagatgccctgagttcatctcgctgtatgttgacgacaaactgcgtaaaggaatgaaagaggccaatgaggaggatgttgagactgtcctggacaaagtgatgatgctgtttaggtacttgcaagaaaaagatttgtttgagaaatactacaagcaacacttggcgaagcgccttctttctgggaaggctgcttctgatgattctgagagaagtatgcttgcgaagctcaagacagaatgtggatatcagttcacttcaaaattggagggcatgttcaatgatttgaagacctctcatgataccacacagcgattttacgctggtactcctgatttgggggatgcccctactatatctgtccagatactcaccactgggtcttggcccacacaaccatgtaacacctgcaaccttcctcctgagattcttggcgtgtccgagatgtttcggggtttctaccttggtacccacaatggcaggagactgacatggcaaacaaacatgggtactgcagacatcaaagcagtgtttggaaatggcagcaagcacgagctaaacgtgtcgacctaccagatgtgtgttctcatgttgttcaactcggcggactgtttgtcttaccgtgatatcgagcagactacagcgataccatccgcggacctgaagcgctgccttcagtctctcgcgcttgtgaagggcaagaacgttctgcgcaaggaacctatgagcagggacatctccgacgatgacaacttctacgtcaacgataagttcaccagcaagctgttcaaggtgaagatcggcacggtggcgacacagaaggagtctgagccagagaagatggagacccggcagagagtcgaggaggacaggaagcctcagatcgaggcggccatcgtgaggatcatgaagtcgaggagagtgctggatcacaacagcatagtgacagaggtgacgaagcagctgcagcctcgtttcatgccgaaccctgtggtgatcaagaagagagtcgagtctctgattgagcgcgagttcttggagagggacaagacagacaggaaactgtaccggtatcttgcataattactcttttttttttcttctggattctttaacctgaccataagtaaaccgtggtctatgtatacctgttatatcacgataatgcttttggttggatt

SEQ ID NO: 15720 - DNA, 1824 bp, Oryza sativa
  ref <308>: DATABASE ACCESSION NUMBER: AK066235
  ref <309>: DATABASE ENTRY DATE: 2001-12-06
ggctcctcctcctgcaagcttcctccctcctcgcggcgaggcgagccatggcggcgccgttccgttcgtctactgccgccccaccgacgccctctccccgcatctcctcttagctcgatcggcttgctagctcctcggccatgtgctctaatggcgatttctcggtttgttcgcaggtgagagcgctctcctggggcctgagggcggccttcgacgggaacctcggacgcctcaaaggttttataaagagccttgggattcagaaaggaaagacttagggttgcaagcgggtcaacccgtgaacccgcttataggcaaaattagtaggtaacccgtataaatgagtttatggatcgacccacttgcatctctaagtgcggcaaatcggaccacgacgtgaaaacacacgggttatcacttattttacatataagtaggtttgcgagttggcccgcttgcatccctagatgccgtcttagctcttaacaagcatgggattggggtgctgcacgccgcggcatgccagggccatctgaatgtttgcaagttcttggtggaggaattggggggtgacgtgaatattgctggaaaagaagatataacaccgtttatggccgctgctgagtctggtgatgttcctacggtggagtattttcttgatcatagtggtgatgtaacaaaagcagatgttagaggatgcacagttctccaccatgctgctggcacaggatgctgtaaggtaacagagttcttgctttcaaaaggaatacctgttgacatagactgtggccttggaacaccactctttcatgctgctaacaatggcaaggataagacactgaagattttgttggatcacaaggcagatgcattctaacgtaattgtcaataatggagccggtagtcccctgatgagttcccttatctaccgatcattgaagtgtatgaagctactcataaaggctggtgctgatgttaatggcaagggtacagttgtaacccctttgatgcttgctgcgtcgcaaggaggctatactaacttcattcagtttcttctgaaggctggagcaaaccctaatattcctgatgatttgggttggttgccaatagagcgctgcattacatgattgcagggaagaagttgaaatgctatttccattgacttcttcaattccaaatgtcccaaactggagtgtcaatggaatatcgctcatgcaaaagtcaaatacaaagccaatggatcaacatcagaaggagagtagaaaagtcgttttgaaggcacaggcagatttgctattcaagcagaagaattacggcgctgcagcaaaaatatatgatctggcttgctcacggaccgactgcagttttgtacgcaaacaggagcatctgtagattgctcatgggtgatgctgaaggtgctctatctgatgcttacaaatgctgaatgatgcggcctaactgggcaaaagctcgctatcgtcagggtgcagctcacatgctacccaaggaaagctagggaattgatggcgatacctccagatgcgcagtgaggcagaataactgcataatcgtccatcagtaaactataactagctggaacttcttttcttagcgatgcactattttgttggatatgtgatgaaatgtaaagaatgcacttcacggaactctcaccaatcggcagccagcgactgtcctctcgtagtctcgtactcacctctacgatggaaaaccaaccataaatccctgttatctatctgatactactcacaacccctgaacattgtatcagttccaggcaattatcagaacatcaggcttatg

SEQ ID NO: 15721 - DNA, 1039 bp, Oryza sativa
  ref <308>: DATABASE ACCESSION NUMBER: AK098953
  ref <309>: DATABASE ENTRY DATE: 2002-08-28
gggtgcgtgcgaatcattccggccgcagcctacctctgcctctctcctctcctcgcggcgtcggcagcgagttctcctcggatcgggagtggaggagaagcgggaggaggaggaggaggagggatgagtctcttcgggctcggccggaatcagaagacgttccgtcccaagaagagtgctccttcaggaagcaagggtgcacagcttcggaagcacatagatgccactcttggcagtggaaaccttagggaagctgtaaggttgccgcctggagaagatatcaatgaatggctggctgtgaatactgtggatttctttaaccaagttaacctgctgtacggcacactcgctgagttctgcacacctgagagctgcccaacaatgactgctggcccaaagtatgagtacagatgggctgatggtgtacagataaagaagccgatagaagtatcagcaccaaaatatgtggagtacctaatggactggattgaaggccaacttgatgatgaatctatatttccccaaaagcttggcacaccattcccgccaaacttcaaggaggttgtaaagacaattttcaagcgcttgtttcgtgtttatgcccacatatatcactcccattttcagaagattgtcagcctcaaggaggaggcccatcttaacacgtgcttcaagcacttcatcctgtttacaactgaatttggcctgattgacaagaaggagctggctccactccaggagctcatcgaatcgattattccatactgagaagaatacagggacggaacggagcgtggataacgagttctttacatggacgatcgaggaatcaggctacttgcaacactattttactggcatagagcttactgttccagatatcagacataaaaaaggacatttgacattgctaatgctatgttttttgtgtactgatgttcgttcgtcctgattcagtattaccttgtgtaagcgtgcttgtaatgtaataacaggattggtggattgggatatattgcaaagaacgatctattaatcc

SEQ ID NO: 15722 - DNA, 4559 bp, Oryza sativa
  ref <308>: DATABASE ACCESSION NUMBER: AK066236
  ref <309>: DATABASE ENTRY DATE: 2001-12-06
gctactatttccgcgtcgcgtcgtcggcccgtctccgtctccgtctccctccccccgcatccccgggcggaggaggccaccccaccgacaccgggctgtactacacggagatcgggatcgggacgccgaccaagcggtactacgtgcaggtggacaccggcagcgacatcctctgggtgaactgcatctcctgcgatcgatgcccacgcaagagcggcctcgggctagagctgacgctgtatgaccccaaggactcgtctactgggagcaaggtttcgtgcgatcaggggttctgcgccgccacctacgggggcttgctgcccgggtgcaccaccagcttgccctgtgagtacagcgtcacgtatggtgacggtagctccaccacagggtacttcgtgtccgacctcctgcagtttgatcaggtgtccggggatgggcagacacgacccgccaactccaccgtcacatttgggtgtggttctcagcaaggtggggatttaggcagttcaaaccaagcccttgatggaattatagggttcggtcaatcaaatacgtcaatgctatcacagttatctgctgcagggaaggtgaagaagatatttgctcattgtttggatactataaacggcggtggaattttcgctattggaaatgtggtgcaaccaaaagtcaaaacaacaccattggtgcccaatatgccacactacaatgtaaacctcaagtcaattgatgttggtggtactgcactaaagcttccgtcacatatgtttgatacaggcgaaaagaagggtaccataattgatagtggtacgaccttaacataccttccggagatagtttacaaggaaataatgcttgcggtatttgccaagcataaggatataaccttccataatgttcaagaattcctgtgtttccagtatgttgggaggtatactttacaacatactccatccgtttcgcaatagtggatgatgactttccaaagatcactttccattttgagaatgatcttcctttgaatgtgtatccacacgattacttcttcgaaaatggggtaatgtaacatctcactccagtgatttggtcacctattggtatttctttgccaacttagttgttacaacttatgacacctataaggttataacatgttaaactggaatatgaaatggattcagagcatttgggcagcttttccaggtatatttgcaattttgcacactatttaaagaggattaaatttggtttagtaccatctcaaccgctggtgagtcttaaaataccattgctaacatgaggggttttaaaatactataggtataaaattttggagggtggcattgccctaggctttgcagtccatggcaattgttaacatccaattaggacagagggatttcctgaaatgacgttatcactcctacatcctccttttcttcttctttgtaatttgtgtgatattgcacatgaccttaaaaagggggacatgtccatgcactacttacgtggtgaaagtggctatacatggttgaacccacatcttgctccctggtaaacaaaaaatgaaggtagattggccattttacacattttcaacggaaaatggactgtgctggtgttttccaaatctgttcactttacaatggtattctgtagccactcttgtttacgattgtattttgcaacttgcaacaactgtgaaggcgatgacaatgttgcagattttcatatccaaattaattttaaactgtaaacctgtacaaaaacatggttcccttgcatactagttgcattgctgtttgcatctctgttacctttttcccaattagtaatagtcattcccttgcatatgtttattttattttatttattatcccttcccttcttttccaattgttcatgtttaatattggcattctctgttctataagatgcattcagccattctctatgacagaaatatttggatcagggttaagggaacttctgaataaccccttcgaaaccctcatatttgattagcttatacaccaatattcttatgattgcctccagttcttaccctagactcagatattccaaataaaattctaagttatataaaatacaaaaaaagagggtaaaattgcctttgacatggtctcgctgagaagctggaactgaccatattccagttttcccccagaaccaagattgcaaaatgtggaattttttgtctgtctcacaaaaggaatttgtttagttatttgaacatttcatactacattttaaaatagaccctccaaggagttaatttcaaaactgaacaattttgccggccacgccatgggtagtgccatcctgcaacatgcttattgttaccacaacattgttggtgacatgggcaaaccattgccacaacaacacatggtacagttttgctgtgccaacactgatggcatgggcaaaaaaaaaggttctgttatggaaatgacttttctaaggaattatttttaaaacattaataagaaaaggttcaaaaaataaaagaaaatccctacagaaattgctatgggttaacagcatagtactatagcattgcaactgttctcatgggtggcttatacagttgtttgcttcaggataagatagtagttttcttgttagtgaagcattagtttccttggaaatgattaaaatgttaggccaaagcctttgtaacaaaggagcagtatattaatttagatcaagcaaaattcaataaatgaagaatctagtgctcttctcgttaatcaaagagccatatgtattgacagtataggaaagagttccttgctagcctgagcttttgggcttttactaatacacacattataatagaattgttaacacttgtcgcacataaatatttcaagagagttggttctcactcacttgaatggactgacctttggatgcatgtttcgccaggatctgaacctgcgttcaaaggcagatgcattttcaatcccacctgagtcagaaatgccaaaatatgtaacattctaatgactgctgtgtcttgaaaaattgcactaattgtgtcgtaggatgcataaatcagactctaaagctctgttgttttgtccctcttcccaactccattccctcgttttccacgcgcacgattcctacactgttaaacagcgtgtttttttttaaaaaatatattctttttagataatggaattaaaaatccggcctttgcttcaacgaacctacagccaattattacaatattctctcaaaaagagcaaacactcaagcaacaaaaataacttaaaaaaataaagccaacacataaggagtaaacaatttctataggaaagttgtttaaaaaaatcatattaatccatttttcaaaaaaagctaatacttaattaattatatgctaatgagtcgctccactttacgtgcgtgagttattagttcccatcctcatatgccgaacgtagcctaaggctgtgttctttcccctcctttccctacttaccccctcgttttctgcacgcatgcttcccaaaccgctaaatggtgtgttttttgcaaaatttttctatacgaaggttgcttttagaaaaatgtattaattcatttttcaaaaaaaaggactaatacttaattaatcatgcgctaatgagtcgctccattctgcatgtcggagggattagttcccatctccaaccaacaaacgcagcctaaacctgccacattcagtggttcaaagtctaattgttccaatcaacgatcatgatagttaatttgaatttaatggagtactatagtttgaaatgatactataccgttgcattcagtcttgtagtagttgttatgttctgtatataacatcataatatgcaggttcacagatatatgttcatgacacttagatttgtgattttttttttttttgtatttaagcaggataacttatattgtgttggattccaaaatggtggattacaatcaaaggatgggaagggtatggtgcttttgggagatctggtcctttcaaataagttagttgtctatgacctggaaaatcaagtcattggctggactgagtacaactgttcctctagcattaaaattaaggatgaacagacaggggcaacatacactgttgacgctcacaacatctcctcaggatggaggtttcattggcagaagcatttggctgtgttgctggtaacaatggtgtacagctatctaatattctaactccggtgtatgacacggactctagtggaaattcatttgatttaaattcttttcaccaaagagggaaaaagggtaggggtgtttagatggtgttctctgaccactcgagagaactgaaaaggaaacattgtacgctacacaatgtacccgagtgtgtagtgtaatgtaatgtaatgatgtggtgactggtgagaaaatactatggctgaatgtgcttttgggaggttctaggaatgatatcaggcccccatcttttgaatatactctgataatatgccgtacagcatattaagaaaaaaaataatttatattttttt

SEQ ID NO: 15723 - DNA, 2382 bp, Oryza sativa
  ref <308>: DATABASE ACCESSION NUMBER: AK066237
  ref <309>: DATABASE ENTRY DATE: 2001-12-06
gatgggcatatatatcaagagacataggttactctattgtaccgataaatatgtttgttaaccgttccaccaaagagtatccaatgcaataggagtagttgagatgctattgctgaagtatttatgctgcaacttagcttctgttttgtcggcacattagctgggtgttagtcaaagatgtagggtatatctcgaattaatacttttttagtcacgtttagtaccgaacgccatgaatcttttaagacttagccaattcgtcttccatctcctcagctttccaagttcttcgctttcctttgcaccattccgtattcaaagatccactgccctttctctttaactgacgggaagacacaaggaagccatcttgacagctctaagatcggacctgctggctgctgctgtgatttttggatggaccagatgtagggatctccaaagaagcaatcagccctcttgatttacgctgcctcttgccacggtgtgcactgtgcagttgcagagtagagcatggcattcagtcacctcctccacgccctcctcgtggccgcggcgttgccgctgctccttctcccccgtgctgcagatgctggcgagatcggggtgtgctacgggagggacgcgaacaacctgatcgacccaccggcggcggtgagccttctgaaggcgaacggcatctccgcggtgaggatcttcgacgcggaccagacggtgctggacgcgatggcgaacaccggcatcaaggtgatggtggcgatacccaacgccgatctggccgccgccggccaggatctgcgcagcgcgaccgactgggtgacgaacaacgtggtgccgtatcgcagccggggcacgctgatcaacggcgtcgccgtcgggaacgaggtgttcaggcagagacccgaactgaccgggatgctcgtttcggccatgcgaaacttgcacaaggcgctggagaacctgaacctggcgaacgacgtaaaggtgtccacgccgatcgccttcgatgcgctcaagcagtcgtcccctccatctgcgggggagtttaaagatgagatcgcgcaatcggtgatgaagcccatgattgacttcttgaaacagaccggctcgtacttcatggtcaatctctacccgtacttcgcatacgtggctcagcctgacaaaatctctctggagttcgcgacgttccgccctaacgctggtgtgcttgatggcaataccggcatcaggtacttcagcctctttgatgctcagctcgacgctgtttatgctgcgataaacagggtttctggtggtagcttaacggtctcaatggctcgacgagatggaatccttagtgtgcaagcttcagaatcagggcacccctctggaggtacatttcccctattttccatgctagctgcagccgatacggactcgatagccacgatagccgatgcccaagcgtacaacaatgggcttatcagacgtgtagtatccggagcctccggtatgcgtgacgtctccgcctacatcttctctcttttcaatgaaaacgagaagcctgggccagccatagagagaaactttggcttgttctacccaaatggtcagaaggtgtatgaggttgactttaggggcggtggcggtggcggagcttgccccacaaagacaagttggtgtgtggcaagaacagatgttgggagtgcagcattgcagtcagcattggactttgcgtgcggtaacggcgcggactgcagcgctatccggcagggcagtgtgtgtttcgaaccaaacaccttggttgcacacgcgtcgtacgcattcaacgactactaccaacgcaagggccaggccagcggcacttgcaacttctctggcgccgcttccatcgtattcaagccatcgccaagcatatgtgatccgaacccaagttggtgcgttgcgaaatcggaggtcggggacgcacaactacaaaatgcactagactatgcatgtggtagctgcgcggactgcagcgccattcaaccaggtgcacggtgctttgatcctgacactaaggtagcacacgcgacctatgcattcaacgatttttaccagaccaccggccgggctagtggatcgtgtgactttgccggtgctgcttctattgtcaaccagcaaccaaaaataggaaactgcgtgctcccaccaaacaatgctgggacagaacaaactgcaattgaagatcaatcgactgcaaacttaccagcaacagcttggcagtgaggatggattaaagaatcacttcatatttttctgcagagaaaaaaataatggtaccattaataattagttgggattgaagagacgaataaatgtaccgttcactcctgttgaatgaaaccctgctgttagtattcg

SEQ ID NO: 15724 - DNA, 1199 bp, Oryza sativa
  ref <308>: DATABASE ACCESSION NUMBER: AK066238
  ref <309>: DATABASE ENTRY DATE: 2001-12-06
gcgaagagagaggtgagagaggaggaggaggcggactcgccggagccggaggttgccggaggcggcggcggcggcggcatcgcgctcttctccttcgctgcttctccggggaaagaggcaaggttcatcaatggcaactccaaatacctattcagtccatatctcctcagaaacccacaggattgaggcctggttggcatctgatgaagctttagctaggcagttgcaagaggaggagaatgcacatgatgctattgctacaagagaatttgctggtaacgcatccttggaaccatcgtcaccagctgttgagtacagacctcccaataatgcagctcaggttgcaacggaagacaatgttgaccctgataatatgtcttacgagcaactacaagcattaggggaagcagtaggaaatcaatccagaggattatctgatgacctgatatgctatttggtgccttttaagaacaaatgcagcttcttctccaggaagaagaatgatgaggaatgtgtgatctgtaaatcgacttataaaagccgacagaaattgataagattgccctgcagccactgttaccatgcagattgcataactcgctggcttaagatcaataaggcatgcccagtctgcaatgaggaggtatttgggtgaatcacagcgcttgtggcaacgctggtgatgtttgcgttgtgttcagacacgttatgctcctacaccctatgctatacaccggtgctcaaggaaaatgcgttttggtatactcgtactactaactgaaccatgccatggcccatggctgtgatgtgtccatccaactgagttttatcacaaatagataaatctgtgtgtgtactagtactatggttgccatttttctggtaatgcaacctagcagaagcagctaaatagatactctatgtattgcgccatcttttacatgatctctgctgtggaaagaagcacaattgtgaatgttctacacccctactctgccatcttcagttaattcagcaatactgcatttgctctacagcttgtgtgtgtacagtgaacatggttctttcagccaaaacttttgttagcatatagtgatgttcttttcttttcctttcttattttgtaaggtagatgaagcagacatatcataaaccacagtcagaaactttccagcaaaaaggaaaaggcttatgttagt

SEQ ID NO: 15725 - DNA, 913 bp, Oryza sativa
  ref <308>: DATABASE ACCESSION NUMBER: AK066239
  ref <309>: DATABASE ENTRY DATE: 2001-12-06
gaacgacccgtagacgtacgtacgcgcggctcagccgtgtcctcttgtcaaactggttgggataagataaaggagcggagcccggcaaagccgagcggcagcagagagcacagctcggcaacaccatggcgccggcagcgctagccgctcccatcgcgtccatttcccccagctccgccgggagggtcaccgccggcgacgtcggcctgcgctctgtcaggatggccagctcacctgtagcccagcccattggcgaggcagttgtgttacggcccaaccagatgttcagatcagtgctgcgacagcggaggcgtctggtggtccgaagcagcagctcagatgaaaccaattccaccaccgaagagaagacgccattcggatacacgaggaaggacgtgctgctcatcggcgtcggcgtgacactcttaggctacggcctcaaatacgggctggagctggtcggagtcgatcccttgcaagcaggaaacgcgcgtccagctgatcatcgtgctcgggatgacggtggggtggatctcgacgtacatgttcagggtggccaacaagtacatgacctacgcccagcagctcagggactatgagaagcaagtcatggagaaacgattggagagcttgacagaggctgaactgcaagttctgctcgagcaagtagaggaagagaagcagcggctgactccagtgagggatcagggtgttaccttcactaggaaaacggaggatcaggcgaatgccagctagaacaccttgattctgtaattagctagctctcctgcactgttagatagcttgaattaagaactagcggtggatgtggatcgtacgtcatacgaatgaccagctaatgtcttccatgtttgtgcatcattctgaaataaaaatagttggtaattctgct

SEQ ID NO: 15726 - DNA, 2363 bp, Oryza sativa
  ref <308>: DATABASE ACCESSION NUMBER: AK066240
  ref <309>: DATABASE ENTRY DATE: 2001-12-06
gtttgaggaaaaaaacaattttaaaaaagtattttgccatgcgattttatcgttcggagatgatggattagttcctttttccctttcttggcatgatagttcttgtggatttttaggttggagcttttgctcgggcgattgattttggaatcggaggaggggatgtcaggaccactcgatcgatttgccaggccatgttttgaaggttttacgcataatgatgaaaagaaagagatcagatctgacgcagacaactccgaaggagagaagaagactaaaattggttctttcaagaaaaaggcgattaatgccgggaacaaattcaggcattccctgaggagaagaagcaaaaagaaaaatgaacctcggggttccattgaggacataagggatgttcaagatcttcaagctgttgatgcatttcgacaatgtttagttgatgaggacctgttgccgcaacagcatgatgattatcacacaatgcttaggttcctcaaagcacggaaatttgatgttgagaaagcaaagagtatgtggtcagatatgcttaaatggagaaaggaatttggggctgacaatatagaggagtttgactacaccgaggcggatgaggttatgaaatattatccacaattttaccatggagtggataaagaaggaaggcctatctacatagagttaataggaaaagttgatgcgaataagctaatgcaagtaactactatagagcgatatgtgaaatatcatgtgaaggagtttgagagatgcttccaaatgagatttcctgcctgctcgattgctgcaaaaaggcccatagattcatctactactattctggacgtgcaaggcgtgggtttaaagaacttctcaaaagctgcaagggatctaatcacacgactgcagaagatcgacaatgacaactacccagagacgttgcgccgcatgtatattattaatgccggccaaggcttcaagatgttatggagcactgtaaaatctttcctagatcctaaaactgcttcaaagattcatgttctaggaagcaagtaccaaaataagttacttgaaataattgatgagaatgaattgccagagttttttggtggaaaatgcaagtgcgaggcatttggaggttgcaaaaaatcagataaaggtccttggaaggatcctaacataataaagagggtcctgaatggcgaagcaaattatgggaggcaaattgtgaccatatcaagcactgatggaaaaataattcgttatgctgggccacaatacccaacaagaaaaggaagtgatggctcagcggagtctgggtctgaagtggaagatggcgcgtcacctatggcatcaaggaacctgataacaaatccccttttgacccctgttcatgaggagtcaaaattggcagcacatggatttacatctgcttccccttccattattgaagaaagcattcctgttgttgacaaggttgtggatgatggatggggcagtcctagagctagttcatcaccctcgagaagtttgcctatcacatttgatggcctctggacacaagttatcacatggctgactgtcttgatcgtgagcctttttgctatggttcgctctgtcccaagcaggatggctaaaagattctcaagccaatccactgaccatgatcactcctatgtggagtatcctcaagaagcagagtacaaggaagaattccggccaccgtctcctgctccgtcttatactgaaaaggatgtcctctcatctatggtaagacgactaggcgagttggaggagaaggtgcaggcgctcgaaacgaagccatccgagatgccatttgaaaaggaggaattgctgaatgcagccgtccgccgtgtggatgcattagaagccgagttaatctctacaaagaaggctctctatgaagccctgatgcggcaggacgagctgcttgcgtacattgacaagcaagatatgatcaagtttcgtaaaaagaaattctgcttctagcagctcaacgacgagttaattctccatacacagagctgttcgtgtatatttggatcaattaatcaccacgaatatgaatgaatgcagctagtttggagtgtaaaattaaaagtgtgcatatggcaaattgagaatccaacaataacaccacggtatcggtatgtgagttacaaggtggaccttgaggtgttgttggctggtcattcagaatccagacgatgcatcgtcttgtgctggagggtcctggctgctgtaaattaagcctgtaattaatcttgtgacttgtaacatatatagcacaaatgtgagttaaaatcgttgtaaatggacttcaccttggaatcatgcatcttctcatc

SEQ ID NO: 15727 - DNA, 1051 bp, Oryza sativa
  ref <308>: DATABASE ACCESSION NUMBER: AK066241
  ref <309>: DATABASE ENTRY DATE: 2001-12-06
gatttttgctcgatccaaaacccaccatatcatccgactgctaacgggcggcggtagctatagcaaccgcacccgatccaaagtcttgttagttcttccctagctagctatttaagctggtatatgcgattccatttgggagcaattctgcgcggcgatgagggcccaacgaccgtcgtcggcagctgctggcaatccggtgcttgctcttctgtttctatgggtccttggctggggacatgtaacggcggaaattgatatcgccaacatgacggcgctacataaacatgtttcgttcttcgaccggaacaaggatggcattattactccgtcggagaccattgaagggattgttgcaatcggttgtgactatgcatttgctagagactttgccgcccctgtgcatgctggtcttggtcctaaaacaagccccaaggacgcaccattacctcacttgtcgatatacataaagaacatctataaaggaatgcacgggagtgacacaggtgcactagatgctaaaggaaggtttgttcctgcaaagtttgaggaaattttctcgaaacacgcaaaaaatagaccagatgcattaacatccttggaggtcaaagagatgattctagcaaatcgagatccagatgacccacaatcatgggctgcacctatacaggagtgggggctaatttatggtcttgcaagtgataagaacggatattttcacaaggatagtgtgagaggtatatatgatggtagtgtgttcgtcaagttggaggaagagagggcatcttcacaaagtacagtttgccggagcctatcatttaggagtactgtataaagtaattgggaaatgaagttatcccaaatacattgtattgcatcataggtattgttcgtgtacttacaaaatgccatatttggagaagcactggtgtatggtagtggagttatagttgcatgactttaatcattatgatttaaatcttggtttatatgaatattatgtatatacggatgcactcttaataagatttgagaaaacctattttatatc

SEQ ID NO: 15728 - DNA, 1858 bp, Oryza sativa
  ref <308>: DATABASE ACCESSION NUMBER: AK066242
  ref <309>: DATABASE ENTRY DATE: 2001-12-06
gcttctcctcctcccctctccctccgctccggcggagcgccgcgaaacgcccgccgcaaccgagcccaccgtcgaggcgatcggcggcggaggcgagggccgccgccttccgtcgcaggggtcaccttcttcgtcctcccccggtctccccctgggaagctgcccgccatgttccgaccaccgggtgctttcggggtcgcacccccgccgccgccgccgcagcagcagcagcatcagccatggcagtggcagccgcctttccagccgccggccgctacatccttttggcagcgggacaatgtgcgggagcatgtggggaggctgcaggaaaccatcgaattagccactgcagtgataaatgagctcgaggaaattgcgcaggctagaaactcggtcgatgctagcacgcaaggacctgactcgtcttcagcaaaattgtcatcagagcctgatggttcttctgcagataggccccggcatttcgttgagcttgctagagctatgaagattagtcaagacactcatgagtctctggccacagatgctgctaattatctttgttctcagattcagaaccttcttgcacctatttatcctgctgtgaaccaagggggtccttgggaagagaggtatgcaatgattaggttagctcagaagctgcagaaatccaagagaaataagcgatggagaaagagaaaaagaaagcatgttgcagagcttttccagaaggagcatgcagattatgacagaattgatcaggaagctgatgaatggagggctaggcaaatagccaaggacatggcgcagcgcaaggtggaaaacatgaagcagattgccaagaaaaaagaaaatgaggaaagaaagcgtctagaatctgagcttgagcttgccctaatggtcgagaaactacaggagcttcgctctatgagagttcaaaaaatgaagaaacaaggtcattttctgccagaagaagatgataaatatcttgagcgtgttaaggctgcagttgaggaagaggagcgccaagctgcaagtgctgctcggactgatgctgccaaggatgctattctgaccgcggaagagtcgaggaaggctgtgcagtgttcaaattcaagagaagatgattctgatcaagccaaaagtgcaccaacactggaacaaaaccagagagatccaggaataagcggcagaaatcatcatgcaagccaaaaaacagagcatgaacttcataaagatgacagcaaagggcatgggcgttatgattctgtttccagtctgccttttgagttctaccattattatcatggaagcagctacgacatgggaacactcattgaggtccgcaggatgtgggattcctttattagagctggaggaagccgaatacctgggcactgggttcagccaccccctccagctgatgaagtatgggcatcctatttagtgcagcccaactgtccaagtaactccacttagctgtaatgaatttaatcttcttctgcctaaccactggaagttttcaaggttatcacaagctgcattttgggactattggttaggacttcagcttttcccctatgatgagccatatagatggccccgagaaaaagatggccaacgaaaaaatcgtggacaccattaggagaaaacaagaggttagtgaattggatggcattagcacccagtactatatatctctataatagagtaataaggacacggcataatgcctgctgcctttcttgttgtgcttgcttgctcctcccattttcttatctctttgaggtgattagtgattacacagaccaacaactgaatcctaaagctcgtaatgacaaatttgatgatacttgcaatt

SEQ ID NO: 15729 - DNA, 1798 bp, Oryza sativa
  ref <308>: DATABASE ACCESSION NUMBER: AK066243
  ref <309>: DATABASE ENTRY DATE: 2001-12-06
gtgtggtagcacgcaagccactttctccgagatcgccgcgatgacgacgacgacgacgacgagcgccatcggctccctcctcgtgctcctgcttgtggtggtggtgggaggggtgtgctccgcctccgtgggcggcggcggcggcggaggggaggcgtggcgggcggagcaggagcgggaccgggtggcgcgggtgcccgggcaggacttcgacgccgggttcgcgcagtacgccgggtacgtcgccgtcagcgaggagcgcggcgcctcgctcttctactggttcttcgaggccgccgacgacccggcgtccaagcccctcgtgctctggctcaacggagggccaggttgctcatcaattgcatatggcgttgcggaagaagtgggaccttttcatgttaatgcagatggacagggtgtacatctgaatccctattcgtggaaccaagtggcaaatatcttgttccttgattcaccagttggtgttggttattcgtactcaaacgcctctgatgatatattaaataatggggatgccaggactgccaatgattctttgacgttcttaacaaagtggattgaacgatttcctcagtataaggggcgtgagttctacgtgacaggagagagttatgctggccactatgttcctcaattagcacaagctatagagaggcaccatgaagccactggagacaaatcgatcaatctaaagggctatatggcaggaaatgctctgttcgatgatttccacgatcaccttggcatatttcaattcatgtggaccaatggcttgatttctgatcaaacatacaggctactgaatgttttctgtgactacgagtcctttgtgcatacatcttcacagtgtaataagattcttgacattgctagtgacgaagctgggaatatcgattcgtatagcatcttcacacctacttgccatgcatcttttgcctcctcaaggaacaaagtcatgaaaaggttacattctgttgggaaaatgggagagcggtatgatccatgcactgaaaagcattcaactgtatacttcaatctggctgaggtgcaaaaggcacttcatgttagtccgatcatcaacaaatctaaatgggaaacctgcagtgatgttgttaacactaactggaaggactgcgaaagatctgtgctgcatatctatcatgaacttatacagtatggtcttcgtatatgggtgttcagtggagatacagatgcagtgcttccagtaacatcaactagatacagcatcaatgccctcaaacttccaacggtaaccccttggaatgcttggtatgacgatgatggtgaggttggtggctggactcaagggtacaagggactcaacttcgtgactgtgaggggcgcaggtcatgaggttcctctgcataggcccaaacaggctctaattctcatcaaatcattcttggctgggagcccaatgcccagtgttcaagatttttacagtgatgtgtaacatattttggctacaattatatattaccaagatcacaaaaggtaactcagacggggttgctagtatcacatggaactcgtaccatatattggtaacaattcttccctaaataaaatagggaacaaaatcatgaaatagttttcgtgccacgaatcgacactgtctgttgatattgatatgaacctaagacaaaagtattaatcaagggtgaacgttcacattgttgtcgtacaggatgtgtataacattgttgtgtataacaaaactattaatcaagggtgaatgttcacattgttgtcgact

SEQ ID NO: 15730 - DNA, 1138 bp, Oryza sativa
  ref <308>: DATABASE ACCESSION NUMBER: AK066244
  ref <309>: DATABASE ENTRY DATE: 2001-12-06
gcccgaaacttctggaaccgagagcagcagacgttagctcttctcctccgatggcggacaaggagcccgtcgtggaccgccccgaggacgaggaggaggcctccgccgccgccgccgccgcgggcggcgaggaggaggacacgggcgcccaggtcgcccccatcgtgcggctcgaggaggtcgccgtcaccaccggcgaggaggacgaggacgtgctcctcgacatgaaggcgaagctttaccggtttgacaagtaggggaaccagtggaaggagcgggggacgggcaccgtcaagctcctcaagcacaaggagaacggcaaggtccgcctcgtcatgcgccaggccaagacgctcaagatctgcgcgaaccacctagttgcttcgaccacgaagatgcaggagcatgcgggcagtgacaagtcgtgcgtctggcacgcggcggacttcgccgacggcgagcttaaggaggagatgttcgcaatccggtttggctctgtcgaaaattgcaagaaatttaaggatttggttgaagagatttcggaatcacttgcaaagacagaaggcaaagaaaccgaggaagattcgtctgccgctggccttctggagaaactcagcgtaactgaaaagaagtctgaggaagtggcgacaaaggaggaatcgaccgaagcagtcaaggagactgacaccaaatcagctgccacctcagagtaatcagcagtgtgttacctccagaacactagtgctcggtgggaagggtaagtttgtcagtgcttcccgtctatggaagttaaaagtcgttagccatgagctatgttgagaacatttgggcagagtcggaagatgtcagggtcatctttacctattgggcgttcacttgttattatttatttgtttgtgtatggtttctgcttagagtcgcaggttggcttttggatcaggtctgttcggatctcgcttttatcgagaacacgaaatgtagtccatgagtaggacgagttggaacgttttgggtccgagttacgagtatcttgacagcaagatgtttatggatgcgtgctattcatataaattacatgataccatgttcaactctaatccagttgctatgggaaagacgatatttcatttctatgtcc

SEQ ID NO: 15731 - DNA, 2539 bp, Oryza sativa
  ref <308>: DATABASE ACCESSION NUMBER: AK066245
  ref <309>: DATABASE ENTRY DATE: 2001-12-06
gagtgtgaacgcggcaaggaggaagagaggacgagatgggcggcggcggcggcgacgagcgcgagaaggccaagggcggcggcggcggaggaggaggaggaggtggaggaggagagtacgggacgttccagggcccgcccagctacccgcccccgcgcccgccggtcgtcgggtacccgcagcccgcgccgccgccggggctctacggccagggcgatccatactaccgcccccgcggcgggtaccagggcattcccggtaatgttctggcctgcctggtttgggggatcacgagggatgcgggttaggttaggtctggactggatcactggaatttcggtggtgcgtgatcgggctcaaatcgtggaggggttctgcttgatctgaaccatctagaaccggttgatgagtgattggtcgaaattgaggtgaattggaggattagagggcgttttcttacagatctttggcatgatcacgcgatccgggatctatctgcttgaaatttaccgtgctttgtggaattgaagtttttatttactgccattatgcaatttttttcgtgttgttggtccaagatatgcaaaatcttaggtggtctgcttgaaacttacgtgatgtccagttgtaggcgagtagtgtgctcctgttgtttaaaactcattgctccattactccataaacctgggcagctagtgtagtgactactggggtggtgcttaatggcaaaattaacacctctttagtaccttagtttgattggagttttgtatgtaatcgacggtgaaatattttggcacatggagttcgatttttctgacataaaaagcagtcctttacagaattgagttagtccagtctttatgtatttattatattccaaattaactagtacttattcagataagttttgttacaaaattaccagtacattgtaacctcgttgctcttctttcagctcgagattatgaagcaggtgctcgtggacatggtcatgaccgccttccttgctgtgggattggcattggctggtttttgtaagcgagcattgctttgttcttctatttcttattgtagcaacatcatctttgaaatctggaaaaagtaccccaaaagttttaggtgcatcatgccatttcttgaactgtacctgcttatcctcatgacaaacccttgttttttagattcatagtcggtttcttcctcggtgctattccttggtatgtcggagcattcctactgtggtgttctagagtggactacagggagaaaccaggatatgtagcatgcgctatagcggtaagtaacataatttattcttgagttcatccgatactataacattatttgttttgattcttactgcagtgcattgtaccatttctgctgcctattccatctgttctttttcggtgtgtgtgatcaaacagatcagtactagtcatttacaaggaatacataattccatttgtcatacttgtgtgttgaaacttgaaaatatatttctcatgacatgctgatgtaaatattagttcacctcaggattgtacatgaagtttgtgcgcgcttgttttgggttcctcgtatagctgtttacatgaataatcttcatgaaacaaaaacgaatggtcaagcgcatcggctatttgtccatcttgctcttgtaaggcgtgaagtttggtttctaaaaacaaagcaactatcagactttgttgtgcaaatactgaataatgcatcaggagcaagtagggaactaggaattggactgatgactttatagatgttagcctcagcattccagcaaaaaaagtactgcaaaaataggttacaggtacaataatgaacttgttgtgtctgatctttttttcaatgtttttttcaatgttggttcagaaaaaaacaatagagttaacttcgttcaatcatatacagtgcataccttaggttactgtttttcatgtttgaagcatctctgctcttcaccagttgcacgcttgcttgagccaataccattataatccacacgagttttggacatgtatgtagccagagcatatatatacatgaaggatcaagtccagagaacattgtcgtactttaacataattcgttcattgatgcatattctcttggtaacaccaacagctaatgtaatgataagtggaaatggctttgatgaaattctagattgatcagttatctagtttcagtcgtaccttgtattttttaaaaaaattccagtcactctaatggcatttttatgatgtaacaggctgtccttgccaccattgctataataatcggagctaccgctggagctgcttaattacattttacattgtgtcgttattgtacatactgtatatctcatggatgcacaaacatttagtatgtcgtctgcgatgtaccttattcagcttttcttttccgtttgattttttaatgtttaacaaggagaacggatgcccttgttcatggtcataaataaatcaggttgagacgatttcgccttttgaatacctacatctaatgtgacagg

SEQ ID NO: 15732 - DNA, 3228 bp, Oryza sativa
  ref <308>: DATABASE ACCESSION NUMBER: AK066246
  ref <309>: DATABASE ENTRY DATE: 2001-12-06
gtgacgctttcctctccctcagccagccgcgccaccgactccccaacgccgctccccgtccatcgccactagccgcatctcccatcgccccgcgccgccgcctcaccatcgtcgccgctcctcccgcatcccatatcatctcccgcgtcgctcccttccctctccaacgccaccgccggactaccctccacgacgcccagccgcacgccacctgttcgccgtcgtgtgccgcactccgacctcccctcctctccccgcttgccggtttcctccgcgcctcccccgatctcctccgccagaactgctcccggactcggcgaggtcctcgtcgcctgccttggctgcctcctccacgctgcccccgatctacaccgcaaccatcggtccgccatggcgccaggtcccagctcggatccccatcgcgcccgtccgctccagccgtcaccaactatatctggcagcggtaaaggagcagtggacgcagcatcttcggtcccctctacctccgttgcccgcgtgccctatcatctcgcggcgaaaaaggagtagtccacgcggtgtcttctgacggtaatcgacgacctcgaggttggttcctgaacaggttcatctcgcacctctcctttttcttgaaattactgattttgcctaaagtactcaagtgtgatgagtataacagaaattttgggtatatgtatgctaggattcatgtggtgcaatagcacacatttgatgcttaataatatggatttaacacactctccattcagttatgttggcctttttctcccgagtgcaacggaggttataaaatactgtcgcacaaacctattgtgtgttcgcgtaaatatccttatctcttgctctatcgtcttagggatcgaactcctggttctgccttccaaggaggaaagaagcaaattttagacatttcacaattggattgtttacatgtgacgtattatttttattcaaattatgagtttctatgtgaaattactcgtctgaaaattgttgtggattttacatctttctatccctcccgaatgctaatattagctgatttgtgtcctgactcatttcaatggcttgcagatatactaaaaggaaaataaaggtgatgtaactgtaactagcaccttcagggccattaggtcggatacaaaaattggtggagactggagacgttctgcaactaaatcaaactctactttttttttctgaatatcagctaacaacatttctaatttctgatggagtagatttgttgtctagtcaaattgaaaggggaaaaacttttatatcaaatcactgccggcatatcaaatttactgatatacatctctgccatcttatcagattttgacggctattatttatcttcatgcttgaattattatttatcttcatgcttgaattcttacagtcattttgaaattagattgggcgtggaacttcctgctactactgctgttttaattatctttactggcagtacagttattatcatggaataatctgttttaataatcttattttagatcagtatgcaaatccatgtaactttactcgatttcacccattaacataccaatcatttcccagacctgcagattgacaacttattaattactgttagtagctttgaaaaataacccttagataaaaattaaacatgtagattgaagtatttttatttttatttaacgatgcactgaactttttactgcataataggctgcgttggcgtggagatgcacatgcaagttgatagctgatagcaatgagtaaatcgaatagctgctcagttcctcctctgcattctaacatgctgagcaaccggcgttgaggacctccttggcacccgagaagaggttgttggtctggagcggtactgaaggcaggcaatatttcctaaacacttcaaaatggatagaggaattcagaactgaggggcagtgatttctataattgtgctgattaggaacaaaactgatcgtgttgacaagaggtgagtggttcagaagttttcttgttttctgtagccttttcatgttgtcttgcttatctgatggattttgctcactgaaactgggactcactgaattgaaggcaaattacatagctcttgcttatggtcttctgtgttggagcacatcttccatgggtttgtggatgtgctcatcctgctcaaggttgactatagttttggtcagtaaagcggatgcagttagttattgagttagaacagacttacatgtaatagtcaagttaatcagtgcattgcttgcagtttcaatgcttacaccacaattttattccctgcaattactttcacattttaagctttgttttcttctctactcccaaccactgaactcgtttttttaatgaaaactcaacttgctttttgcaagttctctttgttttttttgcaattggaaaaccgtcacatgttcaacacaaaactatcacttataagaactgtaacaagctgatggatgaactttgataggttcctttacgaaatttataaatgcatcttacaaatctgaatgcttggagttatatgagatgatggatgagtattgcagggtaaagattatgtcacctttgataattaaatttaatgtacaatgatttttgcgcatgtatactacattttgtttgattaactggtaccttttatatattttgcccttacgatttgttcgttgtttactatttcagattggacggaggcatataacctcttcaaagaaccaaggtatcaaggatcttcctgtcaatgtaaaataaaaaaataaacaatctctgttggtaggtaatactacaatgttgagataatactccatctcagtggccgatgacaatgcagaggaatagtttctagagccaaagggtgaacatcaaggtttaatacttcaaggtttaagttgcaacttacgcactactgcaccaacctacttgtgccgtttagacatcattttttatagtgctgtagatgttagattattgtcacagagccaattaaaatttttaaaatttgtttacctcctttgtgcttcaagatttgtgaatatgctttctcctatatctatgagactgtgcaaacgcatcctgaagatttagcagacaatgtgtttcactgctggtcaaaggtatttatgtattgtatcaaacatgtctacgtttgacctatttattatatatatcagattcagattg

SEQ ID NO: 15733 - DNA, 1305 bp, Oryza sativa
  ref <308>: DATABASE ACCESSION NUMBER: AK066247
  ref <309>: DATABASE ENTRY DATE: 2001-12-06
gaactgagttttgcatcgtttgccaatggacgaaaccctagccgacgaatccgccgccggcggcggcgaggcagccgcggcggagccagcgcaggaatcgcagcaagagacgctcgaggaggtgctctcgaggcataggaaagagaaatccaaactccaggataaggaaacaagcctcaagaaagcagccgctaaaggcagcaaagctgagcagaaggccaagaagaagcaggtagaggaggagatttcacgcctctcagctgagttagaggcgaaacatgccgcagagctcgctacttttgggtacaaatcctcaggcagctcagaaaaggggaacatggacaccttagtaaaggctatagctggtgtttctgtgaccagcaacgcggattccgcgaagcctagcaagggtgcacggcgtcgagagaagaaggcaaaggaagaggccgctagagagcagcggattcaagaagagcaaaacaatcttgtcagtgaccgcatgatagaaaatgaaaagcttgagaagaagcttgagcccatgggactgaccattcaggagataaagccagatggccactgcctgtaccgtgctgttgagaaccagctgtcactctattccagagaaaccacacaatacaattaccaggagctgcggcaaatgactgccaattatatgaaagagcatgcggcagattttctcccatttttcctatcagagggcaaggtcgagtctggaccagatcccttggagagcttcaagaggtactgtgaggaggttgagtcaactgctgcttggggtgggcaacttgagcttggtgctctaacccactgcctgaagaagcgcattgttgtatactcgggctcatttccagatgtggaaatgggcaaagaatacaaattggattcaggtggtaaagatggccctagcattaggttgtcctatcacagacatgcctatggtcttggtgagcactacaactcggtggttcctgcttagttatctaaaaggggaaaaaaagaaatttaacagtcttggtctcagtatgatatgttttccagtcatccagtgataaccgtctcttaacacaatggatgacttgcttacagctgctgttgtgtttccatcttctcgtcaatcaatgatggtcgagtccttgagtgtaccaaagttttacctgggaatttacttcccaaacagttttgcttgtaaaactgaagtatgtctcattatcttagtttcctgttgaggctgttttaccacctactaatttcatcgagctataatttgttactgcaattctctgc

SEQ ID NO: 15734 - DNA, 2302 bp, Oryza sativa
  ref <308>: DATABASE ACCESSION NUMBER: AK066248
  ref <309>: DATABASE ENTRY DATE: 2001-12-06
tttccacgtcgacgctgtcgtcgtccctgggcggcggctcggcggactcgaccggtgtggcggcggtttcggagagcagcaccgccgccgccggagccaccaaatggggagccccaggcgagcatggtggcggcgggaaggaggagtggggcggcgggtgcgagttgcccccgatacctggagcactggatgtggggctcgtcgggggcgagggctgggacgccacggccacgctcggcaacgcagccgggccggaccagtcgttcttgaactggatcattggggccgcttattgacaatgcggggttcgggatcccggccgtggacaccatgggcttctctctggatcaccccctcagcggcgtcgcctccgacctctcgtcctccggtgcgcacactgccaccggcggtggcggcaaggcctcattagggttcggtctcttctcgccggaggccacctccctcgagcagccgccgccttcgatgctgtttcacgaaggtatcgacacgaagccccctcttctgggtgcgcagccgcaatttctcctgaaccactaccaaccccagccacccaaccccgccgcagccttgttcatgcctctcccgcccttccccgagcacaatcaccagtcgccgcatctccagccaccgctcaaacgccaccacgccattccagatgacctctacctcgcccgtaaccagcagcagtcatccgcggtggcgccaggtctcgcctattcaccaccgctacatggcccggctccgttccagctccatccttcgccgccaccgattcgcggggcaatgaagtcgacggcgtcggaggcggcgcagcagcagctgctggacgagttggcagcggcggcaaaggcaaccgaggctggcatttccgttggcgcgcgagagatattggcgcggctcaatcaacagcttccccaacttgggaagcccttcctccgctccgcctcctacctcaaggaggccctcctcctcgcactcgccgacagccaccatggctcctccggcgtcacctcgccgctcgacgatgccctcaagcttgcagcatacaagtctttctctgacctgtcacctgtgctccagttcactaactttaccgcaacacaggcgcttcttgatgagattggtggcatggcaacttcctgcatccatgtcattgactttgatctcggtgttggtggtcagtgggcttccttcttgcaggagcttgcccaccgccggggagctggaggtatggccttgccgttgttgaagctcacggctttcatgtcgactgcttctcaccatccactggagctgcaccttacccaggataacctctctcagtttgccgcagagctcagaattcctttcgaattcaatgccgtcagtcttgatgcattcaatcctgcggaactcatttcttcctctggtgatgaagttgttgctgttagcctccctgttggctgctctgctcgtgcaccaccgctgccagcgattcttcggttggtgaaacagctttgtcctaaggttgtcgtggctattgatcatggaggtgatcgtgcagaccttccattctcgcagcatttcctgaattgtttccagtcctgtgtgttcctccttgactcgcttgatgctgctggtattgatgctgattctgcctgcaagatcgagaggttcctaattcaaccaagagttgaggatgcagtgattgggcggcacaaggcgcagaaagctatagcatggaggagcgtttttgcagcaactgggtttaagcccgttcagctcagcaacctcgccgaggcacaggcagactgcctcctgaagcgggtgcaggtccgaggattccatgtggagaaacgcggagctgctcttacgctctactggcagcgtggggagcttgtatccatatcatcttggcggtgctgatcagccataagcttcactccaccaaggttccaccaccgtttgcaagcatcgaccactccagtaatgtccatttattcttgcaattaaatgttgcaaatgaaattgttgtcttgagctgttgaactcttcatattgcttttcgttgcagcttattagctagcctagtggatttaggaatattggtgtcagtctctatagctaatgatgttgctttaggttgttgccatgctctgctcaattagccatgatcatctcattggaaacactgcttatgagtagagactagagggtaatttaacctatcaaatggttgtgtggtacagaattaatattatactgctgttgctctgtaattctttgggtacgttagttctgc

SEQ ID NO: 15735 - DNA, 3495 bp, Oryza sativa
  ref <308>: DATABASE ACCESSION NUMBER: AK066249
  ref <309>: DATABASE ENTRY DATE: 2001-12-06
gaattaacctcctcctcttcttcttcttccgctctctagctttgctttgcttgcttcatcaaaccccacacacgcacacaacaacaacaagagtaatcaaagtagaagaagatggtttcggccttgttgcggacgatcctggtgacgggcggcgccggctacatcggcagccacaccgtcctccagcttctccaactcggcttccgcgttgtcgtcctcgacaacctcgacaacgcctccgagctcgccatcctccgcgtcagggaactcgccggacacaacgccaacaacctcgacttccgcaaggtcttccttccttccttccttccttacttaattctctctctctctctctctacattagattctgattttgcggttccttttattaatttaacaaaacaaaacaaccattcccatctcgataagcggcgcgcggcgatatatcataacttgtctttttgattagattgaaatgaaatcaattggattggattaatcatctcatctagtcaacatattactagttacttatatctgtattcgggcgacacaaatccaaatagtaactactcctcttcctccttagtaatggaaagttagagttcctacaaatatttttgtttgaattggagttgtagtcgttcgttttcatggggaggcggtcaattgaattgaattgaattgagttggtggagtagtagtggaaatgggaaaaaaaaacccaaggagggagggagggaggcgttggaaggcgccggacgcgttgttcccgcccccctgcttcatttctgttttgatttttcatggccaagcacacaacgcatgcaccacccaccccacatacgttccttctactttctttccacccatatataaaaagatcctttacaatccacatctcaatctcaaatataaataggattattaatactaataagctcattcccctggtgcattgcatactcataaaatttcttgcttaaaggactcaaaatctatcttagactaatataacatataaattattatgcaggttgacctccgcgacaagcaagcgttggaccaaatcttctcctctcaaaggttggttagtcttccttgctccttcaatttgcacttaagtacctacctttaatttgttttcatttttggttagcagcgtgacaccgtaaatttcagcataatatatatacaaactatagctattaaactatttcagcataatttcatcggtcggtcggtcggtcggtcgtttattccatgaatcaaatcaaatcgatcattgtcaaaataattactcctcatcatgtattacaagtattctggacctagctagctgctcagccagcctgccaggtcaagaatctggtgcttggccagtttaatttgcagccgtctatcacgcacggtagctgtcacgctcatagtaccaaccaacgaaccgaaccttccttgtggaattaatgcattactatatatcacaggtgacagtccatcccttttgtacccaaccgcgtagtatactggagtactaataagcaatactatgatgaatgaaatgaagagtagtagtaggtattattatctgttttggcgaagatttgagacggacggacgctggtctgcttggctgcaggtttgaggctgtcatccattttgccgggctgaaagctgttggcgagagcgtgcagaagcccctgctttactacgacaacaacctcatcggcaccatcactctcctgcaggtcatggccgcacatggctgcaccaaggtacagcccccgcaccatttcatttatttttctcccattgttttgctttgcctatatgtatatgcgtgcctcttgctggctttattggttggctggcctggctcttctttgcattgctgggggtcacaggatataccttatgcctttttgcattgctggggaacacaggaacatataccacagattacctacctatcacaaccactctgtgtctgtgtgtgttgtttgccatgcatgatgcacgggaatataaccctcccctcttaaaattgctgcctgcctggtcccactcccagccaagatttttttttttgttctcttcctactgccctctgatttttcttcttcctttcatcttgttttggttggttggttggttctgagcttactctggaggcggcatcgcaacagatttatacttacttaatccactaaaagtaaacatatatgctttagtttttaataatggacataatcataagctattttgctccggccagctggtgttctcatcatccgcaactgtctacgggtggcccaaggaggtgccctgcactgaagaatccccactttgtgcaatgaacccctacggcagaacaaaggtactccagtttttttctcttctgttatactatattcagttcaatcatcatgcctaggatcaatcaatcaataaatcctaattaagccaaacaacatatatatgatatgatatgattgcagctggtaatcgaagacatgtgccgggatctgcatgcctcagacccaaactggaagatcatactgctccgatacttcaaccctgttggagctcacccaagcgggtacattggtgaggacccctgcggcatcccaaacaacctcatgcccttcgtccagcaggtcgctgttggcaggaggccggcccttaccgtctatggaaccgactacaacaccaaggatggaactggggtatgtatatgcattattcattcattctcaacaatcagtcgtatatgatttactaattaattttattccttgccggcaggttcgtgactatatccatgttgttgatctagcggatggtcatatcgccgcgttaaggaagctctatgaagattctgatagaataggtatatatgaaccctctcttgttgtgcatccatccacgggacgggacacatgaaaacatcatcatctcataaattaataatttatgtggctatattcttccaggatgtgaggtgtacaatctgggcactggaaaggggacatctgtgctggaaatggttgcagcattcgagaaagcttctggaaaggtaaactaacaggacaagtgtacttcctcttaattactataataatcattaattcccaacttgtcctttgcttttgttgatcatatgatgtcgtcctaacaataataatgccaacttgaacagaaaatcccgcttgtatttgctggacgaaggcctggagatgccgagatcgtttacgctcaaactgccaaagctgagaaggaactgaaatggaagtaagtatcaggatatatatatatatatagcatctcacatcatttcatctgtactgtaatgaaatgaaatattaaaatcatcatgtactctcttcacaccagggcaaaatacggggtagaggagatgtgcagggacctgtggaattgggcgagcaagaacccctacgggtatggatcgccggacagtagcaactgatccagctg

SEQ ID NO: 15736 - DNA, 1103 bp, Oryza sativa
  ref <308>: DATABASE ACCESSION NUMBER: AK066250
  ref <309>: DATABASE ENTRY DATE: 2001-12-06
gctatttagatattttcccacgcatccgtctcctcctcgcggaataataacctttttttttctttttccaagcgcccttcaaacccatctcctctcccctctccctcccaattcgatgcagccgcggtagcaattcgcatcgccccgccctcctcgccgcgcggattcgctcgccgcccccgccaccgcacccccatggacgcctccgccggatccggcaatgcctccggtggcgccggcgccggcgcgtccgcgtgctgctactactccctgctcggcatccggaagaacgcgtccgccaccgacgtgcgcgccgcctaccggaggctcgccatgaagtggcacccggaccggtgcgtgagcgaccccggcgaggccaatcggcggttccagcggatccaagaggcgtactccgttctgtccgacaaggggaagcgagccatgtacgacgccgggctgttcgatcccctcgacgacgacgaccaggatttctccgatttcatgcaggagatgctggtgatgatggataacgtgaaaaacgagaagccggacacactcgaggacctgcagaagatgctgcaagacatcgtcagcggcgacggcggaagccgcggcggcggcgtcggtggccgcgtgccgtcggacggcgcacggaggacgcgcgtcgcgccctacccggcgcagtcgcgcaggtgaccggcgcgccggtgtacgagacgtgcacacgcctctaagtgatgaaaagagagacaagcagaagaagagaggaagcaaacgggaaagaaaaaccaataaaatttggcagaatttgtttcccttttttttaggtcatcagatgattgactccgtttagttcgctgggttgggttgggtcgggtgtgccgttcgattccggccgcgtcacccaagaattggtgcgtgcgtggccaaagattccaatatcttgtcgacatttcgtcctgaatttcactctcttgttgatgtgttcatcatgcgtcctcttctgccttcctgtgtcattgtccctgtcctactcccacagtgtattcccaatttgttacactactggtgctactattgatgtgtctctagtgatctctgcc

SEQ ID NO: 15737 - DNA, 3766 bp, Oryza sativa
  ref <308>: DATABASE ACCESSION NUMBER: AK066251
  ref <309>: DATABASE ENTRY DATE: 2001-12-06
gtccctctcattattctatcctcttcggctggagcaagcttgactccaggtctcccacccgttgacccgagctcccctactctcgccgccggccgcttccaccacggcatcgatcgatcgcgggcgacgtggctgagtggcggcggacccgattcgcggcgcagcaagggcggggcggagcggagcggagccagcgacggcgcgaccgcatccactgtcccgatcgacctccgattccggcattcaacatcagataggccaagatgaacatcgccacaggggcaatgaacaccctcctccccaagcttggggagctgctggttggcgaatacaagctgcaaaagggtgtcaagggagagatcgaagaacttgagaaagagttgaaaggtatgaccgcagcactccacaaggtggctgagacacctgtggatcaacttgaccagcaggtcaagatctgggccagcgaggtgagagagctatcttacgacatcgaggatgccatcgacaccttcatgttaaagtgcaaggggcatgaacctgccacgagcttcaagaaggtcaccaatttgttcaacaagttcaaaaccaaccatcagatccacggtgtcatgaaagacatcatggaccaggtcaagaaggtcagcgaacgtcgtgataggtacatagtcgacgacaatgctgccaggccaactgttgtggatgttgattctcgcctagaagctatgtaccgaaaggcgacagaactcattggcattagcaagccaaaaaatgagctaactaagcaactcttggaatatgacggctcatccagccaacaatcaaatataatttctattgttggattcggaggcttaggaaagacaactcttgccaattcattatttcaggagcttaaggcaaaatttgacagctattgttttgtttcggtgtccttgaatcctgatataaacaagattctcaagaacattcttctccaacttgatgagaaaatgtattcccacatagatgaaacatgggaaacgaagcagctcatcgacaaaattagagacttcctcaacaatagaaggttcttgtgcgtgattgatgatgtatggaaaaaatcagcgtgggatactatcaaacttgctgtgcaagatgctaaacttggtagcaaaataattgtaaccacgcgaaacaaggtcgttgcagaacatgcaggcagtggtgtttatgaaatgaaacccttatctgatgatgattccagacaattgttctgcaaacgaatatttgactctaacgatgactgtcctgctgatttgtgtggtgtcactgagaaaattttgaagaaatgtggtggtgtaccgctagcaatcatcactacagcatgcctacttgctagcaaaccaaggaattcagaggaatgggacaaggtcaataagtctatcagtttggggcttgagaacaaccttgatgtggacaagatgcggaagatattaagcctcagttacaacgatctaccttttcatttgaagacttgcttgttgtctctaagcaaatatcctgaggatgaactaattagaaaagatgttttgatatggggttggttagctgagggttttattacagatgaaacacgacctgtagggacaagcttgcaggagattggagagagctacttcaacgagctcatcaatcgaagcttgatccagccgatgagtgaggacaatttttgggatgaagatggtaaggtgcatgttttttgggatgaagatggtaaggtgcatgcatgcaaagtacatgacatggtgcttgagctaataaatcagctgtcagtagaagaagattttgttacaacgtatttatcagatggtcaacaaacaggtaaacatacatgtacagcacaaaagaagaagattcgccgattatctctccataacagcaataaatcctatgcctcaccagaagcaagagaacaattgtccaaagtaaggtccattactatcttcggcaaggtcgactcgataccacccttgtcgagctttcatgtcctgcgtgtgttgcagcttgaggactgcagtggaatggacaagaaccatcttaatcatctcgataagctacgcctcctaagatttctgcgtctagggcactatagtgccactgagctccctgaaagcattgggaaactggaatctctcgaaaccttggacataagaggtgcacgtaaaccaagttcttttaaatctcataaggtactgtttccaatgtcttttgccaaactaaggaaactgttgcggctatatgctggcagagtgaagctggcgcaaggtctgatgctggggaatatgaaatctttacaggagcttgtaatagaagctacccgaaaggtaataaaagagattggtaatttgacagagctaaggactcttaggatcgttttcggtagtgaaaaaacatttgagttaaaggaatccattcaaacgtctatacaaaggctcaccaatttgcaagacctagatttgagaaataatattagttttgaagaaatcatagacatgcaacaggttccttccggtctccaaaggttgttcatgcccgattcgtttatgaaagcattcccatgttggatcaattcattgatgctctcccacctcaccaccttatccatttgtctggatttcgaatatctccagtctgaccaccttgatcgcctcgctgagcttccatctcttcgctttctcaggctacagttagcatttgtttcggaacaactacagggaaagctcactatccacagaggtgcatgtgcatttcggagtttaaaagattttcagttttatagctccatgatgccatcgtttcaaccaggagctatgccccaccttgaaaggctttatctttctatttggaccagactaaggaggggtggcttaaatgatttaggtttggagaatctctactcccttcggcatgcaaccatttattcctttgatgatgacagcaaggctgttattgaagaggcacttaaggactatcctaatcaagcagcgctcaaaatacaatcgatgatgatgaactaactcaggcgtcttactcgtcatgtaattatggtcattcagtatcacctgcaatctatcatcgtaagcccaacaagggagcacacgaacaacaggcgatgcaacagagtgggtgaaattatcagtttatctatctatctatctatctatctatctatctaccagttgttttggttgtttccattccatgaaattagaatggagttgtttagttggctctctataaagagcagtactatgttatttggaattcaagcaagaagatataagaccctgttagttttcatattattcatggtgggattgttgaaatggattatttactccacggattgaaatatatattctccactgcatttgttagatcacttgttttaagttatatgttaagtttatattttttaaatatttaatgtattatacaagagctcgatgtgcatatccatgtaagaaaaaaaggatagctggtttggctgcttgaagctgcaagagctattaggagtctgtgccacccagaatgcgctgcatgacattggtaaagttcattagagttgtgattgaggatgaacgggtgctgattctgcatttttatgcagcaaatctctaatgctctagcagtgtttcatattcattattgttttggtgtatgtacttcaatgaattgtttcaacaaaaaaaaaaggcatatatattatgatgcgagtgacttggtc

SEQ ID NO: 15738 - DNA, 792 bp, Oryza sativa
  ref <308>: DATABASE ACCESSION NUMBER: AK066252
  ref <309>: DATABASE ENTRY DATE: 2001-12-06
gatccattaccatcacagaagaaaattcaccggtgaaaaggttcagcactgtgcaatggcggcttccgtaggactgaaccctgaagctttcttcttcagcaactcctactcctactcctcatcccctttcatggccagctacacgccggagttctcggccgccgctatcgacgccaacttattctccggcgagctcgatttcgactgctctctcccagctccggcccaggagtacccggaaaatgaaaacactatgatgaggtacgagagcgaggagaagatgagggcgagggtgaacgggaggatcgggttcaggacgaggtcggaggtggagattcttgatgatggcttcaagtggaggaagtacggcaagaaagctgtcaagaacagcccaaatccaagaaactactaccggtgctcgacggaggggtgcaacgtgaagaagcgagtggagagagaccgggaggaccaccgctacgtcatcaccacctacgacggcgtccacaaccacgcgagccccgccgccgccgccgcggcgctgcagtacgccgccgccgccggcgactactacagcccgccgctcagcagcgccgtctcgccgccggccgcctattcggcaggcggctcgctgctcttctgaggctgatgagtttgtctagtactagacacgcccgggagctctagctaggatagaaaactagagaaagtttaattatacctgaattttaattaatcacctcacaaaactctgatgtatcatattatatcgtgatagtgactgcttgttaattt

SEQ ID NO: 15739 - DNA, 2942 bp, Oryza sativa
  ref <308>: DATABASE ACCESSION NUMBER: AK066253
  ref <309>: DATABASE ENTRY DATE: 2001-12-06
gactgttcacccttcctcgcttctcctcgccgcaatcgtcttccgcgggtggcatcgctcacgctgtcccccgcccatctccgcctttcttcctccgcccatccccgccgccgtcacccagccaccttttccctcctttcttcctccatgattacagtcgaccaggtgattgggcggtgcggcgccaaatcaatggtgtgggggatcgatgttctggtcttgattccttttctctcttatcttccctcctttcttgctgatggcatgccaaatcgatggtgtggggatcgatcgatgttctggtctcgatttgctggttccccttctgttcaagctcgagtctttgccatcgtgcggcaccaagctccgccgttctgcgccgccagcgctgtttgccgattacagatatgatgatattggttggcttcccatattcacttttggttggagacatcaccaggtttgttgtgctctatatggtctgtgctgtgctcccctctgtgcctggttcgctgtggggatgtgcgtgggtgcctgtctaccaacggagctgacgctcgatggcccacctggtagtcactttggtccatggtgcgccggtgctaggtagttccttccctgcctgacaggctttccttttggtacaccgcccacttttactcaggacaatgcactgtctctctgtgtgagacacgtctattcgtggttctcctaccaacgtggtgcaccatggtcccccatcacacaggtgctttcctatatgcgtgttccgtgcgctaggagcacgttcacctaacaccactgaaagtagctgagaaattatccgctggttaataccacaaaaatcctgatgcacatgcatctattcgttgcagtcagcgataggtggggtcaatttcgtgtgcttccccacctgccatacactatgcccatccgggaggttatagctgtatgatgccatgtttttttgtgagcgccgcgcgctacgccaccgcgtgaggcaccatcaaatcgacgtccatacacaccgtaccggcgtgcgcgcgagcaccgatgcccacgtcatggtcttagcctttccttctcctcttcatacccggttcgttagttctgctcgaggctgttgctggttcggttcgttggtgtgctttgctcccgttttgccccttttcgctgttgcgcacatggcgagcaccaggtgatatgctgccccatatgtctttcgttctccctgactgctattctgaatgtgtatgcgtgtgcaggggacattgtggatactgcgtcgacacttaggatttgccccgctcatctagtgtacgactttagctcctcgacgccctgttcatttcgctcgaaggtcttggtggggttcgcgctgtaggccaggacgctcggccgaggtgactctgcccattggcttcttcgctagcccatgtctgcacgcgttcctcgatcctacgagatgggacacaccctgctctctgatctctcccttggtgacgacaacgagcgcatttgtgttcgggtttcgcgattttgggctttctgtgaccaaaaggatgatgacaagattcttcactttggcttggtcctgattgatgagaaggggactagcattgctgctcagatttatcccccatgtgatgagatattcaggccaatcatcactgaaggcaaggtgtactacattaagtacttccgtgtgaggaagtgtaacaggcagtacaaaccagtcgacaactgcatgtccatctatttcacaaggtggactaaactagaggagcgtgtcgatccaccagctgagattcctttgtatacttattcactctcaccatttggcggtcttcgctcacgtgttggcaagaaagactcattcacagatatcattggaattattactcagctgtcgcccgtgactccgcttcaaggcaccgtaaagaggagtgtcttcatccgcaacactggcaatgcaatcttgaatgtggcgctttggggggaacgtgcaacaagctttcctgccgatgaggtgtttgttgctggtcagaaagaaccacagatagtaatcttcgttggcacccttgtgaagggctatggcgatgtctctttatcaggtaactcagcctgcaagtggtacattaacgcagacacacctgaggtcatctctctgagaaacagcatctaagcaacctatagtcctatagagtggactgatctacctcctgcagcacctgcttatagcaatgctgagcccaagacgattatccaaattaaggatctgaatcctttcgaattcaagatacattaaacatgaattcttggttactgttgtcatcaagaaaatagacatggagtactcttggtggtacactgcatgtgatatatgcaggagaacagcaaggccatatggaaacgcatacaagtgccagaatgagtcatgccctcctcttgtgggagcatcacctaggttcaagcttagcgttgtggcaggtgatgacacagctgacgctaagttcgtgctctttggccgcctagcacagtgtcttattggtcgatcagtggagattctgttagagggcaacgctgccggcaaggaggccatacccaaggagatcacaaatttgcttgaggaaaatttcacctggaaagttgctattaccgagaataccatgtcttcaagcaatgtctcattccaagtgaatatgattgtcggaaacggcaacagccagaatcctgccacccacaatctccatctgcatctcaggcatcctccatggtaccttctctagctctatcaccaagtgtaacacatgaactctctgttggccagtccacagcagcatttgctccatccattggattcagtgatccgcctgccactccatcggctggattaaacagtccgttggttgttggagccaaggacaaaaatgatgatgttg

SEQ ID NO: 15740 - DNA, 1298 bp, Oryza sativa
  ref <308>: DATABASE ACCESSION NUMBER: AK066254
  ref <309>: DATABASE ENTRY DATE: 2001-12-06
gacacatcacgccctcacccctccccgtcgcgtcttcaacccccgccggcgccgagtgcgccgctcgtcgcgccgcccacatccacggtgagaccctctggatctggcagtctccgatccccatcaccgtaccccgcctccgcctcaccgcaatgtcacccgattccgcgccgccagttcaccgtcgcccggattgaccaccgtcccccgcctctccaccgcgccgatctcctccgcgactcccaccgccgccgccgccgcttctcttggttctcgattttggtttggtttgctctggatttcttgagtcggggaggccgggaggggattcgtctcgtgattttctttgtctattgtttgattgatctacctattcaggaaaatgatcgaggcaatcgacgagtacagcgccgaagatccgctccaaccatggctagagaggggattgctcaagtcggctggtggtgatctacgaccagacgacgacctctacaagaaggatctccgctacctcaaagtgtgactggaatatgtgagttcatgaattcagatttggttctgaggtggattggtttggtttccttttgacatccagcttgtgtttatcttttcatgcatgacggcggggaattgtgctgattcctggaggctaacccaatcagtcagagccataccaattactacttgtgtaatgcgttggtaatatattgaaccacagggtaggtatgcttgcattttctcccgagggaaaactcaaatagtctcaaatttagcttacaaaacaggaattgaagatctatgatttctccatttttctttaaattaaaatctgttttgcagttatgagaaaacaaggccatttgttattcttatgtacgagtacaacgctttggcagcaaatttctttacttacagtttcacatcttacttggagtgcactgtatagaaaaatatgattcagattgcatttcccattaagtatacgcttcaataagcaattgcgagggatgacctttgcatccttctagctatttattttccacttaagttctatggagtatcacatcatgtgtcagtttttgatggcatgccatcgacgaagccagtcgtgccttctgcttgaacacaatggacattgcctccccacttgaacagaccaaatctggaacctctgccttcatggacttcacagctcgacaattccattctccaaaatctgttgtacagagcaacaagtgcaagacatcacccttaatgttcaaatatattatgcaatatagcctgatcacttaatgttc

SEQ ID NO: 15741 - DNA, 1453 bp, Oryza sativa
  ref <308>: DATABASE ACCESSION NUMBER: AK066255
  ref <309>: DATABASE ENTRY DATE: 2001-12-06
gggtgctttgagctccatcaccagctgagctgcgaggaagagagagtgcgagagtgcgcggcagcggcagtgtagtgtcagtcactgggtgtgcgcttgcttgcttggattgaggatgacgtcatcgatgtcgccggcgccggcgccggcgtacgcgcaggtgatggaggacatggagaaggggaaggagctggcggcgcagctgcaggggctcctccgcgactcgccggaggccggccgcttcgtcgaccagattctccacaccttctcccgggcgatgcgggcgctcgacaaggcggcggtctccgccgccggaggagaagggtcggaggtgcagagcgaggtcacctgcgggggcggggccagcgccggcgggaagaggaaagcccccgccgccgaccggaaggccaactgccgcaggaggacgcagcaatcgtccgggaattcggtggtcgtcaagaacctcgacgacggccaggcatggcgcaagtacgggcagaaggagatccaaaactccaagcacccaaaggcctacttccggtgcacgcacaagtacgaccagctgtgcacggcgcagcggcaggtgcagcgctgcgacgacgacccggcgagctacagggtcacctacatcggcgagcacacctgccgggacccggccaccgcccccatcatcgcggcgcacgtcatccaccaggtcgccgccggcgacaacgacgacggctgcggcggcctccaagcggggtcccgcctcatcagcttcgtcgccgcgccggcggcgccagtagacgctgccgcggcgccgacgaccagcacgatcaccacggtcaccgcgccgggcccgctgctgcagccgctcaaggtggagggcggcgtcggctcgtccgaccaggaggaggtgctgagcagcctcacgcccggcagctccgcggcgcgcggcggcggcggcggcggcggagtcgcgggtcccttcgggccggaccagggcgatgtcacgtcctccctgcactggagctacgacgccgtcgccggcatggagttcttcaagaacgacgaggttgtcttcgatctggacgacattatgggtttgagcttttgatcaccgaagaatcatggatggacacgggccgggtaaaacgatcgaaagaagatggattccacgcgtgtgtacagaaataattagcggcagcgcggatcttaatttggaacttgcaaagatactcctaattagcctggctagattagtttgtaaattccttgttgatgtgtcgtctcagctttaagctgcagacatgctagcaagtaacaacacgattagtacgtagtaatgtggttcttgattatgagctgggggtcttaaccttttttgtgtgacaagcaagagaagaggatttgggtacaatgtaatcctgttcttccgctttcgaaaaaaaaaaacatatagcttcacgtgcct

SEQ ID NO: 15742 - DNA, 1179 bp, Oryza sativa
  ref <308>: DATABASE ACCESSION NUMBER: AK066256
  ref <309>: DATABASE ENTRY DATE: 2001-12-06
gccgagattggtttcttctcccccatcgactccttttgcgctgcttctcctcgccgccaccgtgtagcgcctagggttttcttcgcccgcgcgcgtcgatccccttttcccctggtcattttctggtcctcttcaccgccgccgtgctccaccgtatccttcggcgaccgccgcgggcagcgcgagagggggggaggagagctcgcccgccgcgggcagcgcgagaggggaggaggagagttcgcccgagggcggaagccaacgaggggatgatggccggacggcgagctcgccgaggcacggctgttggagcgaactaatccggagggggtcgggccccttggtgtcttggtgctgctccgccccggatctgcctgccccattacttcactttctccttgcaatcacgtcggcggggaaggtcgtcgtcccacgagcagacgagctcatgtcggctcgacatggtctcccgagctcagcgggcatggcggacgaggtgaggcggcagggtgcagcgcgtaaacttaagttttaagtcattcaacaatgaatcgatctgtgcaagttatgcaaatattggttgtttgtgtgcctgctcaacctcagcttgctgtcctccggctgtggtggcaggaagggaagcacttgcctgtcttcctatagctcaaggttcctaattggcttcagaatcggcttacaagctaaatgtaaatttgatgttgggtggcgtcttatcttgaccagagtttgtcaaattcgcttgcctacttctgcgttatataacttgcaagctatttttcttatagccatgccatgagcttcgatgcaccttctactccattgcctcacgtatgcagctgtgttttgatatatatggtacagtgactttgtgagcagctcagtttaatagaaccaaggacgatagcttcaatttaacagtgcaccttcactacttgataattgcgatggagtatgctatcatgacacacaaggattttttgttgggtgctgtgtacaattatttttatcgaggcctttgaaggtattacagtgatatattgttacatctccttcaccaggcttctatactagatatcctcctattactattttaattctttttaaaccagacaacctaattagctatttgtacttattttttatacaagattttttttt

SEQ ID NO: 15743 - DNA, 2024 bp, Oryza sativa
  ref <308>: DATABASE ACCESSION NUMBER: AK066257
  ref <309>: DATABASE ENTRY DATE: 2001-12-06
gaaaggagaaagaagcgagcgcatggagttcatcgggtgagcgttcttggtagtaggagattcttctccaatccgtgggagaagagctaggaggagcggaggaatccgtgtcccctcccgcggacctgcttctccggctgcccgaaacatgcttttctccctatcagcctttgtgatgcattgaacaggggttgagaagtactgtaatttttgtaatggctgggtgttccttggcaacactgagaggacaacatcgagggagatggatccaatctcacagcaagctccccacaaggattatgtctattaatctgccaaagagtaatcacagtcacaagattcagcttccatgccagtccaatttaggaagaaaacagaaaactggtgcatttgctcctttgggttttcatggaaggtgttgccggatcgaaacatcagttaaatgttatttcttgcagtcgcttgtggattctgagagtatgatctcaccaaatttgttattgctttctgatgaagctctactaactatcagtatagtttttgcatatttggctggagttgtaccctctggccatgcatttcctcatgctagaaaccatagtcaaaaccaacatcttggagctccaggtccatctgattctgggatatgaaatggttacctgaagggaatactaggttttaccccagcgatacatggagtgaagtgagaatgaaactttcagaagccttgcaatcgaatggtcgagatgccacttcggatggcagcgatagtgaactcaagaacaatcgcaaaaattatcctttgagtatgcttgcaattcatggtggtcccaggctgcggcttcttctagctacctttcagctacttgagatggaggtaagaaatgttcctgaaagttctgaacttgtagatgggatcaaatggttgcaaatatcaactacgttgattgatggcttgattgaaccaacatttatgaaatggattcaagaagaaaaagcctgggagaacagcaagatcaatgaagaacttatgaagacggtaaccagcaaaataaaggaggatgacaggatcttgaagaggttcaacagattagggaaatctgaactctatttggatctgctttatttcctgagatttggttctgcaaggtcttatagctattttgatgctaaatttctggctgaacatggagcgagaattttggaggacctggttattttcttagctgacgcggtcgctagtatttacatagagcttatatcagttgatggtgatatgccgactgatgttgttggttccagcttagctctatgctcgctgtcaaccagagaacttcaaagaatgcgtaacgaggtggcaattaatgggtggctgcaccagtattttgagtcagttgtctcaatgtacgaggacaggtttgagttatatgttttatccagaaaactttgtgaaaaaccagcagataatcaagctgaagtgacaaactggtggaggcttggatttggaaagccttccaccgttactcttctagagtacgttcacataagctcattttctcttccggtgagaaggacgaaagaattgagagctctggctggatggaggtattatttcagcctattattagaaatgtcagatattgccatgcctttcataagggctgttgtcaccaaagttagtgctgcagtgtcgtacttctgggtgtccatgataggaaggtctctgggattgattttctcagggataaggcaatcacttggttggagatgatcagatgtttctttggtttttgattgtgagatcttgtgactgagcgatatttgcctcgcagtcatgtccagttttgtcaatttatataggcttttcgttgacctttttttttactgttgagatggctgacttctggtcctcgttatacatgttctgtatcacataatgtaacaaagttcattgatctgacaaaagggtgaaaattatttgttaatcttggaatgcatcatgtggtatataacattttgaagcc

SEQ ID NO: 15744 - DNA, 1494 bp, Oryza sativa
  ref <308>: DATABASE ACCESSION NUMBER: AK066258
  ref <309>: DATABASE ENTRY DATE: 2001-12-06
gacacacgctgtgctgctgctgctgccgctgctcctcctcctcctcttacatcccaccctcgccgcgatttccttcgccgccgccgccggcttcgtcttcttccccggcgccggggcacgcgaaaagggtttgtttctagtagaatatgtcgtgctttgcatgctgtggtgatgaagatactcaaggagtaccagacaacaggaatccatacccagggaaccatccagcaaggagcgatgcatatcgcacagctgatccaactccaagaggtcctcaacctgtgaaagtgcaaccaattgcagtccccatcattcctgttgatgaaattagggaagtgactaagaattttggtgatgaagctttgattggtgaaggttcctttggcagagtgtattttggtgttctaagaaatggtagaagtgcagcggtcaaaaagctagactctagtaagcagccagaccaagaatttttggcacaggtatctatggtgtcgaggcttaagcatgaacatgttgttgagctgcttggttattgtgttgatggaaatctccgtgtccttgcttatgagtttgcgactatgggttctcttcatgatatgctttatggaaggaagggtgttaaaggagctcaacctggtccagtcttatcatgggcacaacgtgtgaagatagctgttggggcagcaaaaggcctggagtatcttcatgagaaagcacagcctcatatcatacacagggacatcaagtccagcaatgttctccttttcgatgatgatgttgctaaaatagctgactttgatttgtcaaaccaagctcctgacatggcagctcggcttcactctactagggttcttggaacctttggatatcatgcacctgagtatgcaatgactggacagcttagctccaagagtgatgtgtacagttttggagttgttcttcttgagctattgaccggaaggaaacctgttgaccatacattaccaaggggacagcagagtcttgtgacttgggccaccccaaggcttagtgaagacaaggttaggcaatgtgttgactcaagacttggaggggactatcctcctaaagctgtcgcaaagtttgcagctgttgcggcgttatgcgttcagtatgaagcggactttcgaccaaacatgagcattgtcgtgaaagcgctgcaacccctgctgaatgctcgggcaactaaccctggagaaaatgccgggtcataaaactttggtctaccttttgtatgatagatattaagttaagaagtatgagacatcgatattgttcttgcggatgtgtggctggctggaagtgtgtacatttgtgattattcgtcccttgttgtaatcaccaaggttctagcaaccgaaaatatttgattcttcgcatcgggtgagacataacttgtctgaaggtgacatgcatatctatctaccttactcaagagggaaaacaaaattctgcatcttgaactgaactgaactg

SEQ ID NO: 15745 - DNA, 3668 bp, Oryza sativa
  ref <308>: DATABASE ACCESSION NUMBER: AK066259
  ref <309>: DATABASE ENTRY DATE: 2001-12-06
gagtagagagaagagaatagtgtggtcagtagagaggaggaaaagcctcttgtcgtctctttgacccaacgaccccgccattgctcacctccacctccacctcacctcctcctcctcctcatcccctcgccggagcggccacgccgccgggagggagggagctcgccgcagccgcagccgcagccgcaaccagccagctactgcgtgctgcaacctgggattttcttttttcttttttttcttgtggatttgatctgaagtggaggtgggaggaggaggatggagagctacctggaggagaatttcggcggggtgaaggcgaagaactcgtcggaggaggcgctccggcggtggcgcaagctctgcggcgtcgtcaagaaccccaagcgccgcttccgcttcaccgccaacctcgacaagcgcggcgaggcccaggccatcaagcacgccaaccacgagaaactgcgggttgcggtgctggtatcgaaagctgcactacagtttatacagggtctttcacttcgaagtgagtatgttgttcctgaagaagtcaaggctgcagggtttcagatttgcgctgatgaactgggctctattgttgagggtcatgatagtaaaaagttgatcacccacggtggagttactggaatagcagacaagcttgcgacatcaccagcggatgggttaagtacagctgaggaaagcattaagcgcaggcaagatgtatatggactaaacaaattcacagaaagcgaggtccggagtttttgggtgtttgtatgggaagcacttcaagatacaactcttataattcttgctgtctgtgcctttgtatcgttggttgttggcattgccatggaaggatggccaaaaggtgctcatgatggtctgggaattgttgcaagtatcctcttggtcgtgtttgttaccgcaacaagtgactatcggcaatccttacagttcaaggacttggacaaggagaaaaagaaaatacaagtgcaagtcacaaggaatggttttagacaaaggctatcaatatatgatcttcttcctggagatgttgtccatttagcaattggtgatcaggttcctgctgatgggctattcatttctgggttttctctactgattaatgagtccagtctcactggcgagagtgaacctgttgttgtaaatgaagataatccttttcttttgtcggggaccaaagttcaagatggttcctgcaagatgctgattacaacagttggcatgcgaacccaatggggaaaactaatggctactctcagtgaaggtggcgatgatgaaaccccactacaggtcaagcttaatggtgttgcaactattataggcaagattggtctatttttcgcagtcataactttcattgtcctttctcaagggttaatcagcaagaagtaccatgaggggctgcttttaagctggtcaggagacgatgcactggaaatgttagagcattttgctattgcagttaccattgttgttgttgctgttcctgaggggttacccttagcagttactttgagtctggcattcgcaatgaagaaaatgatgaatgacaaggcattggttcgtcacttagccgcatgtgaaacaatgggctcagctacgaccatctgcagtgacaagacaggaacactgacgaccaatcatatgactgttgtcaaggcctgcatttgtggaaacataaaggaagttaacaatcctaagaatgcatctgatttgtgttctgagcttccagaaactgttgtcaaaacccttctggagtctatttttaacaatactggtggtgaggttgtgattgaccaagatgggaaatatcagattctaggtaccccaacagagacagctttgttggaatttgcattgtcacttggtggaaattttaaggcaaagcgtgatgaaactaagattgtgaaaatggaaccctttaattcaacaaaaaagaggatgtgtgttgttcttaagcttcctggaggaggatgccgtgcacattgtaaaggtgcttcagaaatagtgttggctgcctgcgataagtttatggacgagacaggtgctgttgtcccccttgataaaacaactgctgacaagcttaatgggattattgaaagctttgctaatgaagctcttaggacattgtgccttggttatcgggaaatggaagaaggcttttctgttgaagaacaaataccactgcaagggtatacatgcattgggattgtaggtattaaagatcctgttcgcccaggcgtgagggagtctgttgcaacctgccgatctgctggaattatggtgagaatggtcactggtgacaacataaatacagcaaaagcgatcgctcgtgaatgtggcatacttactgaagatggcctggctattgagggaccggagttcagagagaaaagtcttgatgaactactcaagttgattccgaaaattcaggtaatggcccgatcatcaccacttgacaagcatacacttgtaaagcatttgcgcacaacattcaatgaagttgttgctgtaactggtgatggcacaaatgatgcgcctgcgcttcatgaagcagatattggacttgcaatgggcattgctgggactgaggtggcgaaagagagtgccgatgtcataattctggacgacaacttctccacaattgttactgttgccaaatggggacgctctgtttacgtcaacattcaaaagtttgtgcagtttcagctgactgttaacgttgtggctttacttgtcaacttctcttcagcttgctttacaggaaatgcacctctgacagctgttcaacttctttgggtgaacatgatcatggacacccttggcgcccttgcattagctaccgagccacctaacgatgacttaatgaagagagagccagtgggcagaacagggaaatttatcacaaatgttatgtggaggaacattctggggcagtctttctaccaattcattgttatgtggtatctccagacgcaagggaaaagcatgtttggccttgatggccctgatgctgaagttgtgctaaatacaattattttcaactcgtttgtcttctgccaggtgttcaatgagataagctccagggagatggagaagatcaacgtgctgaggggcatactgaagaactacgtcttcttgggtgttctcaccagcacggtagtcttccagttcatcatggtgcaattcctcggcgagtttgcgaacacgataccactcaccaggctgcagtggattgccagtgttctccttggcctcattgggatgcccatctctgccattatcaagcttcttcccgtcggctcgtcgtgatgaagatgagatgatatctgcagtgacagtatccatactgaccaaattccatattgtttggaggagctgaactctccatgcagtcttttggaaatgcatgtggggcaagcagtgggaataggcaatagctgcactttgacaagtttttttgtagaatatgaatgtgtcatatttcgcatcatattgtaagaagcattttgttttggcacttttgctggttcagttgtgtagcaggatttcaaggttggtgtttgtattggaattcggtgacgagaaaattatgtggattaatgaacagaagcataaaaatatctccttttatccct

SEQ ID NO: 15746 - DNA, 1451 bp, Oryza sativa
  ref <308>: DATABASE ACCESSION NUMBER: AK066260
  ref <309>: DATABASE ENTRY DATE: 2001-12-06
gttcggactttggaagctggaaatgatccccaactctgaccgctcggagagcccgctcatcctaacctgatctgatgccttcagcttctaggttcagtaatccctctcttcttcgcttcagtgatttatctaatgccttcaactgctattcagtaatccctctctagctttgtttgcttcagtgatttcaattttattatttgcttctgttcagcagtacgtatgccttgcaaatctgtaacatatacgcacttgatttgtcttgagagtaatatctatggagggcgccatggtcagcctccccgggaggctggaggagctagtgcgtcgtcacggcagcaagctgcccaagggtgcagaggaggagatatcgctcatcaagcaagacctcaccaccatggcctgagccggctttgccggctgctgcaaggacggcggcggcggggcgctctctccctcactcgtggtcttcacggttggagcgccagcaagatggagcggagggcatcgcgccagcatcgtgggaggccgccgccggcgtccagatccggcgccgggaggcacggatccgggcgccccatggccggatctgctgctctgggcggcaagttgggtctccgggcggcgtcgtcggtgtggctggcggcggggccgagcacgagacgcccggtgggcggcgtcgtcggcgtggttggcggcgggccggaggaggcgtcggcgtggacgaggttttggcggcggcatgcaggctgctggcgaccccagccggcggaggcagaggtagaggacgccggtgccgtgggggtttgggagacgaggtggctagatccacctcccctgcccagactcagcgtcacagcggcgcttgttgcagcggtggtgaggcggcagggtgcggctacgtggaggaaagggcgactcccgtgtggcgacggcggcggtgtctgtggcgtctggcggtggctgtggctgtggcggcggccgccgcggctgctgtggccgcgatgacaacgacagcagcggctgctgtggcacggtggaaggaggcacggtggtggtgcgtttcggtagcagcggctgcggtcgcggtgatcgtggtcaccggagacatgacggcctcgacggctagccgagggcgtggcagacggctgcatctggctggcgcggcatcgtttggaggaggggtcggagactagggctgtcaacgagacgagctcgagcgagctcgtctgcccaagctcgagctcgacacaagctcgagccaagcctattgcaccttcgagcttttaggcaagttcggctcgagctcgagctcggtgccgagctcggccataagtagtataatatatattttaataataatctcttgataagtataattattttctagtaatcacactaataaaagagtagaaaatgattaaaataaatatattgtgctaacacatgct

SEQ ID NO: 15747 - DNA, 2042 bp, Oryza sativa
  ref <308>: DATABASE ACCESSION NUMBER: AK066261
  ref <309>: DATABASE ENTRY DATE: 2001-12-06
gggagtcgctgagcgccgttgagcaaacagcccaagctagcagtagaaaagatctgctgaaacacgtcatggttatggaggacggcgagatgagcctgtcgaacctggtgctcggcttcttcgaggaggctgagagggagcagagatggccggagaacggcgacgacgacgacgagggctccagcggcagcggcgccgccgagagcaaggccttctggcagaaccagcactcccagctgcatgtaagtcccttcccctctgctagctgaatttcgcagctatacatttgcgttcgtgaggaacagaattaattcagagatctcttacactccaatagccacatgcatatccacgcaacacggatgtgatcacgatattttcagttgaacttgtttgatttgggctaaatatcttctggttctgagagagactatgcgtgcgtggatgtgcaggaggctttggccaagaccagccaggtagagagcaggatacgggaggacacggaggaggcaatcaggaagatgcgcgccgcgggcgccgtctgctcctgcgcgaggcgggcggcggccggggactgccggagctgcacgctccggcatgtcgacgagcggctgcgcgacgccgggtacaacagcgccatctgcaagtccaagtggacgcgctcgccggacatcccttcaggtaatttcggttacctgtgaagctaaattcagacggcacgaaacagctgagtcccaaaagaaaacacatcacagcttgccttgccgtgtagcctgctgcctgtgcctctgtgtggtctaggacgtttgccgtgtcccacaaatctgggtgctccttgtagtcaagagatttgatctttccgcgcttccgcgagtacagcgccgcaacagtttgttcgatccacaaatcaggatcttttcctatgagagttgaataaggggagcatattcgcatgcttataatagttgtctcgcgctttaaatgcaaacagttactacttaacaaacgggcatactatcttgtttaaccatagagccacatgacacacatggacaaggtcatcctacgattaaaagaaaacaatagatgcttccacttccatgattaaccaacaggcaacagccaagggaatgtcaggaacccgtcactgtctctattatttctagctacgctcataaagtcgtaaagagtagatccaaactcgtgacagatgaacttgcaacagtcgccacacgacttgccacgtcagcgtcaaactcgcacgagccagaggaattacaccacgtttaaattcgctgccaaaacctgcacgagatattccgaaaccgggcgccgcgccggccgatggatccaacgaaactgacgtgtttttttttttcttcccgtgtgacgcgcaggcgagcacagctacgtggacgtggtggtgcagacgaggagcggcaaggcggtgcgggtggtggtggagctgaacttccgcgccgagttcgaggtggcccgcgccagcgcggagtaccgcgcgctggtgaccgcgctgccggaggtgttcgtcggacgcgccgaccggctgcgcgccgtcgtcaaggccatgtgcgccgcggccaagcagtgcatgaaggagaacaacatgcacatgggcccctggaggaagcacaagtacatgcagtccaagtggctcggcacgccagagcgtgtcgcggccgcggcggcggcgccggtggcggtctggtcgccggagaagcagaccaagttcagggcgtccatgctcagctttgacttcgcccgggccgccgtggaggttgcgtgacggcgcatgtcgattatggcacgcaacaagagtaagatcgccatgtcggtcgcgtctacgtatgcatatgtatgtattgtgttctgcgggagctatatgagctagaagagtgtaccggcgattttaggttttagaattgaaggtcaatgttcaaatttcagagaccgatgctcaaaattgggatgtactactactatggcaaatggaaatcgaatttcatgagcctgtttttttgctg

SEQ ID NO: 15748 - DNA, 2038 bp, Oryza sativa
  ref <308>: DATABASE ACCESSION NUMBER: AK066262
  ref <309>: DATABASE ENTRY DATE: 2001-12-06
gagcagcgaacccctctctcgccgcagatcccaacgccgcacacacacgcacacgcacccgcacgcgcacgcatttccagctcgcgacgacgcccatctcgacgcgacgcgatccccgccaagtcaaaccccacccgttatactctccactgcgatctcagaggcagaggcagagcccacgccgcgcagatccacctctctccgccctggattccgcggagcaggaggcggtcaagccgtcgccgccgccgccgggccgcatccgctaccgcacgccctcctccccggacctcctcctcgccccgccctccgacgccgacgccaagaacatgcgccgctactccgcgctgcccggcggcggcgcccgccccgacacgctcgccgaccgcctccaccgctaccgcggcgtcctcctcgtcatcctcgccccgctcgccctcgtctccctcgtcctcctcctcatgccgcgctcccccgcctcctcctccgccgccgccggcaggaggtggggccccctcgacgccaacaagtacgccgtcattttcgacgccgggagctccgggagccgcgtccacgtcttccgcttcgacgccaacctcgatctgctccacattggcgaccagatcgagctcttcgtccagaaaaagccggggcttagcgagtacgccaataacccgcaggaggctgccaaatcgctcgtctctctccttgaggatgccaaacgagtggttcccgtggaattgcgcggccagactcctgttagagttggggccaccgccgggctaagagcgttgggagcagaaaaatcagaggagattttgcaagcggtcagggatcttcttcgcgaaaagagttcgttcaagacccaaccggattgggttacagttcttgatggacctcaggaaggcgcatatgaatgggttaccatcaattatctgctggggaaattgggaaagacttacgcagacacagttggagtggttgatcttggaggtggatctgtgcagatggcatatgcaattgcagagaaggatgcagtgaaggctcctaaaccatcagagggtgaagattcatatgtgaagaaactgtttcttaaaggaacaacatattatctttatgttcacagctatttgcattatgggttgctggctgctagagcagagatcttaaaagccggcaatggcaaaggttacagctactgtacattggaggggcatcaagggcaatacaaatatggcaatggcaaatttgaagcgtcggcttcaccatctggtgctagttattcaaaatgcagggatgatgtagtgaaagctcttaaagttgaccaagcatgcactcacatgaaatgttcttttggtggcatttggaatggtggtggtggcgctggacagaagaatttgtttgtggcatcatttttcttcgacagggcagctgaggctggatttgtgaatcccaaggcacctgtggctaaggttaaaccttcagattttgaaaaggctgccaagcgtgcatgtaagttaaacttgaaggacgccgaagctgcctaccctggtgtccaaaaggataacattccatatatctgcatggatctcgtttaccagtacaccttacttgtggatggatttggtgttggttctcaccaagagatgaccttggtaaagaaagtcccttacagcaacgcgtttgtggaagcagcatggccactgggaagtgccatttaggttgcatcttgatagacagacagcagaaagttcagcaagggagctacgatcagagggcgtcatcgccgtaaagttttggatctggagggtgttcgcttgctcggcgctgcgcacgccccaagtgaccattttgttactgaaatcgattgatttaacctgcttctatacagtagcctgataatgagtgatacacaaggacccgccagcttgcatagttgcatacttgcatgcaaggggtatatacattttttttttgtaccattgaaagtaagacgagcctgtcattcttttcttgatctatactactccagttctgt

SEQ ID NO: 15749 - DNA, 1968 bp, Oryza sativa
  ref <308>: DATABASE ACCESSION NUMBER: AK066263
  ref <309>: DATABASE ENTRY DATE: 2001-12-06
gctctcacccgtcctgctctctccctcttggtcactactcactccctctcctcccctctcgtccctgccccctctccctatcgtttctccattgccacagcagagaaggtggcggtgatggcatcagtggctcccgcgggccggatccggcgatggcagtggcgtcggcggctcccgctggcgaatccggcggcggcggtgtttctggcaggtggatctagcggttctctaccccctcgtcctcaccctccgtgcccaagcttctcccgcggctgcagcggtggcatcggcgctcctgcaggcagatccggcggaggtggcggcgacggtgtttccagtgggtgtatctagcggtcctctaccccctccttctctgccgcaagcttctctcgcagatcaggcggcggcggcggcttctaccttcgatccattggcgacggcgatgtcagcgagcaggcggatctggccgaggggacctgcccgccgccgccgacgtcccctcgggcggatctgctggtgttgttgattagcttctggaaggttctcaaagatgttgtcctgcctgtcggcatggctggttaacctgcgacgcaacccgctggcccgtctccacatgaacgtcgtcgcctcccacctccacaaatacgggctccggtacgatgatctgttcgatgcctaccagtaccatggcctcgacatcaaggaggccctggcgcggctgccgcgggaggtggtggacgcccacaaccagcggctcaagcgcaccatggacctctccacgaagcaccagtacctccccgccgatgagcaggcgatgcagacaacattaagaggctatttatctgatgcctacctatccagccaccgtgtttggcgagaacgacggcgatgggataagcctactactttatttcaagctatctggcagttttgacaaggaaatttctcctcaactaaaacaatcaatcaagatgcctacctatccagccaccttgtttggcgagaacgacggagatggggaagcctactgctttatttcagctatctgacagttttgacaaggaaattcctcctcaactaaaacaatctatgaaggtatattcagattgcttgcattttcttctcaccctttttcagtgccccttggccaaactgctgatggctactttgttatactacagaagattggtttgttagacctactgtttatcctttgttggtatattagattagatgatggaagggtctttcttaggctcggtacaatgggacctgtactaagtaagttacgatacatgaactggcagagatggtactgtgttggcgctctattcaagttccacatactttggtacttaacccaggaaatcaatataacatggtgcttcaaaaaaattgcagattaatcaatataacatggtgcttcaaaaaaattgcagattagatcaattcattaatttcatgctactatgatatgatgtcatattaactttgttacctagaatttcttgaattatataaatctaatgatattgttatagctgtgattggaactcagaaacttcaactaccaagacaagaatggttagtaatgtcgcattcctctaaatgtttttttgttgggagtttatgcaaactgcttagaatatttgatgttgtccttccaaatcattacacaaatgcatcaaaatatgttctgtctttgttgatggttgctgatgaacttatggccctgagaatacttacaaatgcattttgtatgttcaggcattgtgaatttgtgatccccaatacaattgaagttgttcacggagctgttcttggcacgatggcttctttggtgatggagcagaactctttgaatgttttttttatcacaccacaataacaaattttatttgtggtaccagttttgtttgtatatatataggataggatgtgtgcagcgttcttgttgtgtttggatgt

SEQ ID NO: 15750 - DNA, 3593 bp, Oryza sativa
  ref <308>: DATABASE ACCESSION NUMBER: AK066264
  ref <309>: DATABASE ENTRY DATE: 2001-12-06
gtcacgccccactcccacgcctgatggctggtgccgccgcctcgccctctcgctgcaagacgatggtggcgccgtctcctttcactcgccctctctccgcgggatggcggaagcgccatctcattccccggccgcgccctctcgccgcaggcactgtctccgttcccttcccctgacagtttgggtgtcgccgaatctcactgggattagttcgccaccgtagggagttgccgggactggttcgtcacctctgcgacctggcgacctgacgatctgctaccacgcattctactcctccccaggtcaactttacactccctttgcctaatcctcttaatcaatatatatgatcgatccagcctgcttgcttgcgctgattccatatttgttgttctactcctctgctgaagccatcagcagacacaatttggtacactactacttaaatccctattatatgcatatatacatatctgttctagcccctgatctctattcttgacttgctgctcattatgagtttcacatgattggtaggaaggaaagaaaaaagggagtgcaggctagaatgctagattattcagtactaaagtttaaacatcaccgtccaggtacagatcaaatcctctccttctgtcctgtatatattgtattggaatttaatatatgttttcaggttgctgacatcattctgttgattgctattatgtctacaaaagtttgaggattactgcagctgcctatatgatatgattaagatcttttgcactgtaatagttgacagattttcttggtcatctgtatatgttttttttacactatatgaatgtcgtgctaaatcaaaatagctttatataggagcagcaaaattttactatgaaaatattattatagaaaatggatttgaaatgtatattattatggattctcaaccatcttctcctaacagcatttgtgcccctcaccaatgtcctgctacgatggcccactagatgccatggccgcatgtgttgttcatgctggtggcagcgatggcggcatccgagcccacatcaaggcctgcgccgcgctgggagcaatctgctcctccgttgtcaccgcacataacaccatagtcgttcaggtatgctgctgaatttctttcttttcagtttgctctcttcggctgattggctcctatgcgggcttctgagataaggagaagaaatgattaggctgacgccagtaaaatttctctctttaacaaaagccttctatgtgcttggtaaaatttttagtggcaaatctaagtttattctcaaatacatttgttcctgcaactttttaattataatgtcgtataacttttatgccagctaactctgcgtaaaaaacttttcactaataatgataaaatattgaagatgacagtgcaccatctatgtcaactaccagaaatgtacaggttaaagatgtgtacatgatccttcataatgaaatcctgatgtacatcggtacatatatatgccaattgtttctggaatcttaacaaattggtctacaagaatatatacttaaaaaaacctttttttattattatcaattacgctcattcaggattgtagataaatgtatatgatatagtactacatggcagatgtgatttttttcccaagatatatacttcaaaatataaaaagttagttggagagttcaagttttgatgttctttgcttagttgtccttttcctgtaaatgttaatgagtgcgaagtaatgtcagtattccttcattgtacaatactggtaataatattttgtgggcatgtcaatgagttttcttgctgccacctttctatgcttctgtttttaggtatgaatgttttcttattgtcttcttttgatgatatatgtggtcttcatatttcttatcagataatttaggtttagttccacgatagcatatcatgtttatgctatcggaaggttttgcctcaatttccttcctctccaacaaatcatattttatttgttaattcgtcgtgcgctaattcagtacacataatggtaacatacgcatttgcattgatggtattctttgtcgacaaacttatattggctattgtgatgcatacatcatcagaaattcactgtaagcctgacaatcttggcatattacccttatatttggatcatgcagttaattttctatgagacaaacctcagggtctttagggctcagtatagacagataattgtgccgatattaaggtaatgatatgatttcatggtgcgggtcttttagcctcctatctggaggaagctccattattctacgaatcatattgtaaccaatacattgggtcaatattgggtctataagtcaaggcattaatcacaggttatgttgtacatctagcgaacaaatatttatttggttcgattgaagatttcagtatttgtgaactttactagaccgcaattactacatttttaaaatcagtgcaggccctatgtatattagctaacatttttcttgtgctagagtcatttctatatctgctactattgtttaatatttaatggaacattgatttcataggttagcgttgtttgcagggtgtttcagtgacactgaaaccatggttgcctgagggaattaaagccacaggtacttctgagttgtaacctgcatagttccattatcggttgatctgtgtagtccataccgattaacaatacatatgtgctattccaaagaatccaacccttagtatctctagctttacgtactgtgttattctcttttctgctttgatcataaagtattatttcaatttatttgtgtgtgacgaagtgacatgcacttcaaacaattttacatgagacatgtcatatgttccaatagggcacactggggtgtaattttttcttgacaagcattattcctactttcattttttttcagcgctgcattgttttggaattttctaataacccatccttccaattgaattttttctttgcaaatatacttatagagttttcattataagctgacttcaaaatatgattttataactttttttaattcatgaaatgttatgtttgccccttctccaaagctacagagatatttcaacacggtttcttatatgagtatttgtactacctactatatactcattgtgtagcaatatatggatgacatccaaagatgccctgtattctgtaggggatacctcaaaattctgtgccattatgcaaaggaggtaccaatcgtctactaatctgttgtaagtgatgtactgttgtttttattgagctaaagcactaaatttttctttgtgctgcagtgctatagatgagaaaagattcaattagttcatgacgaaggtatctatgagaaaatgctgcaattctcatatcacctaatgattgttgttttttctaacctatactccacattatgtaagatccattgtcctctgtcattgctacttttttgtaagtgtacatgattgtacaaacaattatgtgagcaaacagattgtattcacatttaaatcttggtgatagtcacaatgtgtacatgcatatgtgggtatgcttctg

SEQ ID NO: 15751 - DNA, 3999 bp, Oryza sativa
  ref <308>: DATABASE ACCESSION NUMBER: AK066265
  ref <309>: DATABASE ENTRY DATE: 2001-12-06
tgcaggctgtagccccaccctgtccccaacgtagcgcccggctgttggagctcgacgccgtcgcccttcgcccaacgcggcttctggagcccggcaccgccggctggatcccaagccccaccccatccccaggagctcgatgccagcttgctgcagctccaggacgccgggcttcatgggcacaactgctgggaacgcccccaagagcccgacgccgacgacagtagcccgcccccgcctctaggatctcgacggctgggccggctggctgcagatcctggccgctgggcttcacgggctcaaccgctaggaagcccccaagagctctagcctgggatcactgccgacggcgggtgaggtcgaccagagactgccccatccccttcaattaggaaggaaagatggaaagaacttggatgaattgtaagttgtttagcaaggagcatcgggagggggtcactgagttcatggactttgtttgtaaaaatttgagtggcagtcagaagatattatgcccatgtcgtaagtgtttgaatcggttacatcaatataaaggacgtgtggaggatgacttacttatgtacgggatgtctaacacatacactcggtggatacatcatggagaaccattggtcattgtcactggaaatgttgagcatttgaatgaagatattggctgcaatgttgagcatttgaatgaagatgttagctgcaatgttgaatttgagacgaatgagcctccggatgacccagaagatgatcaaatgtaccgtatggtacaggatctgtacccagatcaaaatcatggaccaagaacaaagtcaaagtttgccaccatattagaagagatgaaacaggtgctacaccccggtggtccctatactaggttttcttttgtggtgaagttgctccacatcaagtcattttacagaatcagcaatgttgcattcagtgctttttttgaccttttaagttcagcatttccaaattgttctctccctgcatcctatgctgaagcgaagaattttattcgtgcattaggacttggatatgagtcaatacatgtgtgtccgaataactgtgttcttttccgaaaggagttggctaaaaaggatgcatgcccaatatgtggtgcttcaagatggaaggatgcagatagccgaaggaagattccagaaaaggttctaaggcattttcctttgattccaaggttgaagaggatgtttggatcgaaagaactttcagctgaggcacaatggcacaagttgaagaggaaaccagtggacaatgagcttagccatcctgctgatggtgaggcatggaaagattttgatagaaagtatgaatggtttgcaaatgatgcacggaatgtccgacttggcctcgctactgatgggtttaatccatttgggaagatgagctcctcatatagcatgtggccagtatttcttatcccttacaactttcctccgtggcaatgtatggagcaatccaacttcatgatgtgcctacttattcttggtccgacatgccctggaaaggatatggatctcttcctgcagccactggttgaagaattgttaaatctttggagtggtgtccctactttggatgcattgaccggcaaagaatttgatcttcacgctgcaatcatatggtgcattcatgattatccagcattgagcacactttcaggtagagtaactagaggctactatgcttgcgtttgttgtgataaaaatccttgctacaaaagacttaggaacaagatttgctacattggccatcgccgttttcttccagtggaccatatttggaggagaaagaaagattttaatggtcagactgaagaacgtgcgcaaccggaagaatttactcaggatgagttgatgcagcaattggcgagggtggaacatgtaagacctgggaaccatcctaataacaaaaagagaaagagggtagaagaaggtcaatgctggaagcgcaggtcgactctgtgggatttgccatattggtctaatttaaagctacgacacaatcttgatgttatgcatatcgagaaaaatatatgtgaggcccttcttggtacatttctcgacatcgcaggcaagtcaaaggactctgttactgcgaggctcgatttagaagatatgggcataaggaaaaatttacacttgaaggatgatgggaattcagcatgcactgctccacatgctccatatgtgatgactaaagcccagagaaaagctttctgtgctttcataaaaaatgtcaaattcccagatggatatgcctccaacttagcaaggtgtgttagtgttgatgaatgcaaagtacaggcattgaaaactcacgactgtcatatccttctgcaaaggatattaccagccggtctccgaggaatcatgcataaggaaatatatgaaacaattgctgaattaggtaactttttccagcaaatttgtgctaagaaattgaagttagatgctttgaacaagatgagaggtgaaatcccaataatattgtgcaagcttgagaagattttcccgcctgccttttttgatgtgatggtgcacttatgcattcatttaattgatgatgcaatcctaagaggtcctgttcaatatggatggatgtaccctgtagagcgtaggttgctgaccttgaaacgctttgtaaggaacatggcaaggcctgagggctccattgcagaggcatatgtcgcaaatgagtgcttgactgcttgctcaaggtattttgctgatgttgacactaggcacaatcgtgagggtaggaacaaagagcgtgttcctatgagtagatgtggtttatctattttccagcatggagcaaatctgttgggggcaccaaggcttacatatgagtagaaggagtatgataggatggtttggtatgtcctcaacaatactaaggaggtcgagccatttatagagatttacatgaaggatttacaaactgctggcagtcatgatgttgaggggaaccttgctaaggaatttccaggatggtttaggaaacatcttgctactcggaggtttgtgaatggagaacaaatcgatgaagacctatatgcattggcaagtctaccacttcttagagttcgtatattttcaggatgtattgttgatggtgtccgatatcacaccgtggaacgtgagagcagtagaagaacacaaaacagtggagttatggttgagggcacacataatggagaagatatagacttttatggtcagctaaaagaagtaatacagttgcagtacaactctgacgctgacagtcaaaggacagtggtgttattcaagtgtgattggtttgatacctgtagcaaaaagtctaggatgaagaatgatggatatttcaaaagcatcagccatggaagttgttggtacaaggatgatgctttcattcttgccacacaggcaacaaaggttttctacttggatgataacaagcatggtgaaccctggaaagttgttcaaaaattttcgcatcggcacttgtggaatgtgaatgaggaggaaaatgatgacaggcaagagggaggggttgatctgacataccaagatgatgagcaggaaatatctcgagttgaaaccatggaaggatctctggtcgacaaacaaccagtcaacgaagatggtataagtgtaccaaagtccctagttgatcagattcgcaggcaacgggatctggaagttgaagaagatgacctgtacaatgatgatgacgatgatgataccttagggcagtatgatagtgaaaatgaatgtacaattatgatccctaatgatgatggtgagtatagtgatgtcgagtaattgagatatgtgaatctgagttgtgatgaaattgttgtttttaaacagctcctaatgtgttagccgtgaaataattatgaattgtgaactcaattgtgtaaactccttaattgagatatgcgaattccagctgttcttggtgcctggaattgtactg

SEQ ID NO: 15752 - DNA, 712 bp, Oryza sativa
  ref <308>: DATABASE ACCESSION NUMBER: AK066266
  ref <309>: DATABASE ENTRY DATE: 2001-12-06
gaacgaacgcctcgtcgcaacagctacaaacgcccacatcacacgcagaaatccgcatcaacagccagccatggcgtccacgctgaccaacgtcggcctgtctaccccggcggcggcggcgtcgtccctcgttaggccggtcgccggagctggacgcgtggtgtttccccgtgttggccgcggcgggttcgcggcggtgagggcgagcgggccaacgaacgccgccggacatctcggacaagatgtcggagagcatcgacaaggcgaaggaggcgtgcgcggaggacacggcgagcggcgagtgcgcggcggcgtgggacgaggtggaggagctgagcgcggcggcgagccacgcgcgcgacaagctcaaggagacctccgacccgctcgaggcctactgcaaggacaacccggagaccgacgagtgccgcacctacgacaactgattcttaccattatatgtttgctaatctctctgtaattaattataagttactgggttgaaaagattatttgtcgtagaagacagaggggagtttggtggaatggtggtatttacggatagttcaagggggaaatgggaaaaaaaaggttttttacacttgtttgtctggatgaatttgtatggaacttttctgcttgataattttcgcatgtgttagtatttgtatatgatgatataagtgggaaataaatcatcaaattttccagc

SEQ ID NO: 15753 - DNA, 2193 bp, Oryza sativa
  ref <308>: DATABASE ACCESSION NUMBER: AK066267
  ref <309>: DATABASE ENTRY DATE: 2001-12-06
ggctccgccattgcccagagcttttcttttctacacaaagggaagggaaagaagaagcaggagggtttggtatctgaggctgagcaatggggctggccagcgacagccctgcgtcgttccccttctccgccgccaagctcgccgcctcgccgcgcttctgcaaccccatcagcaggaggatattttctgatgttgctggagatttaacagtatcggtggatggccaatcttttctactacataagttccctctagtctctaggtgtggaagaatacgaagaatggtagctgaatccaaggatccagatctctcaaagttggagctagtaaatgtacctgggggagctttagcatttgaacttgctgccaagttctgttatgggagtaattttgaaattaatactgtcaatgtggctcatctccggtgcattgcagagtatttggaaatgacagaagagtaccaagaggagaatctcattgttcggacggagacatacttgaatgagattgtagtcaagaaccttgataaatccctagaagtcctatgtgcttgtgatggattggatccaacagtggaagacgttggacttgtagacatgtgcgtcgatgcaattgcgatgaatgcaagcaaggagcagctggtttcaggcttggctcatttggaatgtgatgtcggatcaggaaagttgcgcatgcattgtcaagattggtgggttgaggatctttctgcactaagaattgactattatcagcgtgttatcgtcgcaatgagaagaactggggtgaggccagagagtattggcacatccattgtgcactatgctcaaacagctctgaagggtatcgaaaggcgccatgtatgggactcaggtcctcttgttggagacaaccaacgagtgattgtggagacgctcattgatctgttggcaacagaaaagatcacatcggttaccttgtcattcttgtttggcatgctgagaatggcaatagaagttgatgcaggactagattataggattgaagttgagaaaaggattggacttcagcttgagatggcatcacttgatgatcttctgatccctgcaacgcagacgagtgactcgatgtttgatgtcgacactgtccatcgcatattggtgaacttcttgcaaaggatagaggaagatgattcagggaacttatcaccttgcggatatgagtctgatgatggactaaagtctccgagccacagctcggttctgaaggttggaagactgatggatggttaccttgcagaaatagcaccagatccatatctgaaactgcagaagttcatggctctcatcgaactcttaccggactatgcgagaattgttgatgacggactctaccgtgccattgacatatacctgaaggctcatccatctctgacggagtcggagtgcaagaagatgtgcaagctgatcgactgccagaagctgtcgcaggacgcgtcgagccacgcggcgcagaacgaccgcctccccatccagacggtggtgcgcgtcctctacttcgagcagctccgcctcaagtccacggtgtcgtcaactaccccccacaccacctccctcggcggcgacggctgcggcgggtcgctgtcgcagcggatgatgatgaccggcggcagcggggtggcgagctcgtgcgtgtcgccgcagcggggcaactacgcgtgtctgcggcgggagaaccgggagctgaagctggagatcgcgcggatgcgggtgcggctgacggagctggagcgggagcagggggtgatgaggcaggggatgcgggatggccgtggcggcggggagcacggccgggcgctgctggcgtcgatctcgcgagggatcgggaggatcgccatgctcggggtgggggcgcagggcggagcggagaggaggaggaagacgaagacgaagaagagctctcactcgcagtctcagtggtcgtcggatggtggcgggaagacgatgatgatgagcagcaggcggaggcacaaggcgtcatctgtcacctacgctgctgcctcctgaatcatcatcaaactgcatgcttgctcttgttactgcatgaatgcattttacaaggaaaagatgggcagggaaaatgtaaaattctacagctaggtgaagagattaaagtgttaacactcctttattagataagctaatctagttctattgt

SEQ ID NO: 15754 - DNA, 3777 bp, Oryza sativa
  ref <308>: DATABASE ACCESSION NUMBER: AK066268
  ref <309>: DATABASE ENTRY DATE: 2001-12-06
gacctcgcggccccctcggttttattttttcttcttctcttcggcgtggtcgcgtcgtcgcgtttgcgtcttcccgttcccgatcccttcctccctctgcctctcgattcgattcgagtttcttcgtttttttcccctcttaataatcttcgtgttgatttggattgtcgtcgtgttcttcgccttttctgtccgcagatctccgtgcgacgctgcccgggagcctcctctatctggattcgttcgacttgattgattgattgttcggtttgcttgcgacgtgtttgatttttttcctccccggtgattcgattcgatccgatcctatccgaccccttctctggtctcgatttctgttttgtgttgttccccgtgttcgtcctctcggcgtgttcggttgttgcaggagcggatttgatccgggattttggaggttcccgtggcgtcgtgtggcgaagggggaagtcgaggtttcgaggaagaggtcagtttcccgtctacggtcgtttgatttagtcacttgggttcggtgattgatttcagatttgagtggttgattaccttcaatcgatggatggatgatcatcgggttcttatctgtccttacgcgaggtgattcgagaccctgggttgatagttatttgtaaccgctgatctggcttgtggtatgtgtttgtgctgctctagatgatgcaggagggagggaggctgttgagatgaaccgaattggtggaggtttgattattatggtccaggttcatggttgctttgattattatgatgaatcggggaggtggaggtttgattgttatggttcatggctttttgattagttcatggtggttctgaaattattctgacacgaaagtttgtggtgtcgtgacaacgttcactggatttcctttggtcagatcctcaagatgtgcagatttctaagtgatttggagatagatttacgggagattgtcagatggaatagcaatgcttcgtttggattctgaaccccccttgatttgatttagttgttgtcagcataatttgattaatgccttgaaaagtctgatttgggccgttggttgttcttcagaattattgggagttgcatctcacggcgagtcctatttgctgcatgaattggaatcaccatacatacaggccgctggcagttctttttctgtgatcgacaatcttccccttaatcaaattttccatgttcttcatcagtaattcttagttcttgcagatagcacacaactaagatggaatttgcaatccaaacctgcctcggtctgcgagctcaagacaggctttatacctatgccactcagtctttagtgcatgttttctatgcttaagctgctttcctccaaaataatactcttgctcactgtaggtctctaaataagagtaattgttatggctcgtctcagtgaagctcactaccctttttctcttcaattcatcgttagaagttaaaaatttacaaagttgaatttcttcccaaataaatgttctcttgcttgctgcaggcctatctcataattttgcaaggccaaccttcaccgagtgaaatctttaaatcaccacccttctctccaattcatcattagaagttatatacctcacaaagatatatttaagtccgatctattgctcactgcaggtttctgcataatttctatggccaatctgcaggtcctagttcataattttgcatggccagccttcactgagtgaaatctttaaatccccttattcaattcatcattagaagtactcaccaagggtagaatttaagtgcttggatttatctgcagaaatggaattgcgtaggaattttggagcttcaagatagatgtgactactggagaattctacaaccaaaacatacttttcctagtttgcctaatacttaacttcctgtttagtttctatttcggtcatcagaattgcttcatacatgtagcttagattttggtgtgcctttgtctttctttgttggtcgcagattccttaattttctcccaagttgacaaggttattgattggaggctgttggcttgttcggtttgtgttttatcaccttcaattgttacctatgtttatccgatagtctctgggttggtctgggggttggagctctgaatgcacacaagatgatgcagaagggtggctatcgggagattaaatccaagagtagaggatggatcttttgatattacggtggactggagcaactatcatataactggaaaaagatcattaagccaaattcacccactcattattttagtacttaccatccggtttagcatcttctcagcgatgcttatgtggattttcgttttttctccagcaattggaagtactagctttgttggagttgctattttggagctaatcagggcactggtttcttctacatacagattcagtacagatttggagctgcaaaatcaatacagatttggatgttctgacctctctaaacaggtctatttttggtcattttgcaaggcaaatccaattccgattgaaatcttctgaacaaccaggattttcccttcaactccttattaaaaagttaaatgccccacaaggacagaatttgaatactcttaatttcgatcatcagggatggggagggttcgagggtgtgttttggagcttcaagctagatgagaccatgggagatcgtacaacctacaactatatacgatttagtgctctccttgcattcttatgtttctatttctgttttggttgataatgtagcttcttatgcccatatttgatttggcgtcatttgtgccttcctctgcatgcagattctccttttgtccatgtgacgaggaaattttctcgaggaaattaaattgcctggtttgtggtttaccattttgtggtttgattgattgtttctagattcggtgcatgtgttttcttgttcgcatattgattaccattttgtggtttgatcgattgtttctagattcggtgcatgtgttttcttgttcgcatattgattacagggttggttggaaatgagctccctgtgagaaagctagtacctggaaattgaggaagggcagtaagttattagataaggtctggtcgtttcatagatttatcttgatttggattgtctgtctctatgctgttctttgtctcggcactttgaggaattttacctaatggccagctatcagacattatccttttatataaggtgtgttccgtacccttggtataaattattttaaaagctaatcttgtttagcgtatgtgtttctgtgctttagatgacacgccaaagggtggatgttggagttgaaaagggatctatgtttggttagttcatgggaagtccgtgttatttatcaatagtggttacctcattggatttgctgtcattcaatatctacaagttaaggtttggagttgaagctcgactggaccaaagatcatgcattggaaaaaattaaccttttgtttggatttcttcatgtgcacacttcatctgtccaacaatacttatctgcttcttctccaacaattagaagtatatatatggcttgtggagtagctaatttcggaaccatgcttggagttccttccctgacttcttttgttagtctttgttagttaatgcttttcagacattggttttatatatgtcccttgttgattcaatgcagacatggcatttgaagatacaaagtgtaatcaatatttgtttggacgcgtgctcagttgctgaattctttaacccaggcc

SEQ ID NO: 15755 - DNA, 1878 bp, Oryza sativa
  ref <308>: DATABASE ACCESSION NUMBER: AK066269
  ref <309>: DATABASE ENTRY DATE: 2001-12-06
gctgaatccctcctcctactcttctcctccccacattcccaaagagaagcttcgcggcctcctcctcctccacctcctccgcatcctcctccgagcccccagatccgccgcgcgtgctctcgcgggtggtggtgcttctggtcttgggggaggggaggggcgcgagcgagcgagcgaacgagcgagagagagagagagagagagaggaaggggagggagagggaggtgtgtgtgtgtgagagagagagagatggcggtggagaagacggtgccgggcggggtgaggacggtgctggtgacgggcggggcggggtacatcggcagccacgccgtgctgcagctcctcctcgccggattccgcgccgtcgtcgtcgacaacctcaacaactcctccgagctcgccgtccgccgcgtcgccaccctcgccggcgaccactcccggaacctcgccttccacaaggttgacctccgtgacaagggagcactggaaaaggtttttgcttcaacaagattcgatgctgtagttcactttgctgggctaaaagctgtgggcgaaagtgtgcagaagccattgctttattacgacaacaatgttaatggaacagtaaatcttctggaagttatgtctgcccatggatgtaagaagttggtgttctcatcatcagctgcagtttatggatcaccgaagaactcaccctgcacagaagagtttcctctcactccaaacaatccatatggcaaaacaaagcttgttgttgaagatatttgccgtgatatctaccgtacagatcctgaatggaagattattctacttaggtacttcaatccagttggggctcatcctagcggataccttggggaagatccatgtggcattcccaacaatcttatgccttatgttcagcaagttgctgttggcaggaggccagctctggcaatactaggaaatgattatgcaaccagagatggtaccgaggtccgagattacatccatgtggttgaccttgctgatggacatattgcggcattgcagaaactctttgagagctccagcatagggtgtgaagcatacaaccttggaactggtaaaggtacctctgtgctggagatagtcaaggcatttgagaaggcttctgggaagaaaattcctctgattattggcccaagacgccctggtgatgcggagattctattttcattacctgctaaagcagagaaggaactcaactggaaagcgaaatttggcatcgatgaaatgtgtagggatcaatggaactgggctagcaagaacccttatggatacgggtcacttgactccaccaagcagaacggacaccactcgtacggatcaattggctctcccaagcagaatggccactgcacaaatggattttctgaatccactaggcataatggtcacaacggatatggactggtcgactctgccaagcataacggcaacggccacttccactgaccatgcttcagccttgagttggcctgtgggctccttgtacatgtgatgtatcgaaacgatgatccgagatcgttgcaggtcaacgatggattggcaggtcacacgaacatggtcgagcttagataatattctttcattgttcatcgttggctgaagaatcccactgcctgtgggtatatatttatctcctactttgagtgtattatttttctttcagatttgttgtaggaatgtgacatttagccaaccagctgattcgattctttcactgctaattgagctgcattatctgttacagagctttgactgattcctgtaccatatatctctttttgtgtattttatgatgtaatatttatgaaggggaattagtctaaaaccgatgctcatgttttctcttc

SEQ ID NO: 15756 - DNA, 2780 bp, Oryza sativa
  ref <308>: DATABASE ACCESSION NUMBER: AK066270
  ref <309>: DATABASE ENTRY DATE: 2001-12-06
gattttcccctctccccacctccgcgtctcctcaccatggcttccgccttctcccccgccaccgccgcgcccgccgcgtcgccggccctcttctccgcctccacctcccggcctctctccctcaccgccgccgccgctgccgtctcagcccgtatcccgtcacggagagggttccgccgcggccgcttcaccgtctgcaatgtagccgccccctccgccacccagcaggaggctaaggcggcgggcgcgaaggagagccaacggccggtgtatccgttcgcggcgatcgtggggcaggacgagatgaagctgtgcctgctgctcaacgtcatcgaccctaagatcggcggtgtcatgatcatgggagaccgtggcaccggcaaatccaccaccgtccgctcgctcgtcgacctgctcccggatatccgcgtcgttgttggcgaccctttcaattccgaccctgacgatcccgaggtcatgggccctgaggtccgggaacgcgtgctggagggtgagaagcttcctgttgtcacggccaagatcaccatggtagatcttccccttggtgccactgaggatagagtctgtggcaccattgatattgagaaggcgctcaccgatggtgtcaaggcgttcgagcctggtttgcttgccaaggccaacagggggattctttatgtggatgaggtcaatttgttggatgaccatctagtagatgtgcttctggattctgctgcgtcaggatggaacaccgtggagagagagggtatctccatctcccaccctgctcggttcatcctcattgggtctggtaaccccgaggaaggggagctccggccacagctgcttgaccggtttggcatgcacgcgcaggttggtactgtcagggatgctgaactcagggtgaaaattgttgaagagagagctcggttcgacagggatccaaaggcgttccgtgagtcctacttgggaaaatgcaaccatctccagcaaaatttggacaaattgcaggaaaaacttacaaacatggaaaatgaaaatcatgttcttaggcaaaaggcattaaacatgtctccgttgaacaatatgcccatgactacaaaggcttttcctcagaaattcgctacaccgattgggcttccaaatggcgagcagaagcacggatatgaaacaccaccaccagcaaaatatctcgcttcacttccacagagtttaactagatcaaggagaaccaggatgcctgttgaaaggcaggaggaaaatcatgaaatcttattacgatgcataaaggaaaatctaggattcaaggatggtaaaccagtcaccgcatgcattatctacagttgccttttacactggcgtgcttttgaatctgagaggactgctatttttgatcatgtcattgaagccataaataatgttctcaagggggaagaggctgacggtagattaccttattggttgtccaatacctcttcattgctatgccttctgcagaagaatttacggtcaaatggattatttgctacaccatcccgcaggtctggtggaactctagggattggtgacaagatagtgcaaacactcagatctccttcaaagcttatgggacgcagtgataatcttggacaagtggatgctcggtatccagccatattattcaaacagcaactaactgcgtgtgttgaaaagatttttgggcaacttagggataatctgaaaaaggaaatatcaccacttcttagtgtctgcattcaggctccaaaatcatcacgtgcacagcctggaaaagcaaccaaatcacctgggattggtgctcaaccaccatcaaactcccattgggacaatattgtcaaatttcttgacctgcttatggacactttacatgaaaattatgtgccatcattctttatacgtaaacttatcactcagctattctcttttatcaatatacagctttttaacagccttcttcttcggcgtgaatgctgtactttctccaatggggaatatgtcaaagccggtctgtcattgctggagaaatggattactgatgccacggatgagtttgcaggaacatctatgcatgagctaaattatatcagacaagctgtcggatttttggtcatacatcaaaaaaggaagaagaagcttgaggagattaggaacgaactttgcctgaacttgagtgtacgccaaatatacaggatatgctcaatgtactgggacgacaaatacaatacccaaggaatatcaaatgaggttgtttctgcaatgagggaggaagtaaacaaagatactcagaatctcgtatcaaattcctttttattagatgacgacttatgtataccgttttctacagaggatttgtcaattgccatccctgcaatagattatgtagatatagaacttccagaatctcttcatcactatgcatcagtacagctcctactcaagcatcatgatccacagcctgtctaatagtatggttggggttgccttgaagattcgtttatttttattcccaggttttagtggcgttatcttttgaactgttgtatggttgttaggcttgtagtcttaagtttatccgggggtgaaaaggttgtaacagaaatggtaggatgtcatttcaaagcaacaattgtttctaggtgaaaattaaaccaccgtggaccctgggtgtccacctgtcctatgttcagatcatcagatgtacatagtgttgtagagactgttaagcatttgccatggaaaaataactatcttctgctgcgtct

SEQ ID NO: 15757 - DNA, 877 bp, Oryza sativa
  ref <308>: DATABASE ACCESSION NUMBER: AK066271
  ref <309>: DATABASE ENTRY DATE: 2001-12-06
gttccccatttcccccctttgaccaaaacccttgaccgacaggcgatggccaaggcgacgtgaggtgcggcggcggcggcagcggctggtgtggagcgcggcggagcacagcgacggctggtgcggagcgcggctggcgatagcgagggcggagacgactagggcacaatccgtggcgacggcaagggcgcaatccgccgagacggtgaaggtaggagtggattcgcgaatagaggtggtgcggtgatggctagttcccagagcgacgggtcatcgtcctattctcagcattcatcgaggagtcccatcccatatagggttggtccttttgattaccagtcggccgtgatgtgcgactgtcgcgtgaaggctgcatggtggatctcgtggagtccggacaaccccagccgccggtacttcaaatgtcgcaatgcccaggaaggtggatgtggtttttatgcttggtatgatgggccgacgaccacctttattagagaagtgttgaatgatttgcgagatgcagtttggtcagcgaggagggagaaggaaagacttgtttggctatccaagaagagaggatgaaggttgaggagaagataatagaggttgatgctgctcaaagagagttggaggcagcaagaaagctgtcatgtgactatgctgaaagaattgctgtgctgaaggatagaaatagtaggctagagaaggagagatgttatctgttagttgttgttatgggttgtgtatttgtcatgtttgcactggtgttggtaaggagaaatgtagggtgaagtatttgcagcaagatgggtgttgtggtgttttgtaatgaactttgtcaggttgaaagaaatatctgcaagttgtggtgtgttgc

SEQ ID NO: 15758 - DNA, 1637 bp, Oryza sativa
  ref <308>: DATABASE ACCESSION NUMBER: AK066272
  ref <309>: DATABASE ENTRY DATE: 2001-12-06
gaatccccaaatccaccgcgcagacacgcacgccggccggccggcggacgcgatccgctccgttgtcatcgctcgcgatacacgcagcgactaggcccagcaggtctgcacggcggtctcctccggctgctcctttcattccaggcacgccgggcacccccggttcgttcatcgcatctcaaagaaggtagggaagcatcgcatctcgccgggtattgccagttcgccgccatgccccaaccgaagtgcccaacggagcggaagaaggctgaccacctccaattgattccttgcggggccccggccgggtcttgcgggggggtcttgcaggataacaatgtgcaccaagattgatgtaagttgctccgagcatatagtgatgtaaattcttatactctcacacatcggcgacatcatgtgttattcttgaatactctcccgcgcctagccgtagcccgaaggcactgagcctcaatacgcatatcatatctaccagttctcctttatttttccattgttattagagaaccggatctgagccgtcttggtctcatgtctttctttctgtctttttttcttttcctaaaaaaaaaattaaaattggatcttgcctggcagtcccgttgtaagacgaacaccttgtccggaaaggatgtcgattccaaaaataacacggagaccatgttcgagttcatttaccaataatccctatggcacgcatatatacatatataagtatagccgatgcagtgtattgtatacagattattattattattttctaacaccgctagttaactcattgctaattctgcatgtacttggcgccatggactatgaattcaagacatacaagaagaggcagaggggacaacagcaaatggactttgaattgaagacataccacaggaagaggcagaggcgaagggggcaccagcaaactgtagagttacccgatgagattgtgagggaagtcttgatctggctccctgtaaaatccctggcaaggttcaagtccgtctgcaaggcctggctttccattatctccgaatcttgttttatccgtgagcatctccagtgctccaagctgaaaagatactggaacccgtcttcctttctcatcacgccccatattcctctgaaaccaggtgactctatctttgctgctttctccaccgacatccgcttctatcagtggtcattacaagaagacacgagggctgctgcaacactcctttataggaggcacttccctgccggtgagtttgaaccggtgctcccaatggcacattgcgatggcttggtgctgctccccactaagaccaaggcctacgtcttcaatccggccacaagggatgtccttgcactgccagagagcaatcgcaacatgaggcaacgtgacaacttgggctttgatgcttcgactggcaaatataaggttgcacgatctttttatcgttcccgtgaatataatcccatggggatcgctgcaatgggtttcgaggtcttcactattaatggagaagaaagctgttggagagaaactttggtggatccaccctaccctgtgctgtattcaaagattgttacacactgcaaggggtgtctattctattacattgataaggagaatcagc

SEQ ID NO: 15759 - DNA, 1853 bp, Oryza sativa
  ref <308>: DATABASE ACCESSION NUMBER: AK066273
  ref <309>: DATABASE ENTRY DATE: 2001-12-06
gaacgaaacagagtagcacaagaagcagagtgcggctagctcacagtcaccatggggatgctgcggtggggagctcacctcctcctcctcctcctcgccgcggcgacgtggacgtgcgccggcgccggcgccggggtgacgagcgagtaccggcggaagctggaggcgacggtggacatgccgctcgacgccgacgtcttccgcgtgccgccgggctacaatgctccgcagcaggtgcacatcacgctgggggaccagacggggacggcgatgacggtgtcgtgggtgacggcgaacgagctggggagcaacacggtcaggtacgggagctcgccggagaagctggaccgcgcggcggaggggagccacacgaggtacgactacttcaactacacctccggcttcatccaccactgcaccctcaccggcctcacccacgccaccaagtactactacgccatgggcttcgatcacaccgtccgtaccttctccttcaccacgccgcccaagcccgctcccgacgcccccttcaagttcggcctcatcggtgacctcgggcagacgttcgtctcgaacagcacgctggcgcactacgaggccaacggcggcgacgccgtcctcttcgtcggcgacctctcctacgccgacaactaccctctccacgacaacaaccgctgggacacgtgggcgcgcttcgtcgagcgcagcgtcgcgtaccagccatggatctggaccgccggcaaccacgagctggactacgcgccggagctgggcgagacggtccccttcaagcccttcacccaccggtacccgacgccgtaccgcgccgccggcagcacggagccgttctggtactccgtcaagatcgcctccgcgcacgtcatcgtgctggcctcctactccgcctacggcaagtacacgccgcagtggacatggctgcaggaggagctcgccacccgcgtcgaccgcaagctcaccccgtggctcatcgtgctcatgcactcgccgtggtacaacagcaacaactaccactacatggagggggagacgatgcgcgtccagttcgagcggtgtctcgtcgacgccaaggtggacgtggtgctcgccggccacgtccactcgtacgagcgcagccggaggttcgcgaacatcgactacaacatcgtgaacggcaaggcgacgccggcggcgaacgtggacgcgccggtgtacatcacgatcggcgacggggggaacatcgaagggatcgccaacaacttcacggtgccgcagccggcctactcggcgttccgggaggccagcttcggccacgccacgctggagatcaagaaccggacgcacgcgcactacgcgtggcaccgcaaccacgacggcgccaaggccgtcgccgacgccgtctggctcaccaaccgctactggatgcccaccaacgacgatgtataattattaatcgactccaaccatctcaaacttcttaatttgtatcactgctatgctattgccattcttcttcttctttagctttggataataaatactcctactatgcaataacaaatactactagcagagtctatcttgttaagccgtgagataattaatccccaaatgggacacttgccaacacatttggctaccaaattggatataattaaaaatgtttatattttggagcaaagagagtagtacaatctaaaagggagtcacaaaaggattggtttctttggaatatttttcatgtggctttgtttgtaacaaaagagattgcatctaaagttctcaaggaaagttgagaatttttgtacttcaatggaaataaacagtgagattatccagaacagagattttcttct

SEQ ID NO: 15760 - DNA, 2109 bp, Oryza sativa
  ref <308>: DATABASE ACCESSION NUMBER: AK066274
  ref <309>: DATABASE ENTRY DATE: 2001-12-06
ggcgcgatccatctcccgtctccccgtcctctcttcgtcaagtgtcaactcctctcctctcctcgcgagttcgcgcaccgcctccgccgatctccatctccgccgccgtcctgctgcttccgccgcatcacatcccggtgagcatccctatccgtcacgctcacgcgcatcctctctcttagcgcgtaaaagaagaagaaatctcccgtctcgttctcgttactgtctcctccgctcctctccttgcgccgctgccaagacgaacaggggggaggaccgggcggcgatctccatctggcgagcagagcagagcagcggaggtgaggggatcctggtgagcatccgcgattcatctctctctctctctcctccaccccaccgggactggaatttgcttgcgttcgtgaaccctactagcttctcttctagatctggaagaagctcttctcctcctccttaacttgatagccttaaacctctcttaattcaagtaataacagtttgtttgttcacccaaaagtttcccaagttggatccgcccctgtccagcaccccaccgtcgagtccgagcgactaatagtgtttttcggtgatcgactgatttttataggctgtccgtagtggagcccgggcagccacccgacctgcccgggagctgtctccgcccttgttcttagtgtaattccctggcattcagattcagggccagtctagtgatattttgtcttcgatatttgtggagcaggtagagtagtcagcatacccctttctcgttgcttcttattagttggctatggatgaagatgtaaacatttaaggcctggtttagttcccaactttttcttcaaacttccaacttttccatcacatcaaaactttcctacacacacaaacttccaacttttccgtcagatcgttccaatttcaatcaaacttccaattttggcgtgaactaaacacacccttaacttgttctatagggcacaaaggatacaggggtgattaaattactctgtaatttccatatctagcattagtgtaagtacagttggcattttggcccaagacctattaacagcttttgagattcagcaatgccaagtgccaactaaaggaagctatcaaattgactatcctaatggatcaactaatactcagtttcatttagcctgtaggtaaaattgtaaaaggctaggaacagactaataatttgttatcaatattacttccctaatcatcatcatgtttaaaaagcaccagttatttgaagatgctgattgctgagttgaactgaattgacattgggcaattttcctcagcctctggctcatttttgtcttgacattctgttccccaagaaatcatgccttagatatggttttttatgctgttggcatcttttatcatgtgaattttgacaatagtacttctcgtttctagcatcatgtcggatatgaaggacaccaatgctgctggacctgaaactgttggaaatcctgaccctatggaccaaactgaagataactccatgccctcagctcaagaacaggaattagcaatcaagaagaaatttggaggactaatgccaaaaaaaaccaccactcatctcgaaggatcatgaacgggcctattttgattctgctgactgggctctgggaaagtctggacagcaaggcgctgcgaaacccaaaggacctcttgaggcacttaggccaaagttgcagccaacacgacaacagcagcagcgttccaggcgcttgattaacacctcatcagaaaacgaggatggagacggtgctggtgctgaggatatgaacatcaactgacctgctcagggagtgttctgttgggaacctcatgattcaaagcagctcattgttcgtggatcgcagggaaggatatgatgtctttgatgtttccatagatatgaaaagaaatgttgtatttttcaaagaccgatgttaattcatcgcacagcttacctatatctgtgccaaatttcagcatagactaaaccattgtttgcatacggcgttgcactccagtcgtgctacggcctatttgtcaatggatatttttaaacaagtttgtattgtacaaaacagtggc

SEQ ID NO: 15761 - DNA, 689 bp, Oryza sativa
  ref <308>: DATABASE ACCESSION NUMBER: AK066275
  ref <309>: DATABASE ENTRY DATE: 2001-12-06
gtgggacaagcggtagccaaacacctgtaaacttgtttttgtacaaatcacccccagtttgtctttctgaagaagcgttaattttgaggccatcgagttaattattgtgagccaccatgggagctgctcggctttgcgttgggttgcaggcaatcctagtgatgtccctcttgctgccgccgccgtttctgccatgcgtgctcgccggcgctggccctggaggcgagctcgtcgccggcgaggagaagcatcaaggccgtgtatttgcttcaggcatatcaacacggtctcttcgaattctatctcaaaatccaggtcccggcggtgaacaccatcctcctatctcttccggacgcggcaacaatggataaaggctagacaatggatctatgagagtacccaagaaccgattagaactaagcaggccgatccaggtgttagaactacgtttaggaataagagtaaaaatacgaattatcaagataaaataaagctctccagatataattctggaggttaggtttactaacttgtaatacaagtttccatactctattggcgtgttcggctgtctttatttgcaccgtgccaccgtgttgcagtacagtacttttatgtgtgcaaagcacaaccgaacatgtcctatatatatatttagaaatggatggggtatatcctatgagatagtt

SEQ ID NO: 15762 - DNA, 3162 bp, Oryza sativa
  ref <308>: DATABASE ACCESSION NUMBER: AK066276
  ref <309>: DATABASE ENTRY DATE: 2001-12-06
cctcttcctcccccatctctctccaaatctctctccgatctgtagccgaccaccgccgccgcggccgccggccttctccccgccgccgccgccgccacctcgccctcatcgctgcgcgctcccatccccaccgccccagcgagcagctccggaggggcgcggcgcagacgcccctcccctctcccccgagcatcccatcccatcccctcccgaccgtgccctagccttctccccccatcgcgcttgcccgcacgggcggcgagcacggctaggttttggagtgggggcgacgccgacgccgacgccgacgcggcccgcggtctagttcttccttccatcggcgtccatccatctcgtctcgcatcgaattgaagagggatttgggggttcagctgaaccccctccatgccgcgcgacgctaggtcagtcactggttgccaggagatactcggagcagccgtgaattgctgatggccaaccacgacttggttctcggccatggcgaggaccccgagctggcgctggggcagaatcaccatgactttgggcaggaccacgggctagggctcggccacagccatgagctcggcctcggccacgcgcacgaacatgatctcgtcctcgggcagtcgcacgagcacgagcacgagcacgaccatgatctgggtctcgggagccaccacgacagccagctggtcctcgcgcatgatcaccacggccacaccagtgagctcgcgtttgggcatggccatgatgaggacccgcattccttggatggtcaggaccatgatgggcttgccatgacggagaatcacgtgctgacgctcacagatgcgcatcagcttgacgtcgaccagaatatggatcagctttctcttgagcaagcccacgagctcgctcttcagccagcccatgacttctcgcacggccctcttgcggttgcccctgttgttcagtcgcggaagatggtcgtcagctccgagtttcagcttgtggtggggcaggaattccctgatgtcatgagctgccgcagggccatccgcaacaccgccatcgcctgccactttgagatacagacggtgaagtctgacaagacgcgcttcactgcgaagtgctctgctgacggctgcccgtggcgcatccatgctgcaaagctccctggcgtgcccactttctccatccgaactatccatgacaaccatagttgtgtgggaataaaccatctaggccaccagcaggcatctgttcaatgggttgcaaatactgttgaggagaggctacgtgagaacccacactgcaagcccaaggaaattttggaagaaatccacaagtcacacgggatcacattatcctataagcaagcatggagagggaaggagcggatcatggcagcagttcgggggtccttcgaagaagggtatcggctcctgcctgagtactgtaggcaagtggaaagaacaaatccaggaagcatagctcgtgtctatggcaatccagatgacaactgctttcggcgactcttcatatcattccatgcatcaatatatggttttgtgaatgcatgccgtccgctcattgggcttgacagaaccattctcaaaaacaagtatctcggcaccttgtttcttgccacaggtttcgatggtgatggtgccctgtttcctcttgcatttggtgtggttgatgaggaatctgatgagaattggatatggtttctgtctgagctgcatgaattgctggagaagaacacagagaatatgccaaggctcactatattgtctgatagacgcaagggaataatcgatggagttgacttcaacttcccaactgcattccatgggcattgtatgcgcagtctcagtgaaactttccgaaaggagttcaataactcagtgcttgtcaaccttctctgggaggctgccaatgcactgactgtgatagaatttgaaaccaagttgctagagatagaagacacgtccccagaagctgtttgttggataagacgcctacctcctcggctttgggccacagcttactttgaggggacacgatatggtcacctgacagcaaatatcacagaatcactgaattcttggatactggatgcctctgggcttcctataattcagatgatggagtgtatccgacgccagctaatgacatggttcaacgaacggcgtgaagcaagtatgcagtggacaactatcctcgtgcctgcagcggagcgacgggtgcaagaagcaattgagcgtgcacggggctaccaagttgcccgagccaatgaggctgaatttgaggtcatctcgcctcacgagggaactaacattgtggacatccgcaacaggtgttgtttgtgccgtgggtggcagctctatggtgtgccttgtgctcatggtgtggcagcgctgctttcctgcagacagaatgtccaccgttatacagagagctgcttcaccgttgcgacataccgcaagacatactcacagacgatccatcctatcccggacaaaaccctttggaacgagacgtctgatcaaggccaagaagaagagaacaaggtggatgtgatcatcaacccgccaaaatccttgaggcctcccgggaggcctaggaagaagagaatccgtgcagaggaccgtgggcgaatcaagagggttgtacactgcagccgctgcaaccaaacaggccatttcagaactacatgtgctgctcccatatgaagaagccaatgtcggagttctgaagtagctgcagttttcctgtgaaaagttagaagttagagtctactccaccattcaaacttcctctttgcagatgggcacctttggttatactagatactgcttttggtttaggtgtaatttaataatgttgtgacaatactatgtgttcaaatcatatgccatggtggacctgcatgtcggcctcagctcattggatcagaccaaatcatatgagctggtgttgagtgaaaagtaattagcttaacctgttgcaaagtgaaattattttgttaaacctagtgcaaagtgcatgcaattttattgaaatatcatgtgctcaaacatgatgagtaccgcaccaaatatgtgatactcttgatgttacatcgcaagtatgactcatcgattaacctgttgtttatgtaatacctgttcaccc

SEQ ID NO: 15763 - DNA, 1224 bp, Oryza sativa
  ref <308>: DATABASE ACCESSION NUMBER: AK066277
  ref <309>: DATABASE ENTRY DATE: 2001-12-06
gatgccgcttggttactcgcatacacacactggcgcgcgcgcgaaatcgataattctgcgatggatttggtcgcgggaggagtgattcgcggactcccgtcatcctgggaacgcatcagatcgccgaggactccgctctttctcagttcttgggcttctcgccgccgcgttgcttttgcggcgtgctcgtcatgcccgctggttgtttgtcgaaatgcctcagcggtggtgccgttcgccaagaaaaaaaggaaggggggaagtgaggagccgcctgatgaggaggagggtgatgattttgttgatgagatggagggtgaagacgatgatgatgaggaggaggaggatgttgatgatgatgatctattggatgataacgaggatgatgatgatgactattcttttgaagatgattttgagagtgatgatgaacaagatctttatgttggggatggaggtgctggtggcggaatatcacttgctggcacatggtgggataaggaagcattggctttggcagaggaggtctcaaattcatttgatggagacttaaaaatttatgctttcaagacagctgctaatttaaccatcagagtacgcattgagaagatgtcaaccaggtatggttctccaaccatagatgatatcgaagcgttcacaattgcataccgtgcaaagattgatgatgcagagtcagcaggcaggataccacaaaacatatccttggaggtgtcatcccctggtgtggagagggttatccgcatccctgatgatcttgaacgcttcaaagaacgggccatgtatgtcaggtacaccattacaagcgacggcggagaagggatgacgcctcaggaaggcgatggagttttcaggctcatctcctacgacatggacctgtgcgagtgcacctggggtatagctgatgtgaagatcaacaggcagcaggccggcaagggaaggcccctgagcaagaagcagagggagtggcggctgcagacgccatttgagtcactgaagttggtcagggtgcattctgactgctgactgatcagatgcctcttttgagtaaatttttgtagccatctgttgtaattttgtatcataggtaaaaggtgctctgccattgtgtgtgtgcagtagctatatctgaaaaaacgtttgttatagcaagtgccaacacccaacagttacattcagtgatcgacgagatgagtttttctcctc

SEQ ID NO: 15764 - DNA, 3825 bp, Oryza sativa
  ref <308>: DATABASE ACCESSION NUMBER: AK066278
  ref <309>: DATABASE ENTRY DATE: 2001-12-06
gatgcgcgcgcgcgactcgtaggaattcggttcggattcgtgcgtgcaccgaaggaggcggaggcggaggcggcccaagcgtcggcgccacctcactctcccacccccatcccgccgcctcccccgattcctcccccaaacccctcctcctcctccgccgccgccgccgtcgccatgggtggccccctcaccgccgccggaggtcgaggagatgggggcgccaaggcggtggaaccgctccggcctccgccgccgcccgacccgaagacaatggccagatggtaccagctggaggcgctggagcgggcggtgcgggggaacaccctggcgttcctggagaccgggagcgggaagacgctcatcgcggtgatgctgctccgggcgtacgcgcaccgcgtgcggaggccggactcgcgccgcttcgccgtcttcctcgtccccaccgtcgtcctcgtgggccagcaggcgcgcgtcgtcgagcagcacaccgacctcgtcgtcaagcagttctgcggcgagatgggggtcgacttctgggacgccgccacctggcgatcccaactggaggacggcgaggtgctcgtcatgacgccgcagatcctgctcgacaacctccgccacagcttcttccgcctccaggacatcgcgctgctcatcttcgacgagtgtcaccacgccaggggcaatacgccgtacgcctgcattttcaaggaattttatcacccccagttgaattctagtgcgtcagaccctctgccaaggatatttgggatgtctgcttcgctcatttattcaaaagatttgaatccgcacaattattcaaagcaaatttctgagattgagaatctcatgaattccaaggtgtacactgttgatagtgaatcagctttgtcggagtacataccatttgcttctacaaaaatagtggactttgacgattccaacatttcatctgagctgcatgccaatattctcagttgtttgaatagattgaataaaaagcatatagaagctctggacagaaaactacatggttcatctctggaaaacgctaagcaaaggatatcaaaattgcatcatacatttgtatattgtttatataatctaggagtatggctggcagcaaaggctgctgaggtacaatcatacgaggaaaacagcctatccttctggggtgaaacattggataaaaatgttgagggcttcattagaaactacagcgaagaagtacatagagaactttcatgtttcttgaagaatggtcatattggtgaaaaatttccagctgattctcaagatgggatattgacacccaaagttcattgccttattcgaactcttctgcagtacaggcatatgcaagacttaagatgcattgtgtttgttgagagagttatcacaagcatagtattagagcacctactttcatctattcatcaaatgtctgggtggaatgttaagcacatggcaggaagccgtcctggtttgctatctcagagcaggaaaaatcatacagaaattgttgaatcttttcgaaaaggaaaggtacatataattattgccacacaaattttggaggagggtttagatgtgccaagttgtaacttggtaattcgctttgatccatcagcaacagtatgcagctttatacagtcccgtggtcgagctgggatggaaaactctgactatcttttacttgtcggaaggggggatgtggaagctcaaactaatgcagagaagtttctcgcaagtgggcaaataatgcgggaggaatctctgagattgggatcaatttcttgtcaaccacttgagaacaccttgtgcgaggatacctattaccgtgtcgagtcaactagagcaattgtgacactaaactccagcgttccattaattcattttttctgctcaaagcttccatcggatgaatattttaatcctctaccaagattcgatatagacaaggcatctggcacatgcactctgcatcttcctaagagcagtcctgtgcagacagttaatgtagaaggagaaggttctattctcaaggagacagtttgtcttaaggcctgccaagaactacatgccattggtgcactcacagattctcttttaccagaattagatgttccatgtgatgaagaacctgacatcgttgttgagaacaaaattgagcagccttcttactttccagaagaatttgtggataattggcgctccttttctcgtcttggcatatattattgctataagatctcattggaaggatgtcccaaaacagcttctccaactgacatactgttagctttgaagtgtgatttgggatctgactttacttctagctcatttaaattgccaggtgggcaagacaatgctagtgttaccatgaaatatgttggcatcatccatctcaatcaagaacaggtaattattgctagaagatttcagacaactattctttcgtttcttattggtgatgaccatttggaggttagcaatggtattaaatacttccatgagatgcaagtgcctattggagtagtctatctacttctgcctttagtttctggcagaattgattggtgcagtatgaagttctcatcctcaccaatatatgaagctaacaacaaacatatgacacattgccattcttgtaaagatattgatttactgcagacaaaagatggtcctttctgcaggtgcatccttaaaaattccattgtgtgtacccctcataataacatcttttatgttattagtgggtttcttgacttagatgcaaattcctgtttgcctcaacatgatgggactgttgttacctacaaagattattttaagactaggcatggtcttactttgacttttgaaaatcagccgctcttggctggcagtaaacatgtgaaagtgcggaacttcctccacaactgctactctaaaaaagaaaaagaacctggtgatagatatagtgttgagttgccacctgaactctgcagaattatcatgtcaccagtgtccgccaataatttgcacatcttctcatatgttccttccataatgttccgcatccagtgcatgcttctttctgtgaaattaaaggtccaattaggcccaacagtgcagcagtttgacgtaccggttttgaagatcctggaagcattaacaacaaagaaatgccaagaagaattttcacaggaatcattagaaacacttggggattctttcctcaaatatgttacaactcggcacctttttagtgaatacaggcttcaacatgaaggcatattaacaaaaatgaagaaaaacttgatctccaatgcagctctgtgccagctggcctgcagcagtaatcttgtgggttacattcatgctgaggagtttaatccaagagattggatcatcccttgcttggactatgatgagcgtgataacaaaaaaatttcctttctggcacccaatggtatgtacagccaaaggaaaatgtctattaaaagtaagaggattgcggattcagttgaggccttaattggggcttacctcagtactgctggggaaaaggcagcatttcttttgatgaaatcattagggatgaatatagaatttcacactgaaattccagttgaaaggaaaatttcaatgaaagctgaagagttcattaatgtgaggagcttagagggaatgcttggttacaagttcaatgattctttattattgctcgaagcattgacacatggctcatatcagacttctggccctacttcatgctatcagaggctcgagtttcttggagatgctattttggatcatcttttcactgaatattactacagc

SEQ ID NO: 15765 - DNA, 2505 bp, Oryza sativa
  ref <308>: DATABASE ACCESSION NUMBER: AK066279
  ref <309>: DATABASE ENTRY DATE: 2001-12-06
ggcagttcgtttaacgagagtcgctcacttctcgttcaggttcagcaatcgcaatctcgtctcatcgtcgccggccatggcggcgtcgtccttgctccggtcgctctcccgcatctcgcgccgcggctgcgtgggaggcgcggggccgagcccgttccaccacagccgcctcccgtactcgccgttctccaccgcggcggcggatgcggtggagaggagggggttcgcggggctggggccgacggcgaagggggagaaggcgcgggtggtggtgctggggaccgggtgggcggggtcgcggctgatgaaggacatcgacacgaccgggtacgaggtggtgtgcgtctccccgcgcaaccacatggtgttcacgccgctcctcgcctccacctgcgtcggcacgctcgagttccgctccgtcgccgagcctctcgcgcgcatccagcccgccgtgtccaagtcccccggctcctacttcctcctcgcccgctgcaccgccgtcgaccccgacgctcacacgattgattgcgagacagttactgaaggtgagaaagataccttgaaaccttggaaattcaaggtagcgtatgataagctggtctttgcgtgtggagctgaggcctcaacttttgggatacgtggtgttactgaccatgcaatatttctccgggaagttcaccatgctcaagaaattcgcagaaagctccttctgaacctgatgctatctgatgtacctggtatgccacagaaacacaaaacaactcaaatcaagatatttgtgttacttaggtaatttgtcacattgacaactatcacacactcacacttcactggcacaaaggaatcagtaattactcgttacttttacattttgtttgtctcttgatgaaatttgcaactacattaacctgggctcttattgctgtttcttgtttttctctgtttgattgagcagaatttagaatagagctattacattttaggtatacttgttttttacaaaataccttgtgtgctgaaatctaattttgtttatatcctccttattataaccaattggccaatgttatttgttaaaacaggaatatcggaggaagaaaagcgcagacttttgcattgcgttgttgttggaggtggtccaacaggtgtcgaatttagtggtgaacttagtgattttatcatcagagatgttaaacagcgttattcacatgttaaagattatatccatgttaccttgattgaggttagagctgttggcatctctccctctctctaaactttgaccacacttaacaaattttgtttcattttattatttccggcaaatgagatattgtcatcttttgatgttcgcctcaggcaatatgctacaaatcaactaactaagtcaggtgttagacttgtgagaggcattgtgaaggatgtacaacccaacaaattaatcctggacaatggagaagaggttccttatggtttgctggtatggtctactggagttggtccttcatcattcgttaagtcgttgccatttccaaagtcaccaggtggaaggtattgtaaattggcttgaccgtatggagtttcatgtatatgcatcatatactgaatgggatttgattatatgcacctgcgcaccttctgtactttgaggaatagggatatatatatatatcttctacatgtagttcatttgtgaatcaggtttcaccatgcactataagaagcttctactatctataggcttttggtatccacccaattactggtgtaacatggctatctacgtctttggtacctgtgatagatttactggttgcctggtcacaggattggggttgatgagtggttacgtgttccttctgcccgggatgtgttcgctattggggattgcagtggattttttgaaagcacaggcaaggatgttctcccagctttagctcaggttgcagaacgacaaggcaagtatctagctcacctgcttaaccatgtcatgaaagctggaggagggcatgcgaactgtgagatcgacgttgatctaagtcctgcctttgtgtataagcatctggggagcatggcaactgtcggaagatacaaagctctagtcgatctgaggcaaagcaaggctggttactgtttctgtctgtaaaaaaaacttgcattgttctaaacttctgacgagttaactgaaattgtccctttattgtcaggaatcgaaagggatatctcttgcaggatttgtgagctggttcatctggcgctcagcatacctgactcgtgttgttagctggaggaacaggttttatgtggctatcaactggctgaccacactgttatttggccgtgacattagccgtatttaggtgcctgtttgtagatatctgaacgatgaacagtacagtgcatcctttcccacttctttttttttgtcagatatgtgtaatttccacagaatttttttcttaaataacactatcaaaacaaaccaaggaagcgagttcaaacttt

SEQ ID NO: 15766 - DNA, 4143 bp, Oryza sativa
  ref <308>: DATABASE ACCESSION NUMBER: AK066280
  ref <309>: DATABASE ENTRY DATE: 2001-12-06
gactgcaaactcgcatatgtgcacatatcaatatatcatactagtaccattctgccggcatcaagttcgggcttcgagtgcccagctaccgcgagctgatttttatgaagaaaactctcaactctgtacagcgctgaaaggaagctagttttcagataatcttagcctaattaagctaaaccattcttcaggtatttcaactactaccaactgagtgtccgaacattttatacaacattgaaaatttaaactttccgatccgtttcaatgtatgaacacaaccaagatcgatcgaaattcgagcaaacaagctcgccatgaccatgaaggttaccactgcaactgcacatttcctcttggtgttcttggcgtccaccatctcccattcagtcatctgctcagctctcggaaacgaaaccgatcagctgtcttcgctgcttgaattcaagaacgcgatcagtctcgatccagagcaatccctcatctcatggaacagcagcaaccacctgtgcagctgggagggcgtctcgtgcagctccaagaacccaccacgcgtcaccgccattgatctagtaggtctagtaggtcgcatctctccttcgctcgggaacctaacattcctcaggaacctctccctggcgacgaacagattcaccggccagattccggcgtccctcggccgcctccgccgcctccggtcactctacctcagcaataacagctgcaagggaccataccgagcttcgcgaactgctccgagctcagggcgctgttcctcgacggcaatgagctcgccggaggactccccggcgccggcgacctgcccgtcggcatcgaggcgctggtgctctcgtcgaaccgtctcgccgggacgatccctccctcgctcggcaacgtcacgacgctgaggaagcttgcctgcatgaacaacggcgtcggcggcggcatccccggcgagctcgccgcgctgcgcgggatggaggtgctggccgtcgacggaaaccggctgtcgggtgggtttccggtggcagtcatgaacatgtcggggctcgccgtgctcggcctcagcaccaacggcttcaccggcgagctgccgtccggcatcggcggcttcctgcccaagctccggcagctcaccatcggcggcaacttcttccaagggaatatcccttcttccttagcaaatgcttcgaatcttttcaagcttggtatgtctgacaataacttcaccggtgtggtgcctgcctccattggcaagcttgccaagcttacattattgaaccttgagatgaatcagctccatgctcgtagcaagcaagaatgggagttcatggataacctagctaattgcaccgagctacaagtactctctcttgagaagaatcaaatggaaggacaggtaccaagttcactaggcaatttttcagttcaacttcagtatctttacctggggctcaatagattgtcagggagttttccttctggcattgcaaaccttccaaacctgataattctggcactggatgacaactggtttacaggttctgtaccacaatggcttggaggtctcaaaacattgcagagcctaacagtgtcctacaacaattttacagggtatgtcccctcctccctttccaatctatcacatttgatggagctttttctagagtcaaatcagttcattgggaacatacctccaagccttggaaaccttcagttccttacaacaatcgacatttccaataacaatcttcatggtagtgtgccagagtaaatcttcagaattccaacaatagagcaagtttggttaagattcaataatctcagtggggaacttcctgcagaagtagggaatgccaagcagctcatgtatttgcagctttcatccaatatgttgtctggagatcttcctaatactttgggcagctgcgaaaatttgcaacatattgagctggatcataataatttaagtggaggtattcccccttcgtttggcaaattaattagcctaaagtttctcaacctatcacacaacaagttaactggatcaataccaatgttacttggtgatcttcagcttcttgaacagatagatttgtcattcaaccatcttagaggtgaggtcccaactaaaggtatcttcaagaattcaagtgccatacaaattgatggaaatctagggctttgtggaggtgcactagagttacacctacctgaatgtcctattacgccatcaaatacgactaaacgcaagccatctgtactagccatagtgattccattagctagtatggtgacacttgcattggtgatattggtcttgtttatctgtaagggaaaacaaaagaaaaactcaatgtctttgccctcatttggtagtgaatttcccaaagtttcttatagggatcttgccagagcaacaaatgggttttcaacatccaatttgattggcgaaggaagatacagttctgtataccaaggacagtcatttcagggcataaccgtagttgctatcaaggttttcagtctagagacaaggggagcacaaaaaagcttcattgcatagtgtaatgctttaagaaatgtgcggcatcgtaatctagttcctatcttaacggcgtgctcaagcattgattcaagtgggaatgacttcaaagcattggtatataaattcatgccacggggagatttgcataaattactgtactcaactccacatgatgatagatcttcaaatttgtgctctatttcactagctcaaaggttaaacattgtggttgatgtatctgatgcattggcatatctacaccacaaccatcaagggccaattattcattgtgatctcaagcctagcaacattcttttggatgatagtatgacagctcatgttggagactttggacttgcaaggttcaaaattgattctaaaacatctttgggtaactcagtttcaacttcttcattcacaataaatggaaccataggatatgttgctccaggtatatatgatccatttcacacagtattttcttaacaattaattgaagacaacagtttcataatttgtttatatgacatctaaaatgaactctcttcctgcatacgatatgtagaatgtgccataggtggtcaagtttcaactgctgcagatgtatacagcttcggagttgttctcttagagatattcataaggaagaggccaacagatgacatgtttaaggatggattgagcattgcaaaatatgcagatatcaacatccctgacaggttgctgcagattgttgatcctcagctggtacaagagttgagcctcaaccaagaagatcgagttgctaccgatgaaaatgcagcacactgccttctttctgtactgaacattggactttgctgcaccaagtcatcccccaatgagcgcatcagtatgcaggaggtggctgccaagctgcacgcaattagggattccatatctcagaggttactgaatcaacatcaacactgttagttgttctgttttgtctgaaactccgaataattttcagaagacatgctgtacgccaagcaccacctctagactgagccggcgccaattcagttatatcgatggcgaccaccacaacacgtagggatctgtgctcttggacatggagcagagggtcctcatggaggagatcgtcacactgctccccgtcgagagggccgtcgccacgacgaggttcgtgctcggacttctccgcaccgacatgatcctgcacactggcgtggcgtgccgagacgcgttggagatgagagccagcaaacagctcaaggaggcaacgcatgaggacctcctgatccccaacactggcaactttgtggagacgctctatgacgtggactgcatggagcggatgctggggcagttcatcgtcacagttcacgaactcgtcggtgtacgttcaccggtccgtctcgccacagatataggacgaaggctaggtggttgacgcatcctccggcgagctcatgccacggattagaacagtggccaagctcgtcgacagctactccctcattccctaaatattttacgccgttgactttttaaacatgtttgatcgttcgtcttattcaaaaatttaagtaattattaattcttttcctacc

SEQ ID NO: 15767 - DNA, 1220 bp, Oryza sativa
  ref <308>: DATABASE ACCESSION NUMBER: AK066281
  ref <309>: DATABASE ENTRY DATE: 2001-12-06
gacacaaacgcaagcgcaacgcaaacgcagcaagcgacgccaccccccacccacctcttcctcgagaagaaaagaaaactggaggaaaaaaaaaaagggggaagaaaaagagaagaagaggcaggcagcggcggagggacggcgacgggggtcctccgatctggagtcgcgtcaaacccccccgattcctatcgtgaataccataaccatcctttgttcttttgaagtgttcagtgcatacaactgctccctgtagaggttctgtatctggctggattcctgctggagaagtgaggaagtatcttaacgagaagttgagaacatgttctcatgattcctgcaaatttgttggaacctacgagcagctgcgtgaacacgctagaaccgcccatttgcttgcaaagcctgcacatgtggatctttcgaggaaaaggacttgggatcgccttgagcgtgaacaggaggttggtgatgtcataagtgcaattaggtcacagaatcctggggcaataatagttggtgactatgttattgagactagagatgcgatgtctcctgatgaaaacactggagatgaaagcaacgatgagtggtggcgcgactcaatagaatcacctgataacaggtataactcccctaggctcttgccgaatgaagctccagaatcatcaataatctgggcagatgaaaggcatggactgccaaggtttcagcctcagaataacagagtgttgccccggttttcgttcaccaataggagcagctcacggtcagattggcaccgtatccgacggccgagtagacagagcctagcgcgtcgaggcttgttgaatcgaccctacaggaacaacagcgactatcatggcttccgtccccagctatttgatcagccgaatggtagtagccatcgttcaggtatcaacaggagccttgatgacccatcatttgtgcccagacggcagcgtttgagatacacccacaggagccatcatatccgtgattgatctaaagcagcattgctcttgctgtataaattaatttggcaaacagccaaagctatccttgtaaatagtaatgccaaactcaaatttatttttctttagttggtctacgctatatatcaatgtatattatccagcagtctagtctagatgcaaaactttgctccttaaatatcatcttcggtaccgtcactttcgaatgcaattctttgttggctt

SEQ ID NO: 15768 - DNA, 1478 bp, Oryza sativa
  ref <308>: DATABASE ACCESSION NUMBER: AK066282
  ref <309>: DATABASE ENTRY DATE: 2001-12-06
gacgagatcaagaagaagaggaagaagtcgcttcgcgggcgatggcgagcagctcgtcgccgccgccgccgccgcagattcgttgcgcctccttcaatcaggacaacagcttgttttatgtcgggacgaaggatggattcaggattttcgatgcccatacagggaagctccactaccagaagaatattggtggaatcggcaatatggaaatgtactttcggacaaacattcttgctatagtcggaactggtgaacagcctgtactatctcctcgctgccttcgccttatcgacaccgtagcagctgtcacaaagaaagatctgaactttatgacttcagttttggctgttcgattaagtagaacgaggcttgttgttgtattgcaggacaggacctttatttatgatgtaaacagcactactatattggaagaaattgaaacagttcccaatacaaaaggtctttgtgcattcgctcctaattcagaagcatgttatttggccatcccagcaagcacatccaaaggatctgctttagtttataaggcatcagaacctgaattaatatgccagatagatgctcacgagtctcccttagctgcaatggcattttcttctaatggcacgtacctggcaacagcttctgggaagggtactattattagagtatttctcgttgcacaagcaaccaagtcacacagttttcggcggggaacatacccatcaacaatatattcactctcattcggaccatcggatgatctgcccgatgttcttgttgccacaagttcatcaggctcgttgcacatgtttttcctcgatgctgccagaaatcgaaggaaccaaacgagcaaattgcttggttcaatgattcctggagcaataactcgtgctttggatccagcaaaccatcacattattcacaacgtcatccctgcaggaatcaagagctgtgtagccgtacataaggtcgaaaattcacaaaattcttctaaacttcctgctttaaggactgttgtctatatcataactcatgatggatacttccgcgagtactcgatcaacaccacaaagtcaaatgaatcttcctgggttttgcaacgcgagctcaatctactggataccggttgtagcactccccagcgggaggaacaacacaaggactgactagcagactagttggctcaccaatgacagaagcttcagctgtgtgtacatacaatttgtaagatagtgtgctggtagggctggtctgtggtttgggctgagattctaactccaattggacaagtgtatcatagatgtgcccaccaatggtgagggatgattcatccttcttgtggatgtaaattatagatagtaactgccaatatggcaatataattacactacaagtatatgtaactgctttgctacacgactgacagactttgccctgagtggttacaatgaaatgaaccagcatactgccatactgac

SEQ ID NO: 15769 - DNA, 1505 bp, Oryza sativa
  ref <308>: DATABASE ACCESSION NUMBER: AK066283
  ref <309>: DATABASE ENTRY DATE: 2001-12-06
gacctcttcacttcacttgtcgaaatatttggaccaaaagatacccgtccccttcctcccaagctccaaccaacaaactctgatgagctcgtgcagctgctagaagagctgcaacgcaacaggctgtcccccgccggggaagctggtgcggagcggcggttagttgcgacctccacgagctgcagcccgctgcgacgctggaatatcagctagcagcagaacgctcgatatgcgcagcgtgcaatgagttgcggctagcaggcaggcctgacgacgtcgtacaagcgcacgaaggccccggcgatcgagcacgccacaacgagcgtccaacggcagcgcgttgcctcgcagcatacaagcaccgcggtggacgctaggccgtcgagggtctacccgccggaatacaagcacgatgctgctcgtctgctctgcccaccaatccaccatggtgagaggagtctgtagctaagctagctaaggcagctagatactcctttcgtcccaaaatataataacttttagcacttgctatgtaggatttatccaaaatataacaacttccccaccaacatttttttcccaaccaatcacaacactctatcattcacttttcttacctacctccactactcatccaatcataaccctacaccattcacttctgcctactttcttaataatcgtgtccaactctaaaatttttttattctgggatggaggctgctaattggagatttttttttctcttaactgagttaactaattgaggagtaggcaaggaaatgggtgtgatgggagagaggtaggaagatgtgtgatttgtgagtgagacagacacaaacggcaaactttgccgttgctttcctatatgccacccagggataaatggcagcatagcttgcctcaccagtgattattagcacctacttcctccgtttcacaatgtaagactttctagcattgcccacattcatttaaatgttaatgaatctagacatatgtatgtgtttaaattcattaacatctatatatatagacaatgctagaaagtcttacattatgaaacggagggagtaattaattaatagaaccatgtgtttctttccaaggaaaaagaatcaacaaacaaaatcagcggtgcagagtgcgcagaacaaaagagataaactgctttaactgaacatggattcttttaattgaacaatatgaacaagagcttaaaaataaataaaattataggctttaaaagaataaaagtggaaggtacaatatgatgacaaatcaaataaagataattttcttgcatcacttatctgatatggtggtaattaagattatttggctgctccatctatgaaggatttttttttcttttcatgttgttcctatatcaatggagattagatgtccattcatattgctgatgtaaaaatgcgagagtaagcgtattgtgtgttcctcgtgctttgatttattttactagagagaaacatctaattttgtct

SEQ ID NO: 15770 - DNA, 2137 bp, Oryza sativa
  ref <308>: DATABASE ACCESSION NUMBER: AK066284
  ref <309>: DATABASE ENTRY DATE: 2001-12-06
ggtgcagtaacccgctcccaaccctagccgcctccacccgcctctcctccctctcgtcgagtcgtcccgcgcactccctctcctctcacgccgccgccgccgccgcctccccctcccgccgccgcccctccctctccctcagccatcctcttccttcgccgccggtccactcacccctaaccctagccgctgctgcccgtctcccatcctccttcgcggtcggtccactctctgcccttcgccgcctccgccggccaccaccgcccccgtccacgcctcgcgtcgccgccccccgcccccgtccccagcccgtcgcgagcgacctccgccaccacctcgcgtcgccgcggccgacctctgcctccggccgcctccgacggtcgacgttcggatccggcctccgtgtggtcagggcacgcggatctgaccacccgcgtcccctcctcgcctcaccctctcactctccctctccctctctctctctgaccgcctccgtccgaatccgacttcgccgccgctctcccagcttcggccgccgctgctcctggtgctgcagatcgaggggaggctcaagatgccgagcttcgtcgtggcacacatcggtggcggtctgggcggatgacatccatgatggcaggggctactggcctcgccgccctcatcgccgtcctcaacctgccgtcgtcgtcactgttgtcttcaacttgctggtctaggttcggccgcattgggaggcattggcgttgcagagcgagtatgtcgagcttgtcgccgtcaatgactccttcatcaccactgagtacatggtaactcttgatctggctaaaggtgtatatgcaaagttcattgactgggatgaacaaatgttcgatcgggaaacatgtacgcctgctcattcagctaacacagctattagtgaagaccttggacaggttgagtacgttttgagtgacagaactggaacactgacagaaaacataatgattttcagaagatgttgcatgagtgatactctatatggagaaaacaatggggatgctttaaaagtggcatgtcaaatgttgattcacgagtgttgagttaaataggaatttgcaaacagcaacaatggatgctccccattagttaagtccttacaatgcattgtaaactcaatcaaccttctgtttctggctcagcttatgtgaaggtgtcagggataataaagggggtgtttggttcattccctcactttgcgacaccacactttagtcacgccacagtttcttaggtgtgtatttatttcattctcacaattgtgtcgtgccacactttgttagccttaggtcccacttgtcatactcagttttagagctaactataccacacttgtggccaactattttctagccacaattttgcttcatgccacaatttggctaagcttgtggcatccctaggcatcatccaaacatctccttaggtgcctgggttactcattttttggagattttaccttctataaatgtgcctgggtattaactcatgtgctttttaagtaggtgaattgttcatgcattacatctaacacactaatctttgtttcatcctttcagactatactgcatgatacctttttctaggctgcaggaactacacagaatttttttcatggatttgttcaattatattatcaatattgatatatcatttattggtcaatattttgttttgctctctaactgattgtttttcctctctaattagatgccagatttctagatgctgtttcgcgtaacgatcctgatattgccaaatttctcatggtgatggctctttgcagtacagttgttcctatcaaaagaaatgatggtactataacataccaagcacaatcacaagacgaggaagctttggtcactgctgcatcaaaactaaatatggtgcttgcgagtaaagacagcaacactgctggttggtatatttttgttagattaagatgatatgacaatgaattgctctaactaggttgctttttcttatctcagactgatttttgcattcatttcactattttctatttctacagagatttctttcaacggttgtaagttctattatgatttgttggatattttggagtttacttccgatcgct

SEQ ID NO: 15771 - DNA, 1767 bp, Oryza sativa
  ref <308>: DATABASE ACCESSION NUMBER: AK066285
  ref <309>: DATABASE ENTRY DATE: 2001-12-06
ggcgagttgtcgcttttcctccccaactccacgatcgagtgaagcggacgagggcgacggcggcgagcgcgcgcacagcgtgtgatccatggaggcgttcgtgccgggcggcgcgggggcggcggcggcggcggtcggagggttcgtcgccgcggccgcgctagccgagagggccggcgtgatcgcgccaaggaaacgccccaacgcgcccccagctgttcctggtttacccattatcggaaatctgcatcaactgaaagaaaagaagcctcatcagacctttgcaaaatgggctgaaatttacgggccaatctacactataagaaccggggcttcttctgtagttgtgctcaattcaactgaagtagccaaggaggcgatggttgcaaaattctcatccatatctacccgaaagctatccaaagcactgacagtgcttactcgtgataaatccatggttgctaccagcgactattgtgatttccacaaaatggtgaagcgttatgtcatgtcaagcatgttgggtacttctgcacagaaacaatttcgtgacataagagatatgatgatccataacatgttaagcacttttcataaactggtgaaagatgacccacatgctcctctgatattcagagatgttttcaaggatgagctattccggttgtccatgatccagagcttaggagaggatgtgagttcagtctatgtggatgaatttgggagggacatttcgaaggaagaaatctacaatgctactgtgaccgacatgatgatgtgcgcaattgaggtcgactggagagatttcttcccctacctcagctgggttccaaacaagagcttcgaaacaagagtgtttactacagaaactagacgaactgcggtgatgcgcgccttgatcaagcagcagaaggaaaggattgtgcgtggagaggcaaagacatgctatctggacttcttgctggcagagaacacactgacagatgagcaactgatgatgctagtgtgggaggcactcatagaggctgcagatactaccttggtcaccacagaatgggccatgtatgagcttgccaagaaccctgacaaacaggaacggctttaccaagagatccgggaggtgtgcggcgacgagacggtcaccgaggagcacctcccacggctgccgtacctcaacgccgtcttccacgagacgctgcgccgccactcccctgtcccgctcatacctccgaggttcgtccacgaggacaccaagctcgctggctacgacgtccccgccggcaccgagatggtggtcaacctgtacgggtgcaacatgaacaggaaggagtgggagtcgccggaggagtgggtgccggagaggttcgccggcgggaggctcgaggtggcggacatgtacaagacgatggcgttcggcgccgggaggagggcctgcgcggggagcctgcaggcgactcacatcgcgtgcgccgccgtcgcgcgcttcgtgcaggagttcgggtggaggctgagggagggtgacgaggagaaggtggacaccgtgcagctcaccgcctacaagctccacccgcttcatgtccacctcacgcgcagaggaaggatgtgaaccattatattcattggaagctgttgctcgttgaataatgatatatagttatctttgagatgtatttactattagcaaaatctccatgctttgttatggataggagaaaacatattataatatatcatggactatatttcttttatcaaatatggttgtat

SEQ ID NO: 15772 - DNA, 2544 bp, Oryza sativa
  ref <308>: DATABASE ACCESSION NUMBER: AK066286
  ref <309>: DATABASE ENTRY DATE: 2001-12-06
ggcagctctcgtcccctcgtgccgtggcgactgagatctctctcgtctctcctctctcgtctcgtgtataaatttccttcgccttagtttcgcatctgctatctgcttcttcttcttcttcctctgctgctgccgcgttgcgtacggtcgtgggaggaaacagggagagggagatggcggcctcgacgatgaagcacctcgtgcaggtcggggaggcgcgggaggcggcggaggaggacggaggggcgccctcggccgggccggcgtaccgctgcgcctacggcgggggcgccgcctcgccgcccgccgtgccggggctcgagtgctgctgggacatattccggatgacggtggagaggtgcccggacaacaagatgttgggccgccgagaaatcgtcgacggcaaggctggcaagtacacgtggataacttacaaggaagcgtacgacaccgtgatcaaggtgggcgcgtccatccggagccttggagtcggcaagggtggacgctgtggtatttacggagccaactgccctgagtgggttatcagtatgcaggcctgcaatgcccatggcatatactgtgttccgttgtatgacacgctaggtgctggggctgtagaatttatactgtgccatgctgaggtagaaattgcttttatagaggaaaagaagataggagaggtgctcaagacatttccaaatgcaacaaagtatttgaagacaattgtgagctttggaaaggtcaatcctgaacaaaaggaaaaggttgaacaaaacggagtgtccatctactcgtgggaagagtttttgcagttgggaggtgaagaaaagtatgaacttcctacaaagcaaaaggatgatatctgtacaataatgtacaccagtggaacaactggtgaccctaagggagttttaatctccaacaggagcattattactattatttcagcagtagatgggttccttgcaaactcaaaagagcagcttcgtgaagatgatgtttacatttcttatcttcctcttgcccatctttgaccgtgtacttgaggaagtgttcattcaccatggtgcatcaattggattttggcgtggagatgtcaaactcttggttgaagacattggagaactcaagccaacaattttctgcgctgttccacgtgtactagacagaatttatggaggactgcaagataaagtttcgactggtggtttcctgaagaagacactgtttaatgttgcttacaaatacaaacaagggaatatggtaaaaggaagcaagcatgaagaagctgctgccatgttcgataaactagtcttcaccaaggttaaacgaggattaggtggcagagtacgacttattttgtctggtgcagctcccctgtctaatcatgttgaagagtacctgcgtgtggtaacttgctcccttgttcttcagggctatggtcttactgagacctgtgctgggtccttcgtttcccttccaaacaacatgtcgatgctgggaactgtaggccctccagtcacctatgtcgaagtacacctcgagtctgttcctgaaatgggatatgatgcattgtcaaaagaatcacctcgtggggagatttgcatcagaggggacaccttgttctcagggtaccacaaacgagaagacctcaccaaggaagttttagtcgatggatggtttcacacaggagacattggtgagtggcagtctggtggaagcatgaagatcattgatcgcaagaagaacatcttcaagctctcccaaggagaatatgtcgctgtggagaatttggagaacatattcggtcaagctcctggtgttgattcgatttgggtgtacgggaatagcttcgaatcatgcttggttgcagtggtcaacccgaacaagcaagctctggaacgatgggcagagtcaaacggggtaactggagactttgctaccatgtgtgaagatcctaaagcaaaagaatttatcttgggagaattaaccaagactggtaaagaaaagaagctcaaaggctttgagctcatcagggctgttcatctggagccagtgccattcgatatggatcgtgacctaattaccccaacttacaagaagaagcggccacagctgctcaaatattaccagaacgtcatcgacagcatgtataagaacatgaagtaggactggactcatggcggtacggtggaccaaaacttcacttagtagtttcgatgcgaacggaaaggaagaatttggtgatagttaggcttattttatttccattttctcctaaatttggacgtgtaatagttagtcttacatagccgtgctagcatgagcgacctcatatattaccgtgtcaattcttgcattttctttgcactgatagaaaagagtgaacagatacaaaactgttgctggcgagtttctactgtgtgaatttacattcttttatggtaacaaggacacatactttactcctgtattgttatacttcggcccagttctttacgaaaactgctgatataagataaataaatatatttttaagtttat

SEQ ID NO: 15773 - DNA, 1336 bp, Oryza sativa
  ref <308>: DATABASE ACCESSION NUMBER: AK066287
  ref <309>: DATABASE ENTRY DATE: 2001-12-06
ggcagctagggttcgccctccccctcccccaaatcacatccaatccagagaaaaattctccgatcgccgccgccgctggttcgattcgccgaggccgagccgagagagagagatcgagagggatggagtgcttggccgagatgccgcgcgcgccgctggccgaccgccgcccgcggaagaggcagcggctggggtgggacgtcggccccgagatccaccaggttcagatagggttatgtgggcaagaagttgcaaatgtcatcagtgctgtgacgctgggtctctcgtcccaggaaatccctcgttttgcttcccctcctctgagagaagatgacaaggatggacactttgtctttgctgttggagacaacctcacaccacgatacaggattaatgcaaaaatgggtgaaggtacctttggtcaggtattggaatgttgggatagggaaaggaaagaaatggtggccattaagatcatcagaggcattaagaagtacagggatgctgcaatgatagaaattggcatgctcgagcagcttggtaaatatgaaaaaagtagatccaggtttcatcccgttctccaaaggaaggttcctatttcaagcagctgcccaagtccagtgctattaaggtgattgattttggcagcacaacatatgaccagcaggatcagacatatgtggtgtctactaggcattatcgagctccagaagttatcttgggacttggatggagttacccctgtgatatatggagtgttggttgtatactggttgagctatgcacgggagaagcattgtttcagacccatgaaaacttggagcatcttgctatgatggagagggtatttggtcctttgccatgtcacatgctcaaaagggcagaccggcattccgagaaatatgtcagaaaaggccgtttaaactggcctgaaggttgtgcgtcacgggatagcatgaaagctgttatgaagctgccacgtcttcagaatctggtgatgcaaaatgtagatcattctgggggcgagttcattgaccttttgcaaggtctgttaaggtatgatccagctagccgcctaacagcacaagaggcgcttaggcatccattcttgagggagcagtccgagcgaagaagatgacgaaaatcgtatgtcgattttcatctgacacctctaacttgtattgtctgagctcgaaaagtctattcacaaatcgtgaagtttgtatttctgtttgtaacctcagcaagcatttgtatatagaagacctgtatttacaagttgatctgtatcagtctgaatcataaattaagtgttttgaagatgttttgcttggct

SEQ ID NO: 15774 - DNA, 1367 bp, Oryza sativa
  ref <308>: DATABASE ACCESSION NUMBER: AK066288
  ref <309>: DATABASE ENTRY DATE: 2001-12-06
gatcagacctgcagaggcaataatccatccatggcaactatcattccagtactcctgcggctgctgctcctgctgctcccgcttcccctgatccgagaccacctctgggcgccgagccacctccggccaacgccgcaggacgatgcgggtgagctccacccgatcttcctggtgcccggggcgacctgcagcaacgtggaggcgcggctcaccgaggcgtaccggccgtcggcggcgcactgcggcgcgatgaaggggaagggatggttcgggctgtgggagaacaacacggagctgcaggcccacgactacgcggagtgcttccaggagcagatggccctggtctacgaccccgccgccaacgagtaccggaacctgcccggcgtcgacacccgggtgcccaacttcggctccgtacggtcgtttggcagcaaggacgtttttaacccagaatggtgccttgcgagtcttataggggcgctggaggagatgggataccgtgacggagacaacatgtacggagttccttacgatatccgttacgctcctccaatccctggccaggcgtcccaagtctactcgcgccacttcagggagttcatggagctcgtggagacagcaagcgagaagcagcatcacaacaagaaggccatcatcctcgggcatagcctcggtggaatggtggcgctagagttcgtcaggaacacaccgtcggcgtggcgagacaagtacattgagcatctcttcctcgtcgcacctacgctctccacggggttcgtgcccaccgtgaggaacctcgtctccgggccgaaagatctcctccacgtcgcgaacacgacggccttgtctctgaggccaatgtggaggagcttcgagacgagcattgtcaatgttccatctcccgaggtgtttgggcacgagccgatcgtggtcactaagcggaggaactactccgcgtacgatctggaagatctcctcgccgccattggtttcagcgatggcatcgagcctttcaggagacggacgatcgcacggatgaactacatcgaggcgcccatggtgccgctgacgtgcatcaatgcagtggggaagaggacaccacggcaattcgtatactgggatggtaacttcgacgatgaaccgacagaaatagtgtatggtgacggagatgattccatcaacctggttagcatgttggcgttcgacgaggaaatgcgtcggcagcccggacagaaggggcgattcaagtcgatcaagctcaataatgcttctcatggttcaattcttacggatgaatgggcactaaggagggtcatgcaagagatcttcttgaagtgaattggaattcttcgtaggctcttgtggcc

SEQ ID NO: 15775 - DNA, 1327 bp, Oryza sativa
  ref <308>: DATABASE ACCESSION NUMBER: AK066289
  ref <309>: DATABASE ENTRY DATE: 2001-12-06
ggatgggggaaaaaaatctgcagccttcccgtgttatcctcttcaacctctggccctctcactcctcgcgccgcgcggctgctccggccaccaaagtggcgctccgatggcggtgagagtcccttccatggagctgcaccgccccccgccgtccgtatccggtgtccgaggaaaaagctgccttcaaaagcctttccttgtccaagcaaagagattagagggattggagaaggcaaacccaaggtcacgaggaaagcaaagtttggaacaagtgaagaaaagagcaccactgatccgtgggacagtgagtccacctctaccagtaccaggtcacataactcaacctccttacgttggtaaaaaggatgcttcagagatagcaagtgagatacaaatgcatgacaaagtgagcattattcacatgaaagctgcatgtgagcttgctgctcgtgttcttgaatacgctggaactttagtgaaaccctctgtaacaacagacgaaattgataaagcagtgcacaagatgatcattgatgctggagcctatccatcccctctcggatacggagggtttccaaaaagcgtgtgcacatctgtgaatgaatgcatctgccatggaattcctgattctcgtgaacttcaggatggagacataattaatatcgacgtcactgtctacctgaatggctatcatggggacacctcaaagactttcctatgtggagaagtggatgaagccagtaaacgacttgtgaaggttactgaagagtgcatgctcagggctatatcagcttgcaaacatggtaccagcttgaagaaaattggcagaagaataagcgagcatgctgagaggcacggatttggtgttgtggatcgttttgttgggcatggagttgggagaatatttcattcagaaccaatgatatatcaccagcgtaataatatgccaggtcaaatggttgaaggccagacattcacaatagaaccggccctatccatgggaagcattgattgcgacatgtgggacgacggctggacggccgtcacgacggacggcagcctagccgcgcagttcgagcacacgatactgattaccaagacaggagcagaaatcctcacgaaatgctagtaagatcggtgcccagcattagccactggagtagcagtgatctctgtgtttgtaggacgagtatggtggaaaggatggtcgattgttttgctgtataaagtactccctctgtattttaattttgattttaatgtattatgccgttgactttttaaccaacgtttgaccacttgtcttattcaaaatttgtatgcaaat

SEQ ID NO: 15776 - DNA, 1426 bp, Oryza sativa
  ref <308>: DATABASE ACCESSION NUMBER: AK066290
  ref <309>: DATABASE ENTRY DATE: 2001-12-06
gactcatctaataccgaattattagctggagagatcgattcaaggctattgtctggatcgaatgatttgtccatggagtgtagcggcggcggcggtggcgctgctgcttctgtcgccgggggagaatcagatggtccgagtgtcagcacagccgacgaagacgaggtgcgccgccggcgtcgtcgacacctgcggcgacgtgggcgtgccgtacctgttcggcatcgacggcggtagctgcagcttcctcccgggcttcaacctcacctgcgaccgcaccaagcagccacacaggctgttcctcggcgacggctcccacctccaggtcaccgagatctccctggccaactacacggtgcgcgtcctcaacggcgtcggcaccgtgaacttcacctttgcggggcacaacgattccacggcgaagtgggccggagtcagcgtcggccaagacgacgggccgtacatcgtctcagaggagcacaaccagctggtggtgacggggtgcaacatcatggcctccctgctcgggaacagcggcagcaacgtcatcatcggctgctcctccttctgctccatcaccgactggtggggcgccgacccaatagtgcactccggcgccggcggcgcgtgctccggcctcggctgctgcgacgtcaacatcaccatcggccggccctcctacgaactgcagctcaggtggctcgactgggaccacaactacgacgacctcctgcccatcgccgtgcgcatcgcggagcgcggttggttcgacggcatgtcgaccaagcttctcaggaaaaacagccgcagcgctgttcccgtgcccgtggtgctggagtgggccgtggcgtctgttcacaagccgcccactcccgtagacgtgaacagcacgtgccccaaggacccggcgagaagcgagtgccgtagcagcaacagcttctgccgcaacatcgccaacatgtaccgcagcggttacgtgtgcaagtgcgacgacgggtaccagggcaacccttacctcaccggcggctgccaagatatcgacgaatgttcgctgccgggcaagtgcttcggtgagtgtacaaacacgccaggaaactacagttgccgttgtccgcgtggtgcgcgtggcaatccctacaccaaagatggctgcatcaagtttcctctaggtccgggtctacagagaaaatggattggtgcgggttggatttgctttggtgtgagtccgaatggtcctttctctcgtcttcttggcatgttgatgagaaaccaacgtggtgggagggacggcatcacgttgaaccgcaacgctagtgatgctggcgccaagagaaatgtctatttgtaaaataagtttctctaagattctatttgtaaaaaagttttaaaaagatctaaaatatgaactgctctaattaacttgtcc

SEQ ID NO: 15777 - DNA, 1026 bp, Oryza sativa
  ref <308>: DATABASE ACCESSION NUMBER: AK066291
  ref <309>: DATABASE ENTRY DATE: 2001-12-06
gggcggcaacactgaagcaaccaaaatcttacagcggcggcagccatggcgtcgttaggagctaacagccatggccgagtcctgcacacctgcacactctccccaaagccggttacagctttgagcagaagcatggcggccattcctggacaccatgtttttcagtctccacgagctcggattgcagtgcgagctagcaccgagcgtgcgacctggctgcctgggctcgatccacctcctcacctcgacggcacattacctggcgatttcggatttgatcccctgggtctcggggaggaaccggcaaacttgaaatggtatgttcaagccgaacttgtgcactgccggtttgcgatggcaggggttgctggcatccttgcgactgatttgatacgtgtatcaggaatcaacaacctgccagtgtggtttgaagcaggtgcaacaaaattcgacttcgctaacaccacggcactcttctttgtccagcttctcttgatgggatttgctgaaaccaagaggtacatggactttatcaatccaggatcacaagcagaggaaggaacattccttggtatcgaggctgcacttgcaggttcacagccaggctaccctgggggtccactgtttaatccactaggactggccaaggatatagagaatgcagatgaagcgaaactgaaagaaatcaagaatgggaggttggctatggttgctatgcttgggtttattgtgcaagcatctgtgactcatgttggaccaatcgacaatcttttgacacatctttcagacccgttcaacaaaaatatcatccacaccctctcctcttcttgaaaatatcctggaccgtcaaactttttgttcctttcttcatcttaattaatctatcaatcaacacattcacaatgttcgtggacaacataagtaactcactacgcaattgccaagtccatgtgttatgaaaatggagattcaccggatgcataactacattaattgtttatggaaaaggaaatttccttccctagc

SEQ ID NO: 15778 - DNA, 1764 bp, Oryza sativa
  ref <308>: DATABASE ACCESSION NUMBER: AK066292
  ref <309>: DATABASE ENTRY DATE: 2001-12-06
gatcgtctctctctctctcacacacacacaaattaaattgcgagcaaaaaagaaagattgcggccatgctctccacaggctttcttgaactgtgaactcgtgtgtgcatgctcctcatatattgttctagatcccatgcatgatgcatatcgatcgatctgatctgaattaggtcatcgatgcgcatctggatccccatcttgttgatagttcaagaaagtccttggaaaacatggtgccctcgatcttaattatatcttacttatatatctacctagctatatctcctgcctgctctaattcttggatcgatcgcgatggagattaattgatctgtacatcgatccatgcatatcagatactgctcacccggccgccatctgcgtgcaattcgatctagcagctgggaaatgaaagctaagaaagatagcgtgcacgagcgtgcagaatggcagcatatgtatgcattattcagtactgctagatgaacagaatctagaaaaagatgaactgaacagcagcagcagcagcagatcgtaggatggatggatggacggatggagcaagctaagctaagctttcgttttgtcgatccatccgtccatcggtgtcgacctagctagaaaggctgacctgtcgcgtcgtccatccaagatcgatccaaccagcaaccaggcatcagacaggctctttcttgtccagctgctgctgctgctagtacacatactacactgtctctgctgcatgcatgcatgctgctcacctcatctgattgagagttcagaattgttgagagcaagcaagaaattgagaaacggccaggacagattggattgatcttaattggcatatatgctgctcgatcgatactgtctgtcagttctcagttcgtcgatcgatcaagtctatatttggatatctgaatctctgcaaatgccaactcgaccactaagcaattcatcaatggacatgatcatagtaatgtcgatcgacgtgcagtgtcactcattgttgggagcacggtcaaaacctccagttcatatcatatcatatgaaatcgatctcaagctcaagcagtttcgatagatgcaaaattgaagatggaagtataaataactgctactgtatatacatatggagggcaggaaggcaggcaggagattgatgaagtgacgcgagcctgccttgaattgtgctagtttctctttctctctgcgcgtgtgcttgctgcccctagctagctagcgaagcgtgtgctttcactgtgcattgcatatgataggaggtagtactccactactccatggtgaactggtggttgcattgctaaccacagccatagagctactgagctagctgcgaataatttcattcatgtttgccgatcgatcgagctgcagcaatgatctttccctgcagcaatgatcacgttgcatgcttacttgtttctcttcttttaacttttttcccctctcctttctttcatccatagtttttacgttaatatgcagatgcaggcagcacaccttcttcttgctccaccggctaccagcacctaagtaattagtgtgttcatgcgcctctgattatatatgtacatatatatatactccaatatatgtggtagcatggatatatatacaattcatgtcttttgtatgtactaattaatgtgtattgtcatgtgcaataatggaaaatgatgatgtaaaagttgagacgactgaactataaataaaaatatatatgaaagatggcattatt

SEQ ID NO: 15779 - DNA, 845 bp, Oryza sativa
  ref <308>: DATABASE ACCESSION NUMBER: AK066293
  ref <309>: DATABASE ENTRY DATE: 2001-12-06
gttcttccttccagagcctcacctcgccatcgtcgccatggagcacctcctgctccctctcctcccccaccgcccctcccaacccctcctcctcctcctccgccatcgccgccgcccatccatcccccgggcatcatccggcgacccctcccccaccgcggccgatgctccgacggacgctcagtccgccacgcctccctcctccggcgccaagcccaccggcgtcaagaaccgcctccgcgcgaggaaccaagctcgccgcgtccaggagttcactccgccggcgccgttggggatcaccatgaaatccaagtcgtcgtcgtcgtcgaggccggctgcgtcgaagtcgtcggcgtcggcttcggcttcggcggcgacgcgcagggagaagcagacgaggaggaaggagtgggaggagatgagcatggcggagaaggccggcgagctgtacgtcggggagaaggggctcctcttctggctcaacaagttcgcctacgcctccatcttcatcatggtcggcgcctggatcctcttccgcttcgtcggcccctccattggcctctaccagctcgacgcgccgccgctcgcgcccaccgatgtcttcgccggctcgccgtgagcgcgtcgccgggggcgtgttcttgattaccatcgagatcgagtactctactagattctaggtacctagtatatagcagatgattaaggaaaatgtggatcatttggtcgaggaagcagaggatgtaaactagtgttgctgtgttggcgaagattggtcgaggaatcagaatgtataaattgcactgcacaattttggagttaaaatgtttgagatattttgctgc

SEQ ID NO: 15780 - DNA, 2208 bp, Oryza sativa
  ref <308>: DATABASE ACCESSION NUMBER: AK066294
  ref <309>: DATABASE ENTRY DATE: 2001-12-06
tttgtgtctgcttttgccatttccccttgttttcagatacaacgtgctggattctcaagtccaacgccaatccaagctcagtcatggccaattgccttgcagtgtcaagatgttgtagctattgcaaagacaggatctggaaaaactcttgggtatctacttcctggatttatgcatattaaacgcttgcaaaacaacccaaggtctggtccaacagtgctagttttggcaccgacaagggagcttgcaactcagattttggaagaagctgtgaaatttggcagatcatcaagaatttcttccacgtgtctatatggtggtgctccaaaaggcccccagctaagagatttggatagaggggtcgatgtcgttgttgctacaccaggaaggttgaatgacatcctagaaatgcgaaggataagccttaagcaagtgtcgtaccttgttctagatgaagctgaccgtatgttggacatgggatttgaaccacaaattcggaagatagtgaaagaaattcctcctcgtcggcaaaccctcatgtacactgctacttggcctaaggaagtccgacgaattgcagaggatcttcttgttcaccctgtccaggtgaccattggaagtgttgatgagcttgttgctaatagtgctattactcagaatgtggagctgatcacaccgtccgaaaagcttcgccgtctggagcaaattttgcgatcccaggattcaggttcgaaggtactaatattctgtaccactaagagaatgtgcgaccaacttgcaaggacacttactaggcaatttggagcttctgccattcatggtgataagtcccaaagtgaaagagagaaggtcctgagccattttagatctgggcgatctcctattttggttgcaacagatgttgctgcacgaggcttagacatcaaagatatcagggttgtgatcaattatgatttccccactggcattgaagattatgttcaccggattggcaggactggaagggctggtgccactggtgtggcctatacgtttttctgtgaccaggattcaaaatatgctgctgatcttattaaaattctggaaggcgcaaaccaacgtgtgcctcgtgacttggcggacatggcctctcggggtgggcgtggtggtaggaagcgtaaccggtgggcaacccgctctgataggggtggttcgcattctgaactggattctaggtatggtggaagagatggtctgtcagggtcttctggcagattggatagtagtcgcagtagtcgcaggcatgactatggtgatgatggacggtctcgcaggtctgggagaggtcgcagtaggagccgtagcagaagtgacagtgataggtatagccgaagtcctaagaggtcacgccgtcatagccgtagcaggaccaggagtcggagccgaagcaggagcaggagctacactaggaaccgtcgtgctagccgcagcaggagccgtagccctggtgctagccgtaggcatgaaagaagcgctactggctctgggtctgcactgccagactctgggcacggtgagcgcaaaagaacaccagaagctgacccatcaagaaaccatacaaaccactcagacccgaaagatgaccgacacccagaggatgggaaggtgggaaaggttgatctcgatcggtcgcctactccacaagacaagtctggcccatatagtcctgcttacaatggaaaaaccagtcgctcagtgagccctggtaatcaggtggaaggaaacaacaaagctgcggaggtttctaagaatcctgatccttcatcgccaccccatcatggtaagaccagggaggacgaagaggaaggtatgatagatgaagatggagagatagctgatgatcctcgggcaaatgcaaccgtgcagaatggcggtgataattgactctttggtcccaaaagaatttaacaaactgctgagcagccactacagatgatctgcgtgacaaagctcaaaatgttaaaaattgtctgaagctgtcttttcgtagtcaaaacttaagttatgaaactatccgtgtcgtagagagctggagattgttttgtgcctgagttgtcttataacattatatactttgtagaccctgtcgaagtagatcatgtgaagtgaagttggtagctctgttatttgtgaaccaataccggaggtgcaaatcatgcaagattatgc

SEQ ID NO: 15781 - DNA, 2957 bp, Oryza sativa
  ref <308>: DATABASE ACCESSION NUMBER: AK066295
  ref <309>: DATABASE ENTRY DATE: 2001-12-06
ggttttctctctctagttctctctctctttctctctccttgtttctctctctagagcggcgaaaatgtggcggcggcggagggggggtggtggtggcggaggaggagggggtgtggctcgacaacaacccgttcgacccgtggccgctccccgccgacctcgccgactgcacgtcgctcaccaacttctccgccaacaccgccaacgtcaccggcgcgctcccggatttcttcgggaccgcgctgccgtcgctgcagcggctcagcctggcgttcaacaagatgtccgggcctgtgccggcgtctctggccaccgcgccgctgcaggcgctctggctcaacaaccagattggggagaaccagttcaacgggtcgattagcttcatctccaacatgacctcgctccaagagctttggcttcactccaatgacttcactggccccttgcctgacttctcggggcttgcaagtctctccgatttggagctccgtgacaaccagctcaccggtccggtgccggacagtcttctgaagctcggatctctgaccaaggtgaccctgacgaacaatttgctgcaggggccgacgcccaaatttgccgataaggtgaaagcagatgtggtgccgactacggagcggttctgcttgagcacccctggacaaccttgtgatccccgtgtaaacctgctgctggaggtggcggctgagttccagtacccggcgaagctcgcagataattggaaagggaatgatccgtgtgatggttacattggtgttggatgcgatgcagggaacattacagtgctgaattttgccaggatggggttcagtgggagcatctccccagctatcgggaagattacaacacttcagaagcttattcttgcagacaacaatattactggcacggtgccgaaggaggttgctgctttgcctgctctgacggaggttgatctgtcgaataacaatctttatgggaaactccctacctttgcagcgaagaatgtgctggtgaaagctaatggcaacccgaacattggcaaggatgctcctgcaccgtctggatcaggtggtagtggcggcagcaatgcgccagatggtgggaatggcggtgatggaagcaatgggagtccctcttcgtcttctgctggaatcattgctggctcagtggttggtgctattgctggagtaggccttcttgctgcattaggtttctattgctataaaagaaaacagaagccttttggaagggttcaaagtccacacgctatggttgttcatcctcggcactcagggtcagatcctgatatggttaaaatcacagttgctggtggcaatgtcaatggcggtgcagctgcaagtgagacatacagtcaagcgagcagtggtccaagggatattcatgttgttgaaactggaaatatggtaatttcaattcaagtcctccgcaatgtgaccaacaacttcagtgacgagaatgtccttggccgtggtggctttggcactgtgtacaagggtgagcttcatgatggcacaaaaattgctgtgaagcgaatggaggctggtgtgatgggtaacaaggggctaaatgagtttaaatcagagattgctgtgctgaccaaggttcgccatcggaacctggtgtcactgcttggctactgtctcgatggcaatgagaggattctagtgtatgagtacatgccacaggggacactgagtcaacacctgtttgagtggaaagaacacaatctgcggccgttggaatggaagaagagacttagcattgcgcttgatgttgcaaggggtgttgagtatcttcacagccttgcacagcagaccttcatccacagagacttgaaaccatcaaacatactcctcggtgatgacatgaaggcaaaggtggcagactttggattggtccggcttgcaccggctgatgggaagtgcgtgtcagtagagacaaggcttgctggcacttttggataccttgctccggaatatgcagttactggacgagtaacaacaaaagcagatgtcttcagctttggtgtcatcttgatggagctgatcactggacgcaaggcgcttgatgagactcagcctgaagacagcatgcacctggtaacatggttccgaagaatgcaacttagcaaagacacattccagaaagcaattgacccaacaattgacctcaccgaggagacacttgcaagcgttagcactgtcgctgagcttgctggtcactgctgtgctagggaaccacaccagaggcctgatatgggtcatgctgtcaatgtgctctctactctttcggatgtttggaaaccgtctgatccagattcagatgacagctatggtatcgatctagacatgacactgccgcaagcattgaagaaatggcaggcctttgaggatagcagccattttgatggcgcgacgtcttcattccttgctagcttggataatactcagacaagcataccgacgaggcctccaggatttgcagaatcattcacctctgctgatggaagatagggtagcttgtgtgaaatctcaagcttgacggaagcagaacatccaagtgatcctttttgttcattcctttagtctcctcactcccctgctttttaatgtttcttggtttggctatgtgctgccttgtagctgtcctttgatcatgtatcttgtgatcttgactcaaagaattgcctggaagtttgcaaatttgctaactgttctgttctgccataattctgagcttaaaacaggagcggtgaagggctgctgggctgtatcaacactactccctgctccttaacatcatctcagttgtagtcattgttgctactgtattcttttagttctatgatgatcatgattgtaccagaaccatctcaattattggagaccgtggtcagggcgtcaggccgtctcctaactgtcaaaattattgaaccg

SEQ ID NO: 15782 - DNA, 1830 bp, Oryza sativa
  ref <308>: DATABASE ACCESSION NUMBER: AK066296
  ref <309>: DATABASE ENTRY DATE: 2001-12-06
gattcttcttcttctcctaggacagtgccatccaagtatccaacgaacgcaagatggctctggttgctcaggcctccaccatcgcgcagttcgccggagtggacgcctacggcctgatcaagatgatcgccgaggcggcgcagacggtgcggcgcaacagggcgacgtgcctgcagctcgcgcggcgcctcaagatgatcggagatcttctcaagcagctccacggtgcgcagctgatgcagcagccggagacgaggaacccggtggagcagctggaggagacgctccggcgagcgtacctgctcgtccggtcatgccagggccggagctacgtgtaccgctgcttcatgggaggccggcacgccgacgagctcagggaagtgcagagtgagatcgccttctacctccagctcttccctctcgtcagctatgtcgatgctacactcaactgggtgagacatctgaataaagccgatccatcctgcaaagaggcacctttggtaagaccatattttgtgccatttgtgattctctcatgggatggatcgtgcttagcagttgttcagaaagtacaccttggtatagtgtacacatggttatatatctcttaccttaatatctactcaactatctgcagatctttcatgtgtctgcaggagttaaattgttgcctagctgacatttactttttgcgataatttcattcaaacgatcgatcgacaggcatctagctagtacactaattctgaaagtgctagctagtacactattgtgattcttttttaccagctaagtacttttgcctgtggagaatttggcctagagtaaaagttcaggtgtgcacttgatccgaagtacaaactgtaagtcaatcattgatgtgtcctggataggtatgttttgttatcttgttttagcatggaagaacagaccagatctgattactgtaacttaccaaactcttggatattcccttctatcatccaagtttctctcaagatctctagtttgcatccaaagcttacatttcggtttatcaggattataaagttccagggtcggcgaggcagttgccgatacagttgaatcggtccatgagctctacaccagtgagcgacaacgagtaggaagatatctagatgcttaagtcattcaggttccagagctagatttatcaataatcattatggaggtgaaaagcaccagcatgactcaagttcagctcgctttgactgtttaagtcaagagttaaaaaggatacccaagagttcttacctgaatagagaaaatgtaaaaaccatgagtctaagtgaagaggctcaaatccatctcgctaaattcaggtggggaagctctccgctccagtgatttctcaaataaaaatctcgttgagctgcttcagattcagagttatatgagcagtagggctctagttctcctcaattttctgcttcatattcagagttaaatattacaagatagttgaaccagaatcctaccaaatttctgggttttgccgggatacaactgataatctcatggaatcattgtcaacattttttgagctattttttgagtgagttcagagataatagcagtgatgtttctatgcatttttctgcatcatatatgcagtgatgtttctatgcatatctctgcatcatatatgcaggatcggttgtcgtttgatgtacctgagttttgattggttgaattctaccactattcattatattccttcttaatgttttcattgggtatcatacacatgttttaaccacacaaagttatttatctaaactttgtatgatcctgcattctcaaggaatt

SEQ ID NO: 15783 - DNA, 2712 bp, Oryza sativa
  ref <308>: DATABASE ACCESSION NUMBER: AK066297
  ref <309>: DATABASE ENTRY DATE: 2001-12-06
gaggagaacccccaccccacccacctcgccccactccgccgcgccccctccccgctgcctccgtggagcgtcatctccacgtgcagggttagaggcttctggtggtggtgggggcagtgcggggggcgttggatggggatcccggaggtggtggtgccgccgagggcggccggcccgcggaggtacaaggggctcgtgccgtggcgcttccagccgggcttcgtcaggccgcctccggtcaagccccctgccgccgccgccgccgttgccggaggaggggtcgcgggcacgcccggcggcaagggtcgcgggttgggggcgtcgggggaaggcgtcgggtccagtggaggccggggagatcctcaatcgaggagatgcacccacagcgcgagcgcgaagggctctggtgatgcgcggagcgtggaggagggcggtccccgtgttgccggagacgacggcggttcgggcaaatccggcgtcgcggcggagggctccggatttgagggtttgaggaatggcaggggcggtggcgttggaacggcagctgccgaagattgtggtttggagaagtccaaccccgatggcatcgtcggagatgctgatgtgcatcttgagagcggcagcgatgcaagagatggggaatgcgtttctgagggtttgaagaagccttgtgtaaataatagcaatggttcttctgccgcggattgcgcgccgaaggtgaaaaagggaaatgacagtggcaatggaggtgccgatgagtgtaatgctgcagccaaaagtagcaacttagcatgtcctggcaacaatggcgacgaaacgaatcgtaaggggcggaaggtagtacttccatggaggttccaggttgggttcaagcggtcgttctcgaaagctttctgctccgatagtgaatcttcagggccctctggtactcaattctacagagcccaagactcttcgacaccgtgcactccagcaacaagaagttctgtccggtgttatgcgagtgctcattctggtgttagagtctcggccatgcgtgatttctcagtgaaaggtgagaaggaaacatcaactccatataagaagagcaaaactggcatggatggtcctagtcaagggatgccaaagaatggagttgtcctcgctagggaaaacattatgggatctctgcagaattttcgcttaatttacagggaccttttggatgaagaagaagagaagtcgacagaagcagtgattagacctgatctacaagcttacagaattttcagggagcggttcatcacagactgcgatgagaagaaatatattggcaatgtgcctggaatcaaagttggtgatatcttccacttgagggtagagctttgtgttgttggtcttcatcgcccacaccgggtgggtgtagatcatatcaaacaggaggatgggacttgcatagctgttagcattgtatcatatgcacaatcttccgatattaagaataatttggatgtcttggtgtattctggagcaatgacagctatagccaatcagaagatagagggtaccaacttagcactcaagaagagtatggacactaacacaccagtccgtgttatccatggtttcgtcactcacctcaatggaaactgccagcgaaagaagatccctacttatatatatgggggtttatatatagtcgagaaatactggagggagaaagagggtaatgatcgttatgtttatatgttccgactgagaagaatggcaggtcagaaacacattgacatccaagacattctgaattcaggacaagctgaatcatatggtggtattatcataaaagatatatcccgaggattggagaagatccctgtatctgttgttaattcaatatctgatgagtacccaatgccctatcgctacattgcacacctgcagtacccccgtaactaccagccagcacctccagcaggctgtggttgtgttggtggatgctcagattctaaaaggtgtgcatgtgcagtgaaaaatggtggggagattcctttcaatgataaaggccgcatcttagaagcaaaacctcttgtttatgagtgtggaccttcatgcaagtgccctcctacatgtcataacagagttggtcaacatggccttaggtttcgtttgcaagtcttcaaaaccaaattgatgggctggggagtaagaactcttgacttcataccatctggaagctttgtatgtgaatacattggagaagtgttggaggatgaagaggcacagaaaaggtcgaccgatgaatacttattcgctattggtcataattattatgatgaagccctttgggagggcctatcaagatccataccctcacttcagaagggtcctgataaagatgaggaagctggctttgctgttgatgcttcaaagatgggcaactttgcaaaattcatcaaccatagttgcacccctaacctttatgcacaaaatgtcctatatgatcatgacgacaagagtgtacctcacattatgttctttgcctgtgaggacattccaccccgccaagaactttcataccactacaactatacaatagatcaggttcatgatgccaatggtaacatcaagaagaaaaaatgtctctgtggctctatagagtgtgatggttggttgtattaggcttgagagtgtactatttccagaggcataattgaacttctttcattgggcatg

SEQ ID NO: 15784 - DNA, 1591 bp, Oryza sativa
  ref <308>: DATABASE ACCESSION NUMBER: AK066298
  ref <309>: DATABASE ENTRY DATE: 2001-12-06
gaggagcagaaggaggccccccaggagaacggggtgacggcgctgctgctgccccaggccagtctacctgcaagatgaacatcgacatggccaattccgacgacaaggctctcatctccgaggatacagcgcaccagattagcgctgatccttggtatcaagttggattcgttctgacaactggggtgaatagtgcatatgttctgggatactctggatcagtcatggtccctttaggttggattggtgggacatgtggcttgatcctagctgctgcaatatctctgtatgccaatgctctccttgctcgccttcacgaaatcggaggcaaacgacatattagatacagagatcttgctgggcacatatatggtagaaaaatgtattcgcttacatgggctctgcaatatgttaatctattcatgatcaacactggctttataatattagctggccaagccttgaaggcaacatatgtattgttcagggatgatggagttctaaagctaccctactgtatagcattatctgggtttgtctgtgctctttttgccttcggaattccttatctctctgctctcaggatttggttgggattctcaacatttttcagtctcatctatattactatagcatttgtgctatcgcttagagatgggataaccacacctgcaaaggattatactattcctggatcccattcagctagaatcttcactacgataggtgctgtggcaaatctcgtgttcgcttacaacactggaatgctgccagaaattcaagcaaccataaggcctcctgtggtgaagaacatggagaaggctctatggtttcagttcactgtcggttcgttacctctttatgccgtgacctttatgggctattgggcttatggatcctcaacatcaagttatctactgaatagcgtcaaggggccagtttgggtaaaagctatggcaaatctatcagcgtttcttcagaccgtcatagcattacatatattcgcgagcccaatgtacgagttcttggacacgaaatacggcagcggacacggtggcccttttgcgatccacaatgtgatgttcagagtgggtgtaagaggaggctacctgactgtcaacaccttggtagctgcgatgctcccattccttggcgacttcatgagcctgaccggagctctcagcaccttccccttgacattcgttcttgcaaatcacatgtacctgatggtgaagaggcacaagttgtccaccttgcagatatcctggcactggctcaatgttgctggcttcagcttattgtccatcgcagctgcagttgctgcgctcaggctaatcatggtcgattccaggacttaccatttgtttgctgatctgtgactgtgattgagacccaaattttcagtgcaaacatgcaccttgaatgatcagctgtaatttcttctttttcttaggggtgaactaccgcgagatgtttgcctcaaaacgtactgtagtgatgttttttagaacagtagtgatatattgtatcattgtacaactctgcaggttgaatgaattttgtggccatcgtgcatacctcttactacttt

SEQ ID NO: 15785 - DNA, 1511 bp, Oryza sativa
  ref <308>: DATABASE ACCESSION NUMBER: AK066299
  ref <309>: DATABASE ENTRY DATE: 2001-12-06
ggggacaaagtcgagagctagaggaagctaagctaggctagagcgaatcagctgggttgctagctttggttgctcactttgctctgcttttgcctcgccttggctgagctctgctcggctcggttcgtgcatggccgtaggagcagctgccaccgcgcgcggcgtgctccgctctgcatgggcctgcagctcgccgtccggcctccggcagccgtgacctgccgtccgccgacccgtcggacttcggcctccactactcccagttcagcttagagagtaagtgcgcgttctaactggataatttgatagattacggacaaagaaaagaatattcacttggatgaatgaaatattataaaactaaagaaataatttagaatatgttatctaaacaatgatgatgtagattttttttaaaaaaaaataaatcgtgctttttaagagcatatgatgacatgaacaatccatacatgaataatcgtgctttttaattattaagatggagtatttagaacacgctcgactgcatcttgcaccacctgcatatgcactttgatatcttattgttactgttttgtgacaaaaatttgcaccaaagtttcatctcatttcatcttttatccaaatcaagaacgtactccatacacttaaaactggatcagatcaatccattcatgttagtactactctgatggtgatactaatcagaccaatccatccaaagattcctaaagatgcattggtcaactgctgcctgggccatgtgtcactgagatattttcctctgctcgaacactttggccccgtcagacaggcaggtcggcttcaagcctaaaatatcagcttagttataccaccttggctgaaagcctgaaataaatgaagccaatacgagttgttctgatcatacagttcaggttcaaatggtataacaatattcaggcattaaattagtgaaaaatatgacactaggttcatctagttctttcactgaattaatgtgcttctgtcttaagttctaatccaccattgatccggtgataaatctttacggttgcttaggtttggacccaagggaaaaggtgatggaactgggttccaggagcttcttcctctgcccaaaatcttcagctgctgttcatgctccatcaccttcctgctcctctgatgaagcaagcaggatcagggatagggatgctcctgcagctgcaagagcaggcgcagcgccggcttgggtgagctacatgcagttctggcccatgatgtagaggtagctggtagctacatctcgtatacagacatatgtatttgtatcctagactgttcagaatagttcatgttccccggtgtgtgtttgtacaatagtagctctgtggattcaagaatcaagaacagggtcagaatttctgatgtatttgaaaattaccgatggcccagatgaataaccgaatagatttgtcatctgggtgacaattggcagcaaataataaagcttcagaagatggtagtgt

SEQ ID NO: 15786 - DNA, 2670 bp, Oryza sativa
  ref <308>: DATABASE ACCESSION NUMBER: AK066300
  ref <309>: DATABASE ENTRY DATE: 2001-12-06
gggtgcgcgttaaccaccggacaccacagcgagcagagcgccgctgttctcttccgcttctctccctgagctcggcctcgtgtcactgacgtcgtgtatgagaggaaggtggtgagctcagcagctcaggctcagctcgcagtagggagcagacgccggccgcatcgccccccttcgcgtttcgctgctccgaggtgaaacggcaatgcatgattggtgctgtgtcagcctcagtccttgattatttccacagagaaaacgcataatgcgccttgtttctaggaagacctatcaggttaagaattcgggagaaatatttggaaattctcaggcatgatatgtcccaaaatttctttggcatgcgttcttctgctcctatggtttacctcaacgggagatgcagcatacatgaagtacctggatccaaagcaacccaccaacactagaatcaaggaccttatcagtaggatgactcttgcagaaaaaattggccaaatgacacagattgaacgtggggttgcatctgcagatgtcatgaaaaactacttcataggtagtgtattgagtggtggtggaagtgtccctgctccccaggctactcctgcagtttgggtgaacatggtaaatgaattccagaaaggcgccttgtcaacacgtctaggaatacctatgatctacggcattgatgcagttcatggtaataacaatgtctacaatgccaccctatttcctcacaacattgggcttggagctacaagggatcctgacctcgtaaggaggatcggcgaagcaactgctcttgaagtacgggcaacaggcattccgtacacctttgctccatgtattgcagtttgtcgagatccacgatggggccgatgttatgagagctacagtgaagaccacagggtagtccagcagatgacagacattatacttggtctacaaggagatatcccaataaatcataccaagggagttccttatattgctgggaaggataaagttgctgcttgtgctaagcactttgttggtgatggtggaactcataatggaatcaatgagaacaacacgatcactgatgaacatgggcttctaggcattcacatgcccccatattatgactctattataaagggtgttgctactgttatggtttcctattcaagcttgaatggtgtcaaaatgcatgccaatcatgatctggttactggctacctgaaatccaaattgcattttagaggatttgtgatatcagattggctaggaatagacaggataacgtcaccacctgatgcaaattatacttactctgtgcaagctggaataaatgctggtattgatatggtcatggtgccattcaattacacccaatacattgatgatgtgacacctcttgttaagaagggtattatcaatatgagcagaattgatgatgctgtcaggcgtatccttcgagtcaaatttataatgggcctattcgagaaccctttagctgatcttagcttcgcagatcagcttggaaagaaggagcacagagatttggctagagaagccgtcaggaaatcacttgttctattaaaaaacggcaactctcccaatcaacaattcctgcctctaccaaagaaagctagaagtatccttgtagctggaagccatgctagcaatttgggctaccaatgtggcgggtggtcaattgaatggatcggaggtagtggagatattactgtaggtacaacaattcttgaggccataaagtccactgtcgctgattcaacacatgttgtctactctgagaaccctgatgaaagcttcatgaaaaacaatgacttctcattcgctattgttgttgttggtgagcgaacatatgctgaaacaacaggtgatgacccagaactcaccatcctagaccctggtacagacacaatccgaacagtgtgttccacagctaagtgtgcagtggttatcatctctggtcggcctgttgtcattgaaccatatcttccaatgatggaagcgctcgtcgcagcttggcttcctggaacagaaggtcagggtgttgcggatgtactgtttggggactatggcttcaccgggaagctcccacgcacttggttcaagtctgttgaccagctgcccatgaatgttggtgacctacactatgatccactcttcccttttggttttggtttgacaataaattcatcgcagccagggttctctggtgctgacagactgagagataggaatggggggatgatatacgttgtgttgagtttggtactgtcagtaatactgatgcatgcttcgggcataggtatattttaactcgagttgccctttcctagtcgtagtatggttccacatcaagtgctccatgccttcatcgttatacgttgtatgtactagcgctatggagattttttgattgcaaagatgcatttatccctaaagctaggtgggtcagtgggtgataagcagatttgttctttcacggttttaccaaattatgtgtggttataatagagcatttttatctagggaggacaaagtagatggattatgctctgcaaatactgatgggcctacagcacttctttactctccgtaccatgtgacactccacagaaagtaaaggaatattaaaatgtgggtaagaaattgatgggtttg

SEQ ID NO: 15787 - DNA, 1596 bp, Oryza sativa
  ref <308>: DATABASE ACCESSION NUMBER: AK066301
  ref <309>: DATABASE ENTRY DATE: 2001-12-06
gatcaatcgtatcgcttgccatgggctcaaactcgcgcctgcacgccgtgctcatcccgtacccggcgcagggccacgtcacgcccctcctgcacctcgccaaggtgctccactccagggggttccacgtcaccttcgtcaactccgagtacaaccaccaccgcctcctccgttcccgcggcaccggcgcgctggccggcctcgacgacttccggttcgagaccatcccggacggcctgccgccgccgtccgaatccgacaacgacgacgtcacgcaggacatccccacggtctgcacgtccttcctcacgcacggccccgcggcgttcggggccctcctggcgcggctcaacagcgagcccgggacgccgccggtgagctgcgttataccggacggcgtgatgagcttcgcacagagagtggccagcgacatgggcatccttgccccggcgttctggaccaccagcgcctgcggcttcatgggatatctccactacgccgagctcatcgacagaggctacgtgccactcaaagatgagagctacctgaccaacggatacctcgacaccgtgctcgactgggtgccggggatgccaggcatccggctgcgcgacatgcccagcttcatccgcacgaccgaccgggacgagttcatgctcaacttcgacagcggcgaggcgcagaacgcgcgccacgcgcagggcctcatcctcaacacgttcgacgcggtggagcacgacgtcgtcgacgcgctgcgccgcatcttcccgcgcgtgtacacagtcggcccgctcctgacgttcgcgggggccgcagcggcgcggcgccccgaggtgggcgcgatcggcggcaacctctggaaggaggacgcgagctgccttcggtggctggacgcccagcagcccggctcggtcgtgtacgtcaacttcggtagcatcaccgtcatgtcgccggctcatctcgccgagttcgcgtgggggttggcgcgctgcggccggccattcctgtgggtcatcaggcccgacctcgtcgccagcgagaaggccatgctgccggaagagttcgtcagcgagaccaaagagagagggatctttctgagctggtgcccgcaagagcaagtcctggagcatccggcgaccggcctgttcttgacgcattccggctggaactcgacgctggagagcataagcgccggcgtgccgatgatctgctggccgttcttcgccgagcagatgaccaactgccgctacgcttgcaccaagtgggacattggactggaaattgacaccgacgtgaagagggaggaggtggcacggctcgtgcaagaggccatggatggagagaaaagcaaggatatgagagcgaaagcaatggcgtggaaggagaaagccgtggcggcaacggaggaaggaggcacttcgagcgccggaatagatcgtttggttgaatttctgcttgcaagaggtgatcacgcaagctgaatattgttgttgttgatcaatcctaaaaatgcgatttgtaattgggtaaatgaatctatgatgtgaccatctcccactatcttgttagaaatatcaaatattagttctggagtgg

SEQ ID NO: 15788 - DNA, 3434 bp, Oryza sativa
  ref <308>: DATABASE ACCESSION NUMBER: AK066302
  ref <309>: DATABASE ENTRY DATE: 2001-12-06
ggtatcaatgtaaaaacagaattccccatctaaatcaatccttctctgttctatctctgcttctctgagttcttccttcttccttccaatttcttccaaaatcctcacgaatcctccattgttgcggtacaaagctagggtgtcgtgacaaattgatatcagagcagttaatcctggagaagccacgctatacctctcgtttgcagcttcaggtggaggctatggagaagcaaaatattgatttcggcaaggtgctgggtgagatccaggagtccttggtgttgctgaatcgagctcaagtggatacgcaggcctccatcgtcaagctggatcaaggcgtgagtgcttggagaccacaagtggaggcggctgtgcaggatctgcgtgacgaagttggtgaccttcgtcagcaggtggatcttctgaacaaggcgaaacaagctccaccggcggcgtcttccccttgggtcctgttgacgggcaaggaaaggaaggccccgttgctgcctacgccgacggctacctcaccagcagctgtggcggagggtgcagagaaatgggccaacggccaccgtcttcatcaaaatttctggggaaggcatcgggtgtagttactaccctgatccattctccgggcaagggtacgtctgattccaaccgaattccctttcgatccttggagaatttcgatttggatgggggggcgagtgattttgaccagggaaatcggcagtacaatcatagagttcctaaacttgatttccctaagtttgatggatcagacccgcaggattggcttatgagatgtgagcattactttgatgtgaacaacacttatccagggttatgggtgcgggtttcaactatctatttcattggtagagcagcttcctggcttaggtcttctagggctcatgttcgtttccctatttgggaggatttctgtgtggcagtagctaacaaatttgatagggatcaacatgatgaattgattagacaaatggatacaattaggcagacagggactgtgtgggagttttatgagaaatttgatgagttgatgaatcacctgttagcttatgacccagcagtgagtatgagatatcttatccataggtttactgagggtttaagacgggatattcgtaatgctgtcctcctgcaacgacctcgagacctcgaaactgctcttgctattgctactttataggaagaagtggcggaatcgtcgggtggacattcaactcgtgaattgaagaaatttgatggccaagtgaataatagatcttctctgaaaggggcttggccattacctcaacctcctggacgagtagttgggggtaatcgcactgaagatcgtctgggtactgaaccacatcgctcgacctcttcttcgtcagacaaaatttcagctctcaaggcacaacggcgtgcacaaggactttgttatatctgtgctgaaaaatggtctcctacacataaatgctctacttcagtgcaactgcatgcagttcaagtgcttttcagtattttacatgaaactgacagtactcttgatgatgagccagcagtttctcccactggtacattgatggcaatatctcttcaagcagtattgggttcagaaactgatggcaccatgtgaatggtaggtcagattcaagggctggagattctcatcttggtaggttcgggcagttctgtgagttttctgaattctaccattgctgacaatctaaagaatgttcagagaaaacctcaacaaatttcggttcaagtggctaatggaaatatcttgcattgtacttctgccattactaattgtcaatggagcactcaggggtatgtgtttaatacaactctcagggttctttctcttaacagttatgacttgattttgggcatggactggttgacagagcatagtcccatgacagtgaactgggccaccaaacagcttactgtctcactgaaaggacaatttattctgttacaaggaattaattcccaggtttctcagtgtaacttactgcttggccatcaaatgaaacagctgcaagctagacaggcagtggctcatcttgttcagttatgtgtctctcatagtaatatagagcaggagtttattccagacagtgtgcagcaagtgcttcaggaattctctggtatctttgatgaaccatctggtttacctccttcccgatcatttgatcacactattcctctgctgcctggggctcaacctgttagtgtgcgaccctatcgttacacccctgcccaaaaggatgagatagaatcagaggttactgagatgttggataagggaataattcagcctagcgcaagcccattctcttctccagtgctgttagttaagaaaaaagatggcacgtggcggttttgtgtggactaccgtcatttgaatgcaattactgtcaagaataagtatcccctccctattatcgatgaattgcttgatgagttatcgggtgcacagtggtttaccaagcttgatcttcgatcgggttatcatcaaatacgaatgaattctgccgatgagcataagactgctttccgtactcaccatggtcactttgaattcaaagtgattccctttggtcttactagtgctccagccacctttcaaggggtgatgaatagcattttgtcctcgctcttgcggcgctgcgtcttggttttcatcgacaatattctgatctatagccgctcgttggaggaacatgttaagcatttgagggctgtttttcagattctcgctcggcatcagctcaaagtcaagaagagtaaatgctcatttgcacaacagcggttatcgtatctgggtcatgtcattagtccaaatggagtggccacggatgaggagaaaattcaggctgtgcaaatgtggcccacacctacctctatgtcacgcccagaaattcccgaatagaattccaagcagaatgtgcattaaaatccccgtccaggaccggccggggtacacaaacgacaatgttgacatttagatctacgtcttacaaacatcataaaagacttacataaatgcagcggaaaaaggaagacaacaggagctaagccttgactagaactgtagcgggaacaccactccacaggcaccctcgatggcacggacgaagcctactcctcggagaaacctccatctgacacatacccgaactctggggttgggaaaaaaaaagagcaagactgagtactacccactgtactcagcaagtcataccggaataggggtatgatgcagggaattatcaaaggagagctagagtggttcagttgcataaagcgagcatttataaacagaagttgaaagatttaaacagttgtaataattaattattattaactatccactgtccaacgctatcccacgttgcgacaggcccaaccatcct

SEQ ID NO: 15789 - DNA, 1350 bp, Oryza sativa
  ref <308>: DATABASE ACCESSION NUMBER: AK066303
  ref <309>: DATABASE ENTRY DATE: 2001-12-06
ggttgagaaagagggacttttactgcatcatccaccttttatccacggttagtcgtcgctgacgacaggctaggcacactagatgagaaaattgcaagggctcttttcacaagaagatggaagatggtgtacaattggagagcttgaagcaggtatatcagtcaggatcagagacttgatctttgtctgttgattgggtggttggtgacactgccttccacatctatgatatatatcgctttaaacatagatgtgttcctcttatgctaaaatttagctagtgtaaagtgtaaacacctggaaagataaacactaaaccgtacagtcaaagtgtgttcttctgaaggtctatatatgtggatatccatgcaatatgcaacctacaacaactgctagcccaaaaaaaggaaagaaaacacttgctgcagaaacttgggaatttcaatggcgggagcaagagccattggttctctcccagtgcctaatgtgcaggagcttgcaaaaacttgcaatggtccagatgaacacatacctgaaagatacatcaggccaggggctagttctgaggaggtcatcagcaactaccatggtgaggcgattccgatcatcgatctcaataagttgctttctccgcaatcatcagaagaatgtgtgaagctgagatctgcctgccagtattgggggttctttcagctcatcaaccatggagtgccagatgaagtgattgcaaacctcaagagagacattgttgatttcttcagccagccactggacgccaagaaggagtacacacagctacccaacagcctcgaaggctatggacaggccctcgttttctccgaggaccagaaacttgactgggcagacatgctgtatcttcaagtccatcctagcgattcaagggacttgaggttctggccgacttcccctgcatctttcaggcgatcccttgatgcatactcatcagagactaaaagcctggcactctgcttgtttgagttcatggctaaggctgtgggcgctaagccagaggctcttttaggcatatttgaagagcagcctcgaggcttaaggatgacctactacccaccgtgcctgcaatctgacaaggtgatgggcatttcgccgcactctgatgtggttggcctaacactgctgctccaggttaacgacgtgcagggcctgcagatcaagaaagatggcaagtggttatccgtagacgctccgaatggtgcattcatcgttaacattggcgacacacttgaggtaccgaccaagaactaattatgctttcacttgtcaaagaactttgatgtaactggatgagttcaataaaagcttccattatct

SEQ ID NO: 15790 - DNA, 1833 bp, Oryza sativa
  ref <308>: DATABASE ACCESSION NUMBER: AK066304
  ref <309>: DATABASE ENTRY DATE: 2001-12-06
gaggtgtagtagtcgcgtgtcgcgaaatgtcccgtctcgttgtctcctctgctccttgcgccgccgccaaggcgagtcgcggctgagccgggagggggcggcgatctccatttggcgagcagagcaggggaggggattctggtctgaactgatcatcatggtgaaagaacatgcagagaaaggagatggcgttcaagaatgccaatcgtctcctgcgctttcagaagataacttgaggcacagtttccgattgggagatattacatgggttaagcacactggctcgtggtggccagcacaggtcgttgaaaattcatgtatcagcagcaagcctaagaagacggccaagcatcatgttccagttcgtttgtatggcacttgtgtacacatgtacgtagacccttggaagtctaacatggaattcaaaatgatgctgaagcgagagaataaaagtgcaatggaagcattccatgaggccgttaagaaggagctgtcccacgttaattcaccttgcgattctactgaagaagctggcaacttgaaagccaagacctcttccaagaaagtcagaaagcaaaagggcttaaaggaatcaccagcctctgagcatatgggagaggatacaaaagaccagcatagtgcagagcagcaccaagaacttggatatactgcaacaactggagttgccactcgtaaaggaagaagaacgcgagaaggtgcaagacaactcagtcctactgatggtgaagatcaagccagtggtaaaaaagcttctattgagggttcaagttataagacagaaaaacaagttggttctgtatatgatgaagaggcttgtaagatgacaacgacagagagatcagtgggtagaagggaaggactgagacgatctgcttgtacacccatgaaggcatatttagatccatcggaggatagaacatcacttttcagtgatacaagtgcaagtgaaggtgcaaatgaagtaaatagaacaccagagaattcaaatcagcatgaagatgattcaaccatagatggaactttggcttctcatgcagaaataagggttatggttagggatatactgttcagtgacattattgccaagcagcatgctgctgagatggcatatgtagatgaagtgatcaatggcatttgctgcgctagtgaattgaacataactggtgatcctactcctgttgcaaagggtggacgaggcatcaaacgaggtggtagtagggcagaggcggagtcaagtaacattacacagagatctagaaaagggagaatagatcaagcaagtagcaatggaaagaaaagagctaaggacacctcagaaaccatgaatcatgacaacagtcccaactctttgagagggcctttcgatagtactggatgcagccatggaggaactggggcaagttagcgcgcgtcaaatcaggatcatgcagagtcttgctttgattgctccgtcaggatccccgtttggcaaaaatggactggttgcatcaaccagtttataattctgagttaattcgaatatccttgaaaggtattcgacagatattcgaaagctatcataactcatgaactcagcttcggttacacctaaccagttgctcgcttaggtcttttggagaaacccacaacgctacatggtcttctagaatgcaatgcgattgcctttatgtgtagtagaatcgactgaatttaattgcaatgtgagcacaacattgtatctgtaaggccacaaaatggtcccagtatactgccaactgaattcatacatgagtacactattattatgttagtactagtaccaagttaaggctc

SEQ ID NO: 15791 - DNA, 1228 bp, Oryza sativa
  ref <308>: DATABASE ACCESSION NUMBER: AK066305
  ref <309>: DATABASE ENTRY DATE: 2001-12-06
ggtggatgaagaatctatattgaaggctttgcctgcagatcttcgccgtgacattaagcgtcacctttgcctggatcttgtttgccgggtcccttttttctcccagatggatggtcaacttctggatgccatctgtgagcgtcttgtatcttccttgagcacagtgggcacatacattgtccgtgaaggtgacccagtgacagagatgctttttatcattcgtgggaaactggaaagctccactactgatggtggccggacgggcttcttcaattctataacgctcaaaactggcgatttttgtggtgaagaattgcttggatgggctcttgttcccaagcctactgtcaacctgccatcctccaccaggacggtgaagacaatcgttgaagtggaggcatttgccctccgagctgaagatctcaagtttgttgcgagccaattcaggcggctccacagcaggaagttgcaacacacatttcgctactactctcaccactggaggacatgggccgcttgtttcatccaagcagcttggcgccgctacaagaggaggaggctggccaaggacctaagcataagggagtcattcttttccaggagatcattcgaagatgatggttcccctgagcacagccttgtgttgaatgcagtcaggaaaggagcccatatcattaaagaacttcctaagtttaggaagccttctgagccagacttctcagctgagcatgacgactaagcgtagagtagcttacattatttgctactgtgaaatcaccgtttgcgctgcaaatccttctgcttgttgtcgttccatgatcacgcttcagagtttgggttgacaggtaactgattgttgataggtgaaatgctgaagctcaacttaacacggtgaaagcatcattggtggtatgggagttaggatcttggagacagaatgatagatagtaaccacgttaattttcttttcttcttggtgattgtgttgctgtaggcttagcttagtgattattgtttaccctttggtcatgctgttaatccagttgtaaacttgtaattgtgttggatattgttggcaacagcttgggacctcgtagtagcatattgttgtattttgactcgccgagcaaattctagcgtctcggcgagtacaccatgtttctcgtttttgagtgtatatgtaaatcacaggaggaacactgaaattgtttttcattcattctgttct

SEQ ID NO: 15792 - DNA, 1276 bp, Oryza sativa
  ref <308>: DATABASE ACCESSION NUMBER: AK066306
  ref <309>: DATABASE ENTRY DATE: 2001-12-06
gtgccgccaccgcttcaccaaatcaaaagctctcgctgctcctcgagagggagttggtggagagagaaagagagagagagagatggcgtcgccgtcgtcgtcgtcgtcgctgtgctcgaccttcgcctcgccgcgcgccgcctccctcggccgccgcctcgccttctcctcgcccaggaaagcattccgagtgagggcatcatccagggttgacaagttctcgaagaatgacatcatcgtgtccccttccattctttctgcaaacttttccaagcttggcgagcaggtaaaagctgtggaggtggcaggatgtgactggattcatgttgatgtcatggatggacgttttgtgccaaatatcacaatcggacctttggttgttgatgctctgcggccagtcactgatcttccgttggatgtgcatctgatgattgtggaacctgagcaacgagttccagattttatcaaggcaggtgctgatattgttagcgttcactgtgagcaatcgtcaaccatccatctacaccgaacagtcaatcagatcaaaagtcttggagcaaaggctggagttgttttgaatcctgcaacccctctcactgcgatagattatgtacttgatgttgttgatctagtattgattatgtcggtgaatcctgggtttggtgggcagagctttattgaaagccaagtgaagaagattgcagagttgagaagattatgtgcagagaagggagtaaacccttggattgaggttgatggtggagttggtcccaaaaacgcctacaaggtcattgaagctggggccaacgccattgttgctggttcagccgttttcggggctccagactatgcagaagctatcaagggaatcaagaccagccaaaaacctgtggctgtaccagcatgaggatcctaaagtagtatgctgtgtacgttgtttttgtttaccagtaccgcggtttgtacagatatgtgccaagctgtacgttatattggagaaattgaaggaagaagaaaacgtggagggcgaccgtttttctcactgtccgcgaagatatactacatattctcagtgtcatgtgatactaccgtgctcacgaaattgttcataataaatatcgttctttagcaaatcctataatgatttacacttctagcatttgaaatttatccacaaatatatgcatttttagagtactactttttgccccagtaacaaacatatgctccgcactggagtattgggtaatgtgacagttgaaaatatagtactacc

SEQ ID NO: 15793 - DNA, 2412 bp, Oryza sativa
  ref <308>: DATABASE ACCESSION NUMBER: AK066307
  ref <309>: DATABASE ENTRY DATE: 2001-12-06
gccccgcctatagcggtaatcgccccacctatagttatagtacccaaattctatcttgaacttcctatttttcaaacaaaaatacaacgtttttttatttgaaaataaaaagaaaaataggagaaaaaaaaatatgacagaaaagaaaaataggagagaaaaaaaaaacccgagagaagcaaaaattactttcgagggtttagttatggaagccctacccaacggaatgttccgcgttcgcctagagaatgacaccatcatcctgggctatatttcaggaaagatccggtctagttctatacgaatactgatgggggatagggtcaaaattgaagtaagtcgttatgattcaagcaaggggcgtataatttatagacttccccataagaattcgaagcgtaccgaagactcgaaggataccgaagatttgaaggataccaaagattcaaagggttaggtttttcttttttttttctagggtaaaaaattcaaagttctaaaattcaaacaaagagacttattttttccaaaagagtaaattcatagtttaagaaaggaatacggaaatatgaaaataagagcttctgttcgtaaaatttgtacaaaatgtcgactgattcgtaggcgtggacgaattagagtcatttgttccaatccgaagcataaacaaagacaggggtaatctttcgaaaaaagaacttgactttctaaaaagtaaagaaaaaagtacccgcgaaaatgtccaaattccaaataaaaaaattcaagtaaaggatatattttaccctgaaacggatatctttgtatctttttttctttttgttatttctaactcatatttatgagataataaaatatgacaaaagctataccaaaaattggttcacgtaggaaagtacgtattggtttgcgtaggaatgcgcgttttagtttacggaagagtgcacgtagaataacaaaaggagttattcatgttcaagctagtttcaacaatactattataactgttacagatccgcaaggtcgggtggttttctggtcctccgcgggtacttgtggattcaaaagctcaagaaaagcatcaccctatgctggtcaaagaacagctgtagatgctattcgtacagtgggtttgcaacgagcagaagttatggtaaagggtgctggtagtggaagagatgccgcattacgagccattgctaaaagtggtgtacgattaagttgtatacgcgatgtaacacctatgccgcataatgggtgtcgacctcctaaaaaaagacgtctgtaaaagaattaaacccctttcaagagaaataaacgattcaatgatcaaataataatactagtctatatggttcgagaggaggtagcaggatccactcaaacactacagtggaagtgtgttgaatcaagagtagatagtaagcgtctttattatggtcgtttcattctgtccccgcttagaaaaggtcaagcggataccgttggtattgccttgcgaagagctttacttggagaaacagaaggaacatgtatcacacatgcaaaatttggaagcgtgccgcacgaatattctacaatagcaggtattgaagaatcggtacaggaaattttactaaatttgaaagaaattgtattgagaagtaatctctatggagttagaaccgcatcaatttgcgtcaaaggtcctagatacataactgcccaagatattatcttaccgccttccgtagaaatcgttgatacggcacaacctatagctaacttgacagaacccacggatttccgtattgagttacggatcaagagagatcgcggatatcacacggaagtcagaaagaacactcaagatggaagttatcctatagatgctgtattcatgcctgttcgaaatgtgaattatagtattttttgcttgtgggaatggaaatgcaaaatatgagatactttttctagaaatatggaccaatggaagtttaacccctaaggaagcgctttatgaggcttctcgtaatttgattgatttatttcttccttttcttcacacggaggaagagggtactcgtttccaagaaaataaaaacaggtttacttccccccttttaagctttcaaaaaagattaactaatctaaagaaaaacaaaaaaagaattccattgaattgtatttttattgatcaattagaactgccttctagaacgtataattgtctcaaaagggccaatatccatacactattggaccttttgagtaagacggaagaagatctgatgagaattgacagttttcgtatgcaagatggaaaacagatatgggacactctagagaagcatctcccaatggatttacctaagaataagttctagttttaaatccattgcaattttttcctcttcttctttttcgagttag

SEQ ID NO: 15794 - DNA, 1279 bp, Oryza sativa
  ref <308>: DATABASE ACCESSION NUMBER: AK066308
  ref <309>: DATABASE ENTRY DATE: 2001-12-06
cccccccccacccccaacccacgcctccctcgcatcgcccctccccgaccccgccgagatcggagcaggcgccgcctccctcctcccgcctcctcctccgccatggcgccgtctctgctcggggggttcaccaagtcgctggccatgacggtgctctcggagatcggcgacaagaccttcttcgccgccgcgattctggccatgcgctatccccggaagcttgttcttgctggttgtctcacctcattaacagtgatgacggctctatcagtttcacttggttgggttgcgccaaatctgatatcacgcaaatggactcatcatgtgaccactctgctattctttgtgtttggcattttgtcattgtgggaaggcttcaaagaagatggagattcagaagaattggctgaagtggaagctgagctggatgctaattttaaaagcaacaaagcagaatcgaaaagtaaatctaaggcaaatgatgataaaaagaagcagcaaagaccatttgttttgcagttcttctcaccaatctttataaaggcattttccattacattctttggagagtggggtgataagagtcaaattgctactattggtttggctgctgatgaaaatccattcggtgttgtcctggggggagttctgtacgagctacatcttctgtttcccttacactttttaaatggtttattatgtggtcctgactaaacctactactgtgcatagggcccaagcactctgcactaccgctgctgttatgggtgggaaaagcttggcctctcaaatatctgagaaaatggtcggattgtcgagtggagtgctattcctgctgtttggtatcatgtcatacttgtcaggaccagaaggagaattataatgcccccagaaagtcatgcataaggagaattatcatgttcatcatggccggttaacaagcttgttttcactacgacttgatctcatcttagtaggtggacgatggcgacgaaagcgctgatcctttgcaaggaggatggcgattacttagcttagtcaacacattgtaaacatttcactcatcattcataaataacaagatggtaccaaagactctactggttgcttcgtgttagtcccagcaccagacaacattcagccaaaactgtcggagtagttgctgcatactaccatactattttttttggtcgcaactatgcataagaactgctagtcttcggactaaattgcctggactgaagaggggttacaaatcataaaaagtgatttcagaatt

SEQ ID NO: 15795 - DNA, 1894 bp, Oryza sativa
  ref <308>: DATABASE ACCESSION NUMBER: AK066309
  ref <309>: DATABASE ENTRY DATE: 2001-12-06
gactccatcatcccccgacgcccccgcatcgccgcttcaccccgacaccccgcgcgacctagtgcgcaacggagggggaagcggtcgtcgtcgtcgtcagcggcggcggctgcggtgcaccggcgggaaacaggtggcggcgcaccggtttcccctttctgtatcgcccccccctcctttctccttccccatccctacgagcaaacgccgccggcacacggggactgagggaggcggctgcgggcgagcaaggagacgcaccggcggctgagggcgtcggcacacgtcgtcgcgcaaggtagctgacgactccgcacgaagaccccaagcgacagcacacgaattggtgtaagcagaaacagtccacaatgacaactccactccctgtcagtgctggtgatgcttcacgagtcctcttcactggcattcgagaccacactgacatcctcatcgaggtcctccttcggctgccaccctggtccctctgccaactacgctgtgtatgcaaactatggctagagcggacaacatcgtccaccttcctctctgcctatgctgaacgtcataccaccaacccttcaaactggttcctcctggaccgaacaatctttattgacactgcccccacaccccgaggcccaatacgtgcactgcttcgcaattctgaaccaccaaaagtctcatcaatcatcacctcctctcgcatgtgttccattcaccggaaagagtccttctatgaccagctacccatggttgtcagctacagtggtggcctcatcctgctcactggcaatgaaaataactactatgtctgcaacccattcactggagatactttccttctaccagttccgaagccccaactccgcaatgctgaaagcttgggcattgttgctcgggatggtgagtatgtggttgctgaactcatgatgtcctgtctacgttccttctcatcagtaaatggccgttgggaggagaagcctctcgtatgccctcaattctccaggggtgacatggtattctcctctggtgggatgcttcattgggttgatctcaactgtggcatactctcctgtgacccatttgcatcagaaccaactgtactttttatcaacctgccagaggccagtggaagacccacccgtggcctggatgaatggatccacatgaggtatgttggtgtctctgctgggcggttgtgcttctttgacattgatgaggatgatggagaatctgggtcaatgagcttgtgggcactaggtgggaacagtggtgagtgggtgttggaatacaaagtggatttcgaagatctgtgggaagatgaaagctatgatgattattcgctggatgaggatgaggttccattagttggcttggttgacccattgaatgagcacagtgtgtacgtgatttctcaggactgcctcttcaacatcgatctgaagacaaagcaaattcttaattgtacagcacagactaatgctgggagggaggttggatcttctcctccaattgcttgcgtggtgccccctttaccgcacttggtgtctccctatccgtcatgtttaaggaaagaagcaagcaacagtgatcctcaggaggcaggaagcagtgacaagccccaaaagtctgggaagggcaggagaaggaaatcgaagacgtgataaaatgaaaattgagttcatgtcatcggttttatcattgatgagttgaaaagtatctctactgatcatgtgcggtcctaatctcttttaaatctcatatgcagtgtgttgcagctctgttgcatttccttatcagttcagctaaacttatgtatcgtttgaaccttttagcgtcatatgtatcgtttgaacacctctttgttgaacgaaatgaagactaaatttgacct

SEQ ID NO: 15796 - DNA, 3170 bp, Oryza sativa
  ref <308>: DATABASE ACCESSION NUMBER: AK066310
  ref <309>: DATABASE ENTRY DATE: 2001-12-06
tgagctaaacgcaaagcaaaaccaacgcaaagccagagaagaaacaagtcagaggaacgcagctccctatcctgttccgctccagacgcacgcacgcacgcgctgcactgactgaggccgacgcggcggcggcggcggcagcggcggcggcgaaagcgaccccgatgacgaagcccaagaacggctgcctcaagatcctcgcctgcgccggcggcggatccgacccgtccgccggctccgacggcgacgcggatgaccacgtcgacgagaacaaggccatatcagataaaagtaggtggagctttcgtaggaggtctacaaggcatcgtgttttgaagaattctgatatatctgaacctgaaactcttagttcgagcaaagcaaaagctgaaattgctccaagcaacatctattcttcaacttactcctatgcctcagaaaaacctctacagcaagagaaaccagatgagaaaattctgcagcaagagaaatcagatgagaaaattctgcagcaagacgaaccagctgagaaaattctgcagcaagagaaaccggacgagaaaattttgcagcaagataaaccagatgaggggcctttgaatgaagagatgcctgatgaaaaactgatagagaagccaattgatcagccaggtgatgaatcaattgaaaagccagctgatgaaccaattgaaaagtcagctgaccagataactgaaaggtcaattgagcagccagctgaaagagtaactgaagtgccaatccaagaaccaactgaaagggtaactgaaactccaatagtaaagccaaatgataatgatgttgaggaacacactgataagacggatgaaagtatttttgtttcatcaactgaggtgaagcaggaggaaaccgtctctctctttgatggaagcagtgaagaccatcaggaagattgtgcggagactgctgctgctgtcattcagtctggcatcagagtgcacactgaagagcaagaactaccaaatgataaggaccttgtgaaactgcaagctgtgatacgtgggcatcttgttaggaggcaggctgcagaatcattacaatgcttgcttgctattgttaaaatgcaaggacttgtccgggttcatcaagcacagcaatatggaggaaagtttcaggactctttgatctgttcttcaagtgagaaattactcaataatggatttgctctgaagctcatggacagcatgtcgacttcaaaatccattcacataaaatgtgatccttctgaacctgatgttgcatggaaatggatggagagatggacatccatgattccaccaaacactgggggacacttgctagaggatagagagaataacgagtcggtggatgagaaaataaaaggagatgctcaacatgaggaaaatacccttcctttggattctgacatctctttcctgaagttggtgcctgatgatgcggaagagacactaaggccatctgattctcatcccctggaggtttctgcatgcattccagatagaacttctggaatggaaattgaagatgttcctgaaccagatttgattgaaaagttcaaggaagatgttgaaaaattgactgaaccggagactgagaatgttgcggaacaacctttggaggtctcagttgaacaatctactcaaactgatacatcaagggaacccattcctcttcctgaaaaacctgaatcttcctttgatgatactatggatgcatataaaactgagcagacttcggagatggaaggtaaaaagtttatggctagaaagtcatgcaatcctgcatttgctgctgcacagttaaaatttgaagagttgacttccaatttgacggtcagtaggtccaacagtctggatggggcaaacaaaccaaaggtacatactcctcgttcacaagacaatgtctcacccaagcaaagtaatgacacaagcataccagagagctcagtggggcatgatcctaaaatcgtagttgctgcttcagaatgtggaactgagatatcaatctcctctacacttgactcaccggatagatcagaagctgatggtggcgagattgtactggagattggatccctggaagataggaaccatgttggtgataatgctgaaaaggataacagtgttttgcattctgaagtgaacacttctggaggagctatcgagccagaaaaggaagtacaaactgatgacactgctatcgctgccaatgcaattgatcctgtgcctgttgaacaaccacatctgggacaggaaaagcctgatttacatgatgaactggaaaaatctgtaggatcttatgtgaagacacctgaaggtactcccttgagccgaactacctttgctgaatctcatgggacaccatcaagtgaggtctctgttaacaccaaaaaaagcaagagcaaaaggcccaagtctcatgtaagcaagagatcactaactagtccaagcagcgattctgtgggacggagcagcatggataatctgtcaaaggattacagacttgggaggcgagagagctcaggcaaggttaaatctgatcatgttgatcaagaacctcgcataagcaacagcactccattgccaagttatatgcagtttacagaatctgcaagggcaaaggcatctgctagtgtatcaccaaagttaagcccggatgtgcaagacaacaatccaaggaaaaggcactctttgcccatgactaacggtaagcaagattcatctcctcgcatgcaacgatcatcatcccaagctcagcagaatgtgaaaagcaatggtgctgttcctgttcctcccaattcatctgataggagatggcatatatgatgagtgcgcctagcaagagtttttagcgaggtgccatagaagcatttgatgagatgactcagatttgtgcttgttttcccaccgcacaccaccatctaattcgtcagtttttttattctttgttggaatactcggtatggttggaacttgggagaagaacagcaacagctttcctataatgtacatttgttggttcttggtttgttgttatttgactggtaatgaatgaatgaatgatttgtgtgtgtaatatatcttgacttgtaatgcaacagcggtctgttatatttgccaatattgatgttcatgttggtgtggagtggg

SEQ ID NO: 15797 - DNA, 2841 bp, Oryza sativa
  ref <308>: DATABASE ACCESSION NUMBER: AK066311
  ref <309>: DATABASE ENTRY DATE: 2001-12-06
gaaaccccacgagcccccctccacctccacgccgcagccaacccaaagcgccatggcggacgaccacgccgccgccgccgacctcgtcgacggcggacgccccgagggcgatacgcattcacgtgaagacggattatcaaaaccaagagataaagatagagaaagagaaaaagacaaggacagggaacgccacagggaccgtgacagagatcgaggaagagaccgagatcgggacaaggacaaggaaaaagacagagacaaagaaagggacagggatagggacagggacaaggatcgggatcgccaccataggcatcaccgtgaaagaagagaacacagagatcgctctgatgatcatgatcgccacagaagccgtgattctgaaaggagaagagaccatgaacgggatgggcgtcgcaggcatcggtctcgctcacgctctcgttctaggggcagggatcgcagatctaggtctcgctctcgttcaaaaagcaagcgagttagtggatttgatatggcgcctccagctcaagctgtggttccacaatttcctgctattccaaccccaagtatgctctcatcaactaagttaaacggctcaatttcatttttcttttcctcgtcaatttgtggcactttttctgaataataattttagtgggacatttgaacaatggagttaagaaaaataattttgctgggctggatgattgatgtacatgagtattttttttagaatgaattatatcttcggccgctataattcttcatccttatcactgtataatgccacactatcttattgccgttgccataaactaccggtgaattactagtccattaaggtcgattattgccgtagcaggatgatgcttggtgttatacctagtaaattggtggatatgtctggatgttatacctagtagaactccaatacagttaatatttgcttagtatgatcggccttgagcattctacacataatagtaagaggacaggagaacaagcaaattgttattttatagtagtctacatgatgcatttggagagacattggtgctttaattaaaggataaaaaagaataccaaccagtgggctccgtaagcacccctcaggcacctatctgctgcagatgcacttcatgtgatagttactaatatgaataagtgaataacttgtaagtttccattttattattacttggtaactggaaactgagcaaaacttttttgcttgtgttcttttgttgtttgtctgttttgtgtatgtgtatggtaagaaggcaatcttgggttacttgcccccactgctgccaatggaatgagctgcctactgtagctttaatgtacaaggaggaatcagtgctctggtttgataccatcttattcgtcttcaactagcaagtattactggttgctagcattatgtctattatatttgtccttgcacatattttgttcattcttaggcttggatactgaacagctagatctattttagacccagactgatggtgagaactagtcagttctaatggtggaatttttttccttgctaattgtttatgctctgtactagaaatttattgataaattgcaggtcagtttccgggcactgctattcctggaatgtttccaaacatgctcccgatgggtgttggacagttcaatccccttgttatccagccgcaagcaatgacgcaacaggctactcgacacgcgagacgtgtttatgttggtggacttcctccaactgctaatgaacagtcagttgcaatatactttaatcaagtcatggctgctattggaggaaatactgctggtccaggtgacgctgttcttaatgtctacataaaccatgacaagaaatttgcttttgtggaaatgaggtctgtggaggaagcaagcaatgcaatggcactggatggcattttgtttgaaggggctccagtgaaggttaggagaccaacagactataacccttctctggcagctgccttgggccccagccagccaagccccaatctgaatcttgctgcagttggcttaacacctggttcagctggagggctagaaggcccagatcgtattttcgtgggtggccttccatattacttcactgaggctcaagtccgggagttgcttgaatcctttgggcctcttcgaggatttgaccttgtgaaggatagggaaactggtaactcaaagggctatgcattctgtgtctaccaagatctcaatgtcactgacatagcctgtgctgctctgaatggcatcaagatgggagacaaaaccctaactgttagaagggcaaaccagggagcggctcagcctagaccagaacaggaaagtatcctgttgcaggcacagcaacaagtgcaattacagaaacttgtatatcaagttggagcactccctacaaaggttgtgtgcctgacccaggtggtttcggctgatgaattaaaagatgacgaggagtatgaagacattatggaggacatgagattggaagcaggcaaatatggtaatctgattaaggttgtcatccctcgccctgatcctagtggattaccagttgctggagttggaaaggttttcttggagtatgcagatgtggacggcgccaccaaagcaaagacggcaatgcatggaaggaagttcggtggaaatccagttgtcgcagtgttctaccctgagaacaagttttctagtgcggaatatgacgcgtagattatcccgctatgtaaaacactagtcttttgtttttcttttgcgccagtttgctaaattgtaacaacaatttctctttaagttgaaccttccaatagcttggatttatgc

SEQ ID NO: 15798 - DNA, 3978 bp, Oryza sativa
  ref <308>: DATABASE ACCESSION NUMBER: AK066312
  ref <309>: DATABASE ENTRY DATE: 2001-12-06
gactcactccaaatcctgagtagtccatggcgactccacccacctgagcagaaagatctcctccaccagcagcagcagcagcagcatcagccaagagcagcaagaagccaagaacaagagcttggctctccaattcttttgcaagtgcttctcaaaatggtttcatgtgtgaaccgaggcagctgtctggtggtgaacagcaccatataatcatcacaataaacagagaggaggggggtggggcgtagtaaaccatcaggaatggagttcgccacaggggcaatgggcacgctcctccccaagctggtggagctgctcaaggaacaatatgatctgcagaagagtgtgaaggaggggataacattcctcatagctgagctcaagagcatacaagcagcacttgagaaggtctcaaaggtgccgctagaccaacttgacgagcaaaccaagatctgggcttgggacattagggagttgtcttatgacattgaggacaacattgataccttcatgatatgtgtggatggtcttgagccagccaagaaacataatttaacatggttaattgacaagtgccacaaatcgttgtccaagataaagatccgacacaaaatagccaatgaaatcaaagatatcaagagccaagtcagggaggtgatggaacgacgtgataggtacaagattgatgatgtcgctactattcctccaacatttgtggatcctcgcatcttgacattatatgagaatgtcaccaagcttgttggggttgataaggcaagtgatgatctaatgaagaggttgtctgtgggggatgaggcgcccaagaagctcaagatggtctctgttgttggaattggaggattgggcaagacaactctttccaaagtagtgtttgacaagcttaaactgcaatttgattgtgctgcttttgttcctgtcggtcaaaaccctgaaatcaagaaagtcctgaaggacatcctagttgaacttaacaaggacaagtacatgtcatttgatgtaacaacagtaaatgaaaggcatatgattaatgagcttcgagaataccttgacaataggaggtaagtgtgtagtaccctccaatatttttgcttttcatgatgaacttattctcatggttgcaatagctgtagacctttatctgtattactggtatatataactttttctatatttctttaataaaaaaagaatgaaaatgttgcatagatcaggaaaacagaaaatctaacgaattctaatgttaattgcagaacaggaaaaatatatttaactatctaactacattaatccactcgttgctagtgccagagaccaatttgatctaaaaccctttgattcaatagacttaaataataagatgagaattatgtttgcacacaaatgtcttgggcactcatattgcttcagttttagaaaatagtaattaaataatctcttatttatatatcagtacagtttatcatttcactaatccatgacccttctattctcatggggataggtacttgattgttattgatgacgtatgggagacatcaaaatggaacattattaaatgtgctttgattgatagtaatcgtggaagtagagtaatcataacaactcgtatttatcaagttgctaatgaagctgctgaagaatttggtggtgtttacatgatggaaccactttctgatgataactcaaaaaagttattctacaatagaatatttggtgttgcctgcagtagttcaactggtaatcaatcggttgaggcaaccaaaaagatcttacataaatgtggtggcataccactatctataattgcaatagctagtttgttggttgataaaccaacaggagactggtctataatttatgactctataggttttgggactggagatcgaaatgaggcggttcagaacacaaggaagatattgtcttttagctactatcacttaccctcatacctaaagacttgtatgttgtacctaagcatatatccagaagatcatttgattaaaaaggatactttgatatggaagtgggtagctgaaggctttgtccaagaggaacaagataagccattatttgaggtcggcgagaggtactttattgagcttataaatagaagcatgatccagccaatggagaatgatggtaagatttctggctgccacatacatgacatggtgttagatcttatccgaaacataatagccgaagaaaactttgtaaaagtattcgacaaactacatgaggtgcacaggttgtcttcacagaggagtactgtccgtaggatagcactgcatgagagttggaaccaaggcaaaaacaatgaccttgctgttggcatgacacaattgaggtcattcaatgccatcaagtgtactattagcatgatgccctcgcttctgagcttccaggttctacgcgtgctagagctacaaggctgtaatgtcacaggaggtttatacctcaagcatatcggaaagctacgtcagttgaggtacctaggaatgagaggcacacgtgttgctgagcttccagtggaaatagggaatctgatgcacctgcagacactagatgtccgatacacaggtctgaaggaactgccgtcgaccatttgtaagctaagcaagctgatgcggctgtgcgtcgctggaggaacgggcgtgctgatgggtggttggaatctgagttcactgcaatacctaaagatgggctatggttgcatcaaaagtaacaaagacttcgccatagaagtgggcaagctgatggagctgagaatccttaagatttatgtagagaacaagtttgacaagggcacgaagaacgctttgctacagtctctgtgctgcttgcgtagactccagaacctgatgatagatttccccttgccatttcagaatacgatgagcatctgggatggctgggacctctgggagccctcacctcagctccgtgtgttccgtatatgcggcattgagctgcctcggcttccagagtgggtgaactccatgtgcgtcccgtacctctccgagctgcgacttgacgtggtagccatggaagcacgggacctggacatgcttgcaaggatgccagcactccgcacactctgcctgagaacccaggcgagattttcatggacagttggtggtgccggactgtttccgaacctgagattctgtaggatggacatagcactcacatttcttcaaggagccatgccgatgctcatgaagcttcaattatggctgtgggcgtctgaatattgtgccgccactgacgttggattggggcacctccctctgctcaatcgcgtcgaagttatcctccactgctgcgatgcgactaccaggcaggtggaggaagcagaggcggcgtggaggcacatggtgaattctcacccgaaccgtcccgccattcgtgtgtcccgacttgaagagtaccggatgaaaggagatgaagataatgatgatgaggagatttcagctaaggatcacgttgacggaaattgtgacgatgggaattcagcatatacggaccaagaggtgctgcgcttgcgcctgccatgcataactattcgatcctggttgcatgattaattacatgctcttggttactgaccggaggttaattagtcgcctgttctagccggacaatgatttagccaaagaggaggaagaggaggaggctacgaaccaatcttgaaccggatctcttcactcattcggtcatgctttcagcggcagctgcagggcaaggagaagaataaaagggagaagagtagagcggaattgaagagaaactcatctccttcgctgggcctttttttttatttttttgttgctgttggttttctttccctgttttttctcaagaatttatatagtgtggtttgtaataatggttgtctcggttacaataaggcccaagtaggctcagacagaaattccgagcatattggccgct

SEQ ID NO: 15799 - DNA, 1616 bp, Oryza sativa
  ref <308>: DATABASE ACCESSION NUMBER: AK066313
  ref <309>: DATABASE ENTRY DATE: 2001-12-06
gaaaaggaaaaaaaagagagaaaaagatggcacacgagagcggcgacactttgcttcgcttgggtttcatcgtcgtcccctcctcctccttcctttgacctcggctcgatcgaccatcccgcggaggagacgacgccgcggcggcggcggaggactcgccggcggcggggatggacgtgccgtggctgctggtggcgcacgggtcggtgacggcgctggtggtggtgtccttcctctgcgggcagtggcccatcttcgagggcaccttcgtgcagcgcgtcaaccacttcctcaccttcggcgcctaccaccacctcctgcggctcgtccacgcggcgtgcggcaatggggccagggatctcgtcctcggcgtcgagagctactgctgcgaccggcccaacccgatcctgcagattttttacgttgccataataggggtaacatattttataatcgtccagacatctttccagtacattcctgggtactatgtgagtggactgcacagatacctgagtatcgtggctgttgctattggtgctttactcttcgtgctgactagcttttctgatcctggaactgtcactgctgagaatgtttctcaatatctatctgcctatccatatgatggcatcatttttgaggagaaagagtgttctacctgcaagattgccaggccagccagggcaaagcactgtagaatatgtgataaatgtgttgcacggtttgatcaccactgtggatggatgaataactgcattggggagaaaaatactcgctattttgtggcctttttagtttggcatttccttatatgtctgtacggagcggttattcttggtttcattcttgctggtgaattaaaagaaaggaaagttgtctacatattgacagtttattatggcatcgacaattcattctctgggctatttccacatgttgcacagtggctgcttgctgtgcataacacacagatactcttagcggtctttttggctataattgcattgctccttggtgggttttgtgcttaccacacacatctttgcttaacaaatacaacaacgaatgagacattcaaatggcaagactatattatgtggaggaaaaaggtgaacgaggaaaaggctgctgcaaatggtgaagtgcgcaaatcgccaccaagcaaatggaaggcgtttttctctagatcacatactgaggccgatgaaacaattgtgaaaaataacatatatgacagaggcatgattagaaacatgtgcgaggtgtttgtccctttgtcagaacggcagtcattttcccgcaagaaatctgattgatctgaatgctgttgcagctttgcacctgttgtatcacttctatgctgtaaatccttgtagaatattagaatcattttttccatactagagaagaaacagtctgaggatggtgatcaggagtgagcatcacacaaggagaccccccaccaaaaaaaattcagatctgcccaagttgcttttggttttgctatcctggaatagtaggtttgaacaacagtatactaccaagagttgataacttacttgatagaatctgttgacagcatatgggaatgagaattgtacattgtcttggtt

SEQ ID NO: 15800 - DNA, 1500 bp, Oryza sativa
  ref <308>: DATABASE ACCESSION NUMBER: AK066314
  ref <309>: DATABASE ENTRY DATE: 2001-12-06
gggagacggcgacggattgcgcgggcgcaagcagcactcaagttcgctagtcctcctcctccttcctgtgtagtggagcgaggcgaggcgagccgacgccatggccgcggcgcagcgctggctccctgggatcctccgccgaggggacgggctcgcgcggcgcctctactcctccgcctcctccctcctcttcgacgacacccaggagcagttcaaggagagcgtgcacaagttcgcgcaggagaccatcgccccgcacgccgccgccatcgacgcctccaaccatttccccaaggacgtcaacctctggaagctcatgggcgatttcaatctccacggcctcaccgccccagaggagtatggtgggatggggctcggctacatgtaccactgcattgccatggaggagatcagcagggcgtccggctcggtcggcctgtcttacggcgctcactccaacctctgcattaaccagctggtccggcatggcagccctgcccaaaagctcaagtacttaccaaagctaatcagtggggagcatgtgggggcattggcgatgagcgaacccaactctggttctgatgttgtcagtatgaagtgcaaagctgagaaagtagatggtggttatgtcattaacgggaataagatgtggtgcaccaacgggccatctgctcagacactggttgtgtatgcaaaaacagatatagctgctggatcaaaaggaataaccgcgttcataattgagaaggggatgcccgggttcagtactgcacagaagttggacaagcttggcatgagaggaagtgacacatgtgagcttgtgttcgagaattgttttgtgccccatgaaaacgttctcggggaagaagggaaaggtgtttatgtcatgatgtcagggcttgatctagaaagacttgtgttagctgcaggtcctatcggcctcatgcaagcatgccttgatgtagctgttccttatgttcgccaaagagagcaatttggccgtccaattggtgaatttcagttcatacaggggaaattggcagatatgtacacctccttgcagtcatcaaggtcatttgtttactcggttgctagggactgtgacaatggtaaagttgaccgcaaggattgtgctggtgtgattctctttgctgctgaaagggcaacccaggttgcacttcaggcaatacagtgtcttggtggcaacggatacataaatgagtacccaactggccgattgctgagagatgcaaaactgtttgagattggagccggtactagtgagataagaagaatgataattggccgcgagctcttcaaagaggagtgaaactattattttggaagccaggtatctgatatgtataacttggggaggtgagcatgatttggacaatttgtacacatcgtccctgatgtcctatatctgataatttgtccaagatttgtcatgactttgtatatttccaatttaataagaaataaaatgcacctttcttt

SEQ ID NO: 15801 - DNA, 2514 bp, Oryza sativa
  ref <308>: DATABASE ACCESSION NUMBER: AK066315
  ref <309>: DATABASE ENTRY DATE: 2001-12-06
gtattgctgcaattttgtccagtgttacccatgaatctagcatcgaggagtgcaattctgttctcatctgtctcgagaagcatagtgataagacagctcttggtttctttgagtggatgaaggctaatggaaagctgaagggaaatgctgaggcgtatcacctagcgcttcaagcgatcgcctggaaggaggattgggaagcagctggacagttgcttcatgaaatggttgctgattcgggttgcgctctggatgctcaagcatttaatgggcttatatatgtttgtgccaaacggaggcttgttgactggggaacaaagtggcttcatatgatgcttgaaagagatgtgcagccgaatgtgtctacagttggtatgcttatgggactttaccagaggattgggaaccttccagaagctgaattcacttttgctaaaatgaggaaatgtggcattaagtgtgttaatgcctactcagctatggttactttgtatacacggttaggccattttgccaaatctgaggaggttattactctaatgaataatgatgaagtagttccgaacatggaaaattggttagtgcggctaaatgcttattgtcaacaaggcaaaatggaagaagctgaattggtattgaagtccttggtagatgaaggaattgctctgaatgttgtggcatacaatacggtaattacaggttatggaaaagtttctgacatgcagaaggcaatggaagtgtttgataggcttaagagtgcaggtttagctcctgatgaaacaacctatagatcaatgattgaaggttttggtagagcagacaaatacaaacaggcaattttgtactacaggaaactccgaaactctggatttaaaccaaatgcatccaacttttacacaatgattaacttgctagcaagacatgatgacagtgaaggtgcaacagagattctcgaggacatgcgggcagcaggctgccagtgttcatcgattgtcactgttcttgtccgagcatatgggtcagtaggaaggatgcataaagttcttcagattccaaaaagcatgcttctataagaagattttgtttgatgccacctcatgctctattttagtaacaggattcgttcaaaattctctagtagaagaagctatgcgtgttttgcgcgaaaagaagtggaaagattctgattttgaagacaatttatatcatatcttgatctgttcttgcaaagaggctggctgttgtgatgatgctgtcaggatatataatcagatgcctaagtcggcaacacatccaaatctgcgtatttattgcagtatgattgatgttttcagcatcatggagagattcactgatgctgaagctttatatcttgaactgaaagcatcatcctgtgttcttgacatgattgcctacagcgtaattgtgaggatgtatactaaagctgggcgaccagaagatgcctgtttggttttggaagacatggagaaacaaaaggaaatagttcctgataagtaccttttccttgacatgcttcggacttaccaaaaatgtggcctactcgagaaattatctgatacatattactggatactaaagagtcaagttgaattggatgaagccatgtacaactgcattataaactgttgtgggcgggcaataccggttgatgagctctcaagaatttttgatgaaatgattcaacaagggcatttggccaacactgttaccctcaatgtattgctagacatatatggaaaagccgggctttttaataaggcagaaaaggtatttctcatggctcgcaagcagggtatggcagatatcatatcatacaataccattattgccgcgcatgcaaaaaatggggattttcgtagcatgatttatttcgtccagaggatgcaagaggcagggttccctgtttctctggaggcgtacaactgtatgctggatgcttacggtaaggcaggacagttggaggagtttgctgctgttctgcaaaaaatggagagagcaggatgcgagtttgatcactatacttacaacattatgatcaatatatacgggagaaagggttggatcgaaggagttgcaaacgttcttgcggagctaaagagccgtggtggcgagccagatctgtacagttacaacaccttgataaaagcatacgggatagcaggaatgcctgaagatgctgttaaactgatgcaggagatgaggattaaaggcattgccgctgaccgagtaacctatactaaccttatagctgctctacagaggaatgagaatttcctggaagcagttaagtggtctctctggatgaagcaaactggagttgctgcaactcgaacatgatgtgcctaagaattcagagttttggttgcatgcaaattctggcatccgcacacgtttatatttcatctttcagtagagtacatacatacatgtgagtgacattgtacagagaactatttctgattgttctacacatcctatgggtaccggagattc

SEQ ID NO: 15802 - DNA, 1102 bp, Oryza sativa
  ref <308>: DATABASE ACCESSION NUMBER: AK066316
  ref <309>: DATABASE ENTRY DATE: 2001-12-06
ggcgcgctcactccctcccttgcccccaccgacgaacggaacaaatcttagcgaggaaaaagcgagcgcttttttcttatcctgttccgcgggcgcgctgccacgaccgaaccgggaggatacttgcgaattacacgatcggttgtggcactatgatgggcggcgagtgcaaggtccaccagctccaggccgccggcgacgggggcccaggcgccgtcgcgccgttcgtggcgaagacgttccacatggtgagcgacccgtcgacgaacgccgtcgtgcgctggggaggcgccggcaacacgttcctcgtgctcgaccccgccgccttctccgacttcctcctcccctcctacttcaagcaccgcaacttcgccagcttcgtccggcagctcaacacctacggattccgcaaggtggatccggacaggtgggagttcgcgcacgagtcgttcctgcgggggcaggcgcagctgctgccgcggatcgtgcgcaagaagaagaagggcggggcggcgccggggtgcagggagctgtgcgaggaaggggaggaggtgcggggcaccatcgaggcggtgcagcggctgcgggaggagcagaggggcatggaggaggagctccaggccatggaccagaggctgcgcgccgccgagagccgcccgggccagatgatggcgttcctcgccaagctcgccgacgaaccgggcgtcgtgctgcgcgccatgctcgccaagaaggaggagctggccgcggccggcaacaacgggtccgatccctgcaagaggcggcggatcggggccgacacggggcgcggcggcgtggcgaccggcggcgacgcggccgagatggcgcagagcagaggcaccgtgccgttcccgttctctgttcttggccaagtgttctactagccgcaacagggccagataggtgtacacgtacgcagtcccccgttgtatatataacaacagtgtaacttcgcctcggtttagttgcctactgttaagttagtgtacttaagcataataggagagtttggctaagtagctatcgttggatttgtgtgtatatatcgactatcgaggggctaataacgcctattttgttc

SEQ ID NO: 15803 - DNA, 3200 bp, Oryza sativa
  ref <308>: DATABASE ACCESSION NUMBER: AK066317
  ref <309>: DATABASE ENTRY DATE: 2001-12-06
ccctcgcggagacccaaaccctagctcccaaatcccgaccagccgaagcatttccaacggaattcctctgttcggctcctcctcggggttcaaatcgagcttgaatttgtggttttttttggggagggtttttttttttctttttggtgttgtttttggatgcgagtgtggcttggcagggttggtggtggtgatgccatgatgcacatgctggtggcccccgatggaggcggcggaggggagatgccgccgccgtacgggggagccgcggcggcgccgccgccgccgatggagcaggagctggagctccaccgcgacaacgccgacgacggcctcgacggccacgtgcggtgcttgaggtgtggtatatccggcaacgcgacgccccatatgcgccgcggccctgatggcccaagaactctctgtaatgcgtgcggcattgcgtacagaaaggggaaaatgagacgaatgatagaagctgaaccacctatagatgaagctgcacttgctaagctggttcctgaggtaggcatggaatttgagagtgaggacaaggcctatgaattctacaacaaatatgctggacatgttggttttagtgttcggaaaagtacatcacacaaatcttccggaaatattaccaaagtaaggacttttgtttgctcaagggaaggttacaacagggacaaaaaatcattggaagcaaagaagccaaggctggatacaagaattggttgtccagcgcggttgattattaaagtcacaccagagagtaaatacagagtcactgacttcaaagcggaccacaatcatcagctggcccctccttcgacaatgcatatgttaaggtcacagaggatattgacagaacttcagtctggggaagcagaattgtcagatgattctgtcatgacacctacaacaaaagcaaccggtgatcttgttgtgagacaaattggtttccttcgaagtatctctctcctcccagcagattataagaattatctccgttcaaagcgtatgaaggctatgcaactcggtgatggtggcgcaatattgaaatatttgcagacaatgcaaatggaaaatcctgctttcttttacaccatgcagattgatgaagacgacaagctaaccaacttcttttgggctgacccaaaatctagagaagacttcaactactttggtgatgtcctctgtctagacacaacttacaaaataaatggatatggcagaccattgtcattattcctcggagtgaatcatcacaaacaaacaattgtttttggtgcagctatgctttatgatgaatcatttgagtcatataggtggctgtttgagagttttaagattgctatgcatggaaaacaaccagcggtagctttagtagatcaatctattccacttgctagtgcaatggcagcagcatggccaaatactactcaaagaacttgtgcttggcatgtatatcagaactctcttaagcaccttaatcatgttttccaaggttcaaaaacatttgcaaaggattttagcagatgtgtatttggctatgaggaagaggaagaattcttgtttgcctggagaagcatgctagaaaagtatgatcttaggcataatgagtggctgtctaaattgtttgatgaaagggaaagatgggctttggcatatgagagacatatattttgtgctgacataataagtgcacttcaagctgaaagcttcagtagtgttctgaaaaagttcttgggccctcaactggatttactgtccttcttcaagcattatgaaagagccgtagatgagcaccgctatgctgagctccaagctgacttccaagctagtcaaagttatccaagaatacccccagccaagatgttaaagcaagctgcccatacatataccccagtggtgtttgagatctttcgtaaagagtttgagctgttcatggactctgttctgttcagttgtggggaagctggggcaacctctgagtacaaagtcgctccctctgaaaaacccaaggaacattttgttagatttgactcgagtgactgctcctgtatctgcacttgtaggaagtttgagtttatgggtattccatgttgccatatgttgaaggtgctcgattacagaaatatcaaagaattacctcagagatatctgttgaagcgatggagaaggactgccaagtctgcaaatgaagaaaaccaagggtatgtggcaaatggaaatggttcatcattaaattccattgtacctcctgcaaaccatcatggtctccaaggcttcagtgcaatgattcaagacactcctgtttctaatatgcatgagaattcatttcgcagaagctcatgatgcaggtgacttgaatctaaacattattccttctgcacggtgcctgctccacgatactggcgttgaagcagtgagaacaggccatgcggagctcccccgaataaaagtttccaacttgtaaattatgcagctgtaggaaatcccagctattgaggcgcccatcctacttaggctcttagactagattctggtatgaaatcatatgattgtgctgcccacctgcacccagggaaattttgtgcattctgtaaacagtctatttatcctagcccattcataaaagaaaaaaaaaggtgatcagatgccaatgcagagagattgctcctttgaaactttgcagggcaagcagacccatcatgatcatcaatcctaggagggtttcagttagattcagatcttggggtggtttcatttcgtttcatttcacctgcaggtgaggtgagctggacagctcatgcaataaaacgttggaagcaagacaagcccagcttggcagtgtggatctcaagcccggagagctaccggccgagctaggagctgcctttgacgctacagtggacagctgtgctttcaagcctggctttgggcgcatttgtcccatatgcacagttgcataatgcgtgcaaatgttgttcattgtcctcaatgcatcgtatatcttgggagcttcgataatgctgctaccaatgtgtccttgaaaaacacattcgaggtgctttcgtgctcgctctcttttttccaactctgtcaggtttcttttcaaacaaagttatttcagacatttttctataaaatgtctttgaaatatatacttccattcaaaggaagcctcaatgcgatcg

SEQ ID NO: 15804 - DNA, 2732 bp, Oryza sativa
  ref <308>: DATABASE ACCESSION NUMBER: AK066318
  ref <309>: DATABASE ENTRY DATE: 2001-12-06
gtctctgccactagactccatttgcacttcactgcaaaagcagaaaaatatatatttagcttaacccagtagattgtgtctttccaaccgaccttacaagtgatttgaatcttctttgagaaagacaatccattgggaatggatgcactggcatctgaagaatacgcttcacagtcgaaactacttcaagagttcaccaatgctcccagcattgacggtgcttgggttttccagaccaacaatgaagacagatccacagcaatgtattcgattagccaaacaaacctactggcaaacaacaagagaaaatatattttgttttctcatattatgagaaatggtactaaccttctggactttcaatggtctcctttccctattcaaatggatggagtgtcggctgtcgtaccatctccatcgggatcaaagcttcttgtggtgcggaatggagagaaaggttcccctacaaagcttgaaattgttgatcaatcacatgtggagaaagagatacatgtagctcagtctgtccatggtccactttatactgatgagtggtttcatgggatttcctggaaccaagaagagaccttaatagcatatattgctgaagattcacctgaaccaaaaccagtttttgatgatactggatatagaaaagaaggttcttctgagaaagactgcaataactggaaagggcaaggggattgggaagaggattggggtgaaacttactccaaaaaaagggagaccttcattgtttgtccttgacattaatagtggagaagtacgagctgcaaaaggcatttcaagatcattgagcgttggccaagttgtgtgggctccaccatcttcatgtggaaggcagaagtatctgatttttgttggatggttagagcacaatgggtttcagaatactcctagaaaactaggcatcaagtactgttctaataggccatgttctctatactcaactctttgccctttcgaagaatcagatgttgataatgcaccagctagtgattctaaattagagcctgcttcagtagcaatcaacttaactccaagcataagcagtgctttctttccgcggttcagcaaggatggaaaacttctggtgtttctatctgcaaatcgtgctgtagacagtggagcgcacaatgcaacagattcactgcataagatcaactggccttctgactggaaaatggatcaatacctcgaaatcactgatgtgattccaattgtaatgtgtcctcaagatggttgttttcctggtttgtattgttcttccatgctatcgaatccttggctttctgatcgatgtacaatgattctgacatctgcttggagaagcactgaagtgatattatcaatcgatgtgttgagtggaaaagcaacaagaataagcccagaaaattcagagtactcatggagtgctcttgcagtagatggccacaatgttcttgctgtgtcaagcagtcccatcgacccacctcaaattaagtatggccatcaagtgtcattgaaggatcagacatgtacatgggtctgggacgaagttaataataatccattgatggcagctaacaataaggtaaaggctttgttgtcacatcaccaattcagcatactaaaaattccagtcactaacccctctgatgacctctctgatggcagtaagcttccatttgaagctatctttgtgtcctgcaaggacagttcgcacaaaccaactattctagtccttcatggtggcccacactcagtatctgtatcaagctattcgaaaacatcggcgttcctcgcatcacttggatttaacctacttattgtaaattatcgagggacaccgggttttggagaggaggctttgcagtcacttcctggaaaggttggatctcaggatgtccaagactgccttacagctctagactatgtcattgagggaggacttatagacgcatctaaagtagctgtcatcggaatttcgcacggtggattcttgactacacatctgattggtcaggctccagatagatttatggtggcagctgctcgtaatccagtctgcaacctatcactgatgattggcaccactgacattccagattggtgttatgcagtggcctgtgggagtgaagggaggcaacatgccactgaatctccttcacctgatcatcttcgcctcttctatcagaaatcaccaattgcccatatttcgaaggtgaaagcgcccctgcttatgcttcttggaggagcagatcttcgagtccccatttctaatggcctacagtacgcaagagctctgagagaaagaggcggcgagatcaggatcatgatgttcccagacgacatacatgaaatcaacataccacaatcggattttgagagcttcctcaacattggtgtctggttcaagaagcatcttagcatatcagcatcagatgcatctgcatgaagtcaacttgaagaaggggaggaagaaattacgtggtttaatctagtccaacaggtagatgcctttgtaagccttgttcatggagctcgtccgtagacgagtgctccaaaatattagagacttccctattgaaaaaagtaaatggagactttaattggtttgagttctttccttttcccttcaattcacatgcttgatgattggatgcaaattcagtcggatttactaattactactagctactgctctgaccgtgattgatgatcagtacaac

SEQ ID NO: 15805 - DNA, 2156 bp, Oryza sativa
  ref <308>: DATABASE ACCESSION NUMBER: AK066319
  ref <309>: DATABASE ENTRY DATE: 2001-12-06
gaacctcgccatggcggcgccgctcaccgccgccgccgcgctccgcctcggccggggcctcagccaccgccgcgccttcctcctccgccgccgctactcccccgcgccccttgctccttccccgtgcgcggctcctcgatgcctctccagcgccgcccatccgcccccgcctcctccccgccgcctcgcccgctctggcccctcccgtccgctcgccgcatccgccgccacggccgtgtccgaggcgcagacagatttagagtctggtccggtgacagcaagcaagggtcgcatttaccatgagacatatgggtgccaaatgaatgtaaacgacatggagatcgtgctttctatcatgaaaaatgaagggtatgatgaaattgtccctgaccctgagagtgcagagataatatttatcaacacatgtgcaatccgtgacaacgcagagcagaaagtctggcagcgactgaactacttttggttcctgaaaaggcaatggaaagctaatgttgctgcagggcggtcaagatctctgcggcctccaaagattgccgttcttgggtgcatggcagagcgattgaaggagaaaattctcgattctgataagatggttgatgttgtctgtggacctgatgcgtatagggacttgcctaggttgctgcaggaagttgattatgggcagaagggtatcaacacgcttctctcactcgaggagacgtatgctgacatcaccccagttaggatctctgacaattcagtgaccgcatttgtatcaattatgaggggttgcaacaatatgtgctccttttgtatcgttcctttcactagaggtagggaaaggtcccgtccagtgtcctcaattgtccgagaagttggggagctctggaaagcaggcgtgaaggaagtaatgcttcttggtcagaacgtaaacagttataacgacacttctgaagttgaggaattagaacctggtaaaaactgggagctcagtgaagggttttctagcatgtgcaaggtgaagaatatggggttgcgttttgctgatctcctggatcagttatctttggaataccctgagatgcggttcaggtttacctctccgcatccaaaggattacccagacgagcttctatatttaatgcgggataggcacaatgtttgcaaacttattcatatgccagctcaatcaggcagctcagcagtgctggaacgtatgcgtcggggttatactagagaggcatacttggagcttgtgcagaaaatccgtagtatcattccagatgttgggttaagcagtgatttcataagtggtttttgtggagagacagaagaggaacatgctgagactcttacccttgtaagggctgttggatatgatatggcctacatgtttgcatatagcatgagagaaaagactcatgctcatcggaattatgtggatgatgtccccgatgatgtcaagcagaggagacttgcagagctaatcagcaccttccgtgaaactacagcgaagatctacgattctcaggttgggacagtacagctagttctagtcgagggaccgaacaagcgggctcctgaaacagagatgattggaaaaaccgacagggggcatagggtttcgtttgcgagcgtccctgtaccgcatacatttgaaggtgatgaactgcgcaagccagtggttggtgacttcattgaggtgaaaatcaccaagtcatcgacagcatcattatccggggatgtaatcgcgcgcacaagcttgagcaaattctacaagaatcattcatctgaagcacatgctgttgcggcttaaggattactagttgagtttgtagcaggccacatctcaactgaatcagatccccttgccatgatctctatcttgaaatgactgataagttagaccatacaatgcaatttaactggtgactcagttttgtgaagacaactaatgtgatgtgcttttggcatttgaagccaaaacaatcaccagcatttagtctgctagtcatgtgaagcaatgcctcttctcttatgaagtctgtattatcatgtaaagagtttaagcactactggccagcaacattttttttttcttttgcaagttactgcaactcggcagcgtgaggtttatttatttatttttcttctttggg

SEQ ID NO: 15806 - DNA, 977 bp, Oryza sativa
  ref <308>: DATABASE ACCESSION NUMBER: AK066320
  ref <309>: DATABASE ENTRY DATE: 2001-12-06
gtttcgccgccacgccacgccgctccgcctcgcctcctcctatctctcgccaagctcttcctcttcctcttcctcttcctcctcctcgccgcgtgccgagaagatggggaagcggtggatccctctcgaggccaaccccgacgtcatgaaccagttcatgtgggggctgggagtcgccgagggggaggcgcagttctgcgacgtctacggcctcgacgacgagctgctcgccatggtgccccagcccgtgctcgccgtcctcttcctctacccgctcacttccctggacgacgacgaggaggaatcaggcgctgctgccacttccacggctggggacaaggatttgagcaagagggtatactttacaaagcagactgttggcaacgcatgcggaacagttggtgttatccatgcaatagggaatgctgcatccaaactcaagctggttgagggatactattttgatagattttataaacaaactgttgatatggatccagtccagcgtgctgcctttcttgaggaggatgatgagatggaggatgctcattccgttgctgcttcggctggcgacactgatgctaatgttgaggtgaacgagcactttgtatgtttctcttgtgttgatggtgaactttatgagcttgatggacgaaaatcgcaaccaatatgtcatggcccttcatcaccagatactttgttacaggatgctgcaaaagtcatcaaagccagaattgcgtccaaccctgactcaatgaacttcaacgtcatggctctttcgaaagttgtgtaagataaatgagcgttagacctttttcatttccataggcatactaccgaagggggaaaaatgaggaactacagttgaataaaagtagtttgcttgctctttgcaggggttttagatcatagaccaatgtgtttggatgatgtattcacgttttgtcaatcgagaggttatcacagatttaaaatcg

SEQ ID NO: 15807 - DNA, 3163 bp, Oryza sativa
  ref <308>: DATABASE ACCESSION NUMBER: AK066321
  ref <309>: DATABASE ENTRY DATE: 2001-12-06
gtgataacgtattcttccatcgcaggaggtgcgcttcctatccccatcgccacccatggcgactcccgccgcttcccctctcctgctgccgctccccctccccctcccggcctccaccttcccgcctcgccgcgccgttccctgcgcccgccgcctcgtcttgcggcctccccgcgccggacgccctcgcctccgggacccgcctcccgcggcacccccaccggcggcggaggaggtcggcgaggaggaagaggacgacgatgcccccccgctcaggctcctcgaaccgccccaggaggacgaccccttcccgcccgagatggagccggccgaccccgacttctaccggatagggtacgcgcggatgatgcgggcgtacggggttgagttcttggaaggccccgatgggatggccgtctatgcctcccgggacgtcgacccactccgcagagctagagtgattatggagattccattggagctaatgctgactataactcaaaaacgcccttggatgtttttccccgacattattccactaggccatcccatatttgacatcattgaatcaacagatcctgaggtaaatggagccctctaaccctctaattatggtatgttccagtgaagactgtatgtgcattccagagtttgtgttttttagtttctacagaatcacttatgaggaacattgtgtaattaagattcaatagcgctttgactgcccattccatctactatgaaaataagctgttatattggataaaagggatggtattactcaacacttgcaacctgttttcttccttcatgcggtgtcaaagcttcataagtgatgtagactgcatcctaacgcaatctgtaccctcttgcagacagattgggatctaaggttagcttgccttcttctctatgcatttgatgtagaagacaacttttggcagctatatggtgattttttgcctagtgttgatgaatgcactagcttgcttttggcaccaaaggtattgtaaatctaaacaaaatgaattgtagtcttcttaaacctgacaatacagtttgaatgaatttacatgcctggcttgccaggacgatctaatggaactagaagaccaagatcttgccacgaaaatgttaaagaaccagaagagagcaattgatttttggcaaaaacattgggtacacttctgtactatttgatcaacttcgctggcttgggtacatctaacactagcttgatgggtaatgtccagcataaaacaatccctctaaagctaaagcgtcttgcccctgaccatgaaagatttctatgggcactgagtattgttcagtctcgctctgtcaatttgaaactgagaatgggagccttcctccaagatgcaaatgtcctagtgccgtatgctggtacatgttttcttatctgttcccctttatgctctttatttttattttcagtgtgtattaagcaccgattactaaaattaagaataaaatcacttagtttcttcagcttgcgatgataatcagatgtctaacagtctaagtcaaggctgcggtctgagggatcttttgctccatttattttgagctggcgaatgctataaaggtttttataatgttatagcgctaatgttacttgcacagtaaatcatagttaccaactgatccaagatattatattttctaatatcagcactacttctgtatggttaaactctgttggaataaggatctaactaatatctattgtcatttttcacaccaatactacgctttattccttctagacgttctagtcaggcagtatagttacattgaattacttaataattatcacaaaggcatgaaattcaaaactatactgttctgataatcagcatattctagcttctgattactgatactgagtctcatcataacttatagcttgcctatttgtctccagatatgctgaatcattcacctgatgctaattgtttcctgcattggcgtttcaaagatcgtatggttgaagtcatgattaaggctgggcatgctgtcaaaaaaggagatgagatgacaattgattatatgagtggagtgaacagctcatttatggaaagatatggtttctcatcaccaacggtatgatcatgtgtttgattttaattcttgcttgttcttgcaagccacatctgtcctttcccacttggcaggacttagcattgaggaatattgtgttgggtataagtataactatatctgcgagattatggttctgcttaaaggaaacaactctagcatcaaatatgttgtgctgctatgctagattgctaggcatgttaatacgataccatgcattgaaacaactacagtgtcatttttttttttaaaaaaaatgtgacttcttatatggttgtgtgcacacaacaaacactacagaatccttgggagcttataaacttctcgagtgatgccaagattcatcttgactccttcctgtcggtcttcaacattgctggcttgcatgatgagctctaccacaatgctgcattgacctcaggagaaaacaactttgttgatggaggagtcgtggcagcagcaagaactctgccgacatggtcagaaggtgatgttcctgccataccaagcttggaaagaaaatctgctcaggcattacaagaggaatgccatacgatgctggagtccttttcaaccactattcaacaagaccaggagattctagattctgatggacatatcagaagaacacgtgaaatcgcaatcaaatatcggctacaccggaagctgctcctgcagaaaatcatcgatgcattggatatctaccaggataaaattttgttttagatagctgtataggcaacaactagttgagctccagtgctagtttgctaagcgctggagtgtctttagatgattttgtgaagggggtttcactcacatctgtaacagtagggatttcacctcattcttttagatatttccactttggtagatagcagtatagtgaaataaagacagtgcccatgaggtagtgtagtttccagccagtgacctgcagaaaatcaagtaatccctctgtttcgaactacttgtgttctagttttgtcctaaggtaaacattttaatatttgactatcaatttctataaactcatatagtc

SEQ ID NO: 15808 - DNA, 744 bp, Oryza sativa
  ref <308>: DATABASE ACCESSION NUMBER: AK066322
  ref <309>: DATABASE ENTRY DATE: 2001-12-06
gctctccgccactcgcggctttcccacaaccagcgacggcggcgcgccatccgaccggatgaggggagggcggcagcggttgccacggcaggcggcggcgtgaaggcggctctcccctccccttcctttctccccgctcctggatcaggccacaggaggggagcgatggtggaggcggccaccgtaggcggcggaggtggcgttcctcctccctagctcccagacccggctggaggagggagtgatggtggcggaggcggcgctccctcctctccctccctccctccctcacagatctggccggagggagggagggccgcggccccagcggcggcggcgtcggccccagcgatggcggcgtgtcttctccactctccgactcgccactcccagggcagcggtggctccctccgccatctctcttctccctccggcggcggtggtggcgtcggcggtggcggcggcggtggcgttggcggcggccgcggatggatggtgtcggcggcggccacagatggatgacgtggtggcgaccgcggatggatggcgtggcgacgaccgagggcggcggtggcaacggccgagggccgcggtggcgatggccaatggcggatccggcggaaggcgagaaaagttttgtgatgtaggtttgttgttttttgatgattactttgtgattttgtgatgattgtggttgatgttttttggtgggggggggagtgatttggttgtgccgattttggg

SEQ ID NO: 15809 - DNA, 580 bp, Oryza sativa
  ref <308>: DATABASE ACCESSION NUMBER: AK066323
  ref <309>: DATABASE ENTRY DATE: 2001-12-06
attcccaaaccccattccacgctctctctctctcccgctccaagaacccgattccatgtcgccggtgaccgcgttgctcgcaggcgccgccgcgccgcttccggcgatggcacggaggccgtcccgcgtggcgcccccgggatactcccccgtcggaggagggtgcgcgctggcggtggagtgctcgtcgcggccgcagaagaaggcgacgaagcaccacatgaagacgcggcccaagaagtcgcagccgtgggacaggaagcgccgccccacgcagtaccggccgctgccggctctcccgccggactggacgctcgtcgccgccggcgccacggtcgacgcgtcggcgcaggccgaggatgcggatgaggaggaaccggagccggtggccgctccggtcgtcgaggtggtggcggccccggccgccgccgacgactgattccggccatgtctctttctacgaaattgctcgttcattgctaggtttggtgttattgcttctcttgtttgtctgtgaccaaaatcttggatggtactgtttaaaatggttgctgctttatatatattgatttacttgatg

SEQ ID NO: 15810 - DNA, 770 bp, Oryza sativa
  ref <308>: DATABASE ACCESSION NUMBER: AK066324
  ref <309>: DATABASE ENTRY DATE: 2001-12-06
ggttccaccaccgcgtccgaccgccgacgcgaccggcggcgaccctccctcttcagccgttcgccggacttgcggccagacagatccccttcgccgccgggagcaagatcaggcggtgtccgcggcggggctcgtcgggatctgcccccatccatggtcgcgcggcgccgcttctgactgctccgcccccgcgttgatgcgctgcccgcggcatcgagccgcaaggtttttgtcatattaatcatggtgcttagcaaggttgaagtgaacttgataaggctgcttgaggcagctcctcgacagcagaaccagactaagcttgtccattatgtaaccacagccagggaactgttggagcagctaggatcagaaactactctagaagggatatcaagtgtatcaaaagctaagacaagtgagtattcagaaaagattgaagcattggctgcccggcttgctgctccagagccagaaaatgaaatgccagttgatgagaatagagaggtagaaagctcttatgaaggagataagccaggaagtccaatatcattatcatcaggattacgtaggagaccaatgtaagttttaaaatttgtatgtttctttttcataattattacaattagcgagctaataatggatgtaaattgtatgttcttttacatatgtttgatgaattgtaactgaacacatttatcttttctatggaccctttgtatattactaaatccggtttgaatgaatttgtatgtactgaacttagatggact

SEQ ID NO: 15811 - DNA, 3501 bp, Oryza sativa
  ref <308>: DATABASE ACCESSION NUMBER: AK066325
  ref <309>: DATABASE ENTRY DATE: 2001-12-06
gacctcgtctccaccgcacgagcagcagcagcagcagcggcggccgcagcgcgagctctctctctctctctcgcggtgggcggcgggatgaaggtgtccgtcgtgtcccggagcggccgggaggtggtcaggggcggcgtcgagctcaaggactcggctaaggtcgcggatctgcaggatgccatctatgccaagagtaagtgcaatgatcccgtcaaaatttcccgttttatggttgtgtttgttgatgtgttaaaggagtagtacttgtagtggctctcctgcacttcgttatcttctcattctttggaagggtttggtcgtatttacatgttgaaaaagataggaatatatgcatatgagtgggtttgcattcaattcaagctaaaggcctttttaaggcaaatatgtttttttatgtagttagactacgactgccttttttaatacatcctacagttctaaattttggaagcgtcgattgagtttggccagtatgtccaaatctgacattttgggagttaattagtatggtcatcaggagtaatcactgttgcacttatttaattcattaaaagagagttaaagaaaggattttctgcacttccattaatccaagagcgtttcaccccggggtactgttgatgctttgactcaaacttgcgagtgttagccatcagagaagtctgatttatggtgtatatcagtacatggaccatgttggtttgggagttgcagataataattgatatttaggctagtatttataagctgaaaaggtaaacaactgactgaatattatgttcgtaccgaacctagtgcttggaacatgaaaacagtacatcgatataataattgtgttcgcccttggttcattttgattggttgactagagcttgccactttgccagtactggcaaggattcttttggttgctgcagcctacaggttgttaggatctgcttaggtaggatggagttggctatcaacctctactcgctcacaagctttgtgtgtgcactttttaatattcgtttacctttgcagagtgaaagaaatcttaaaaaggatagattacatggaatgatggaaacaggaaacgtggttgaactaacttggcaatatactattgactgtatgccaaaatgattttaggaagacctgtatgttgaaaatagcttccaatctttcataaacaaagggcgatagttagttgatatactgtagccagctaatattcgttatgttgaaaactgcctaatttgaaatatgcacacatggtttactgaaataaacaacaaatgtaatactaaaagttcacactttttactaagactgtctctgtcatatgtacggcacaagcattgagtataatatgctattgttgaagaaattggaagtgtttttactgtctgcatttgttttctgtatcatgttcaaatttgcttgtgataaagcctatcttgagtgtttcatgatatttggtgctgtgccttaccctgatgaaggggtcatgctgattcgagcaactagttgtcttatttctgtaaaaccatttctatttcagccctgtctgctgatggttcttcctttttgagccttgaatcaggaagctaattcccctgtcattttgtgtgctcctgtcagtcactcttaagtcaccacctagtgtccgttttaactcacaacctatgctgatgtagcattatcaatgacagacaacgtaatttactgcttgaatttatcaaactttagctaagatggctatcaagaacctctattctatgtcattatggtatttattgtcacaattataagcaccatcttcttgcttgtgccagactggcgcatttgcatgttagtctattaagttgccataatgttatcctgaggtgatgttcacaaggaatttattattcatgttggaccctcaagagtaaagaagaggtcctgcaatgtggtagagatgtagtagagcgagaagatacatcatgatatatggttataagtactgtttaaaatcttcctaagtagttttatttcctatcactgccctcaagtgcatgttagtacaccaaacatgcaccgtaatagatgaaccaaagtgtggaatccaagtacatctagtgattactgaccagtgcaagattgcaaatgcaaactaatcttattctaactgaaagattgcagcattagttgctaatgtagatcataatctttgatcttacatatacagaaaactcagtttgattactttgggtgaatcatgaatgggctagcgggatgtttaaaaaaaaactattttattataccttgcttctcttagaatgcatgctttcaatgtgttctatgagttgctaacctcttggttttacaccatgcagctaagaagtattaccctgctaggcagcggctcaccctccctatccaacctggaaaatcaggaaagccagttgtccttagtgcaaaggccagcctatcagaatactgcgaaaagggttctggatccctgacagtggtctttaaggatttaggcccacaggtcttctacagcacgctgttcttatttgaatacttgggtcctcttcttatctaccccatgttctattacttgcctgtctacaaatatttcggatacgagggagagcgggtcatgcatcctgtccagacttacgccatgtactattggtgtttccactacttcaagaggatcatggagacgttctttgttcaccgcttcagccacgcgacttctcctgtatcaaatgtcttcaggaactgtgcctactactggacctttggagcttacattgcttactactgcaaccacccgctttacacccctgtgagtgaattgcagatgaagattgggtttggatttgggattctctgccaaattgcaaacttttattgccatatcctgctgaggaacctcagaagtccgagtggtaacggtggctatcagattcctcgtggcttcctgttcaacatagtgacatgcgcaaactataccactgagatctaccaatggcttgggttcaacattgccacacagactgtggcaggttacatcttccttgttgtggcagcgagtatcatgaccaactgggcacttggaaagcaccgccgtctaaagaagttgttcgatggcaaggaagggaggccgaagtatcctcggcgatgggtgattcttccaccattcctgtaaggagttggtgtcagcacgatggccacatgggattgaatctttggtctggtctcagtgttcggaagttgaagccttcagtgtaccacttctattctatgatctaaaatatctagtccacaatggaatccctcttagctattgttgaacttctctttgagtttgcattggccctgttgtaatggttaaatacaatacaagtttcatctgatatcagcttattgacttcttgtccatttgtccaagcagtagtaatgcgatcataatttcattttgacgcctggaattgctgtccc

SEQ ID NO: 15812 - DNA, 1202 bp, Oryza sativa
  ref <308>: DATABASE ACCESSION NUMBER: AK066326
  ref <309>: DATABASE ENTRY DATE: 2001-12-06
cgagggcgcgattttttcgttcccctctctatctctcgcgtccatggcgtcctcgtctctcctcgtccggctcgcctccgacgagatgccccaaaccctagatgcgtcgtcgtcgtcttcgtgctacgacgccttcgtgccggtgttccacccggatccgtcgtcggggttctcggcggcgtcggtggtggcggccgccgaccgcctccgcagccagttcctctccgtggagcccgacctcttccacgacgcgctcgtcgcgccaagccccgaccacctcggcttccccgatgaggaggaggaggaggagatccggtgggattgcctccaattggatgacgacgacgaggaggaggagggggtggcggatctgcggcttgaggcctccaacgcggcggaggaattcgattgggaggaggtggcatcgccctccggcggcgccgggatggatcagccggagcccgagtgggaggtcctcgccgacgtgccgccgccgccgccgccgcccgccgacgagggcttcgtgtacacctccgaccgtgacgtgtacgaggtgctcgtcggggagggtttgttcctgaagagcaagccgcccgcggcgaggtcggccgtcgaggcgctaccgtccgccgtcgtcgccgccggcgaggacggcgaaggggaggagtgcgcggtgtgcagggacggcgtcgccgccggggagcgcgtgaagaggctgccctgctcgcacggttaccacgaggagtgcatcatgccgtggctcgacgtgcgcaactcgtgcccgctctgccgcttcgagctgcccaccgacgacccccagtacgagagctggaaggcctcgcgagctgcggctgcctgaattgctgcgcggtaaaaaaaaaaggcaagcctttcttttcttgcacagattttatagagttgtatgtcttgggtttcaaactggtactatgatgaaagaaccaaactggtatgatgaaagaaagcgtagaggtagtcgcagagatggttttgcacctttcgatttgtttactttttttcttaaaagagggatttgtgttgtgacttaaggttgcgaggatattacataagtttatcctatatatatactgttgtatttattctgaatttgtagagtagcttctgtattacattttgccctgcagcacaattttgtaaatggatatggtggtgaaaatttcagc

SEQ ID NO: 15813 - DNA, 2578 bp, Oryza sativa
  ref <308>: DATABASE ACCESSION NUMBER: AK066327
  ref <309>: DATABASE ENTRY DATE: 2001-12-06
gggtgtgttggagatgctttgaccctctataaaattaagttgataccggagcatatatacgcaccttagctattagaccaccaccttcttccggactcgtacatgtggaggctgaaggtgtcggagggcggcagcccatggctgcggtcggtaaacaatctcctcggccggcaagtgtgggagttcgaccctgacctcggcacgccagaggagcgcgccgatgtggagaaggcgcgccgcgagttcgccgagcaccgcttcgagcgcaagcattctagcgacctcctcatgcggatgcagttcgctaaagaaaactgtcaaaagctggaccttctcgctgtcaagcgtggagagcacgaagacgtcatgggggaagctgtgtggagctctttgaaacgggccataagccgcgtttgtaatttgcaggcacatgatggacactggcccggggattatgcaggacttatgttctttttgcctggcttgattataacattgcatgtcagtggagttctgaacactgttttatcatcggaacatcagaaggagatgcgccggtacatctataatcaccagaatgaagatggagggtgggggttgcacattgagggccacagcaccatgcttggctcatccctgaactatgttgctttgagattgcttggggagggtccaaatggtggagatggatgcatagagaatggtcgaaactggattttagatcatggaggagccacatttacgacatcatgggggaagttctggctctcggtacttggagtatttgattggtccggtaataacccagtgccaccagagttattactattgccgtatcaactgccgtttcacccaggtcgaatgtcgagctatatccgaatggtgtttatacccatgtcttacatttatggaaaaaggtttgttggcccagtaacaccagttgtgctagagctaagaagtgaactatacaatgacccctatgatgagattgactggaacaaagctcgtactcagtgtgcaaaggaagatatgtactatccacgttcatccaaactggatatgttttggtcctttctccacaagtttattgaaccagttttgttgcgctggcctgggagaaaactgagggagaaagctctggccacttccatgaggaatgttcactatgaagatgagtgcactcgatacatctgtttcggtggtgtacccaaggcattaaatatccttgcttgctggattgaagatccaagctcagaggcattcaaatgccatattgcacgcgtatatgattatttatggatcgctgaagacggcatgaagatgcagatttacgatggcagccaggtgtgggacgcaggtttgacagttgaggcccttgtggctactgaccttgtcaaagagcttggaccaactcttaaacgagcgcattccttccttaagaattcgcagttgcttgacaattgcccccgagatttcaaccgctggtatcgccatatatccaaaggtggatggacatttacaacagctgatgatggctggcaagtttcagattgcacggcgacagcactgaaggcatgtctattgttatcaaggatatctcctgaaatcgttggtgaaccactggaaattgatgcacaatacgatgctgttaattgtctgatgtctttgatgaatgataatggtggcttttcagcatttgaactcgtaaggtctaatacatggctggagcatattaatcctacagaggcatttgggcgtgtaatgattgaatatccgtatgtcgaatgtacatcatcatcaattcagtgtctagcattattcaaaaaacttcacccagggcaccgcaaggaagaggtggaaaattgtatcagcaaaggtgctaatttcattgagagttctcagagaagcgatggttcatggtatggttcttgggggatttgtttcacctatgccacatggtttgcagtgacaggattagtttctgcaggcaggacacttgggaatagcgctacagttagaaaggcatgtgactttctcttgtcaaaacagcttccttcgggtggctggggcgagagctatttgtcatgtcatgacgaggtttacacaaatcttaaaggcaaccgacctcacggtacgcacactgcgtgggccatgattgcactaattgatgcagggcaggctgaaagagatccagtgcctctgcatcgagcagccaaggctttgctcaacttgcaattagaggatggagaatttccacagcaagaaattgttggagtctttctccagactgccatgatcagttattcccagtacaggaacatcttccctataatggctctcacagggtatcgccgccgagtactgcttgcaggcaacatataggagcatgattttaagttatgccagctcttggcatgttggtttgccaataaagttacatttcacctcccctagcagcagtactctctactgttctagcgtttgtattttgtattttctaagaaaaaaatgttttaccgcatttacttagttccctttgtttgtaataaaacatggaacatactgcttccttgtagtt

SEQ ID NO: 15814 - DNA, 1613 bp, Oryza sativa
  ref <308>: DATABASE ACCESSION NUMBER: AK066328
  ref <309>: DATABASE ENTRY DATE: 2001-12-06
gtctgatcccttccctccctgcaacagaacatggctcttccaacaccaagattggtagttcctatagatgtgagcaagaagccatgggagcaaaaagtccctctccataaccgctggcatccagatatccctcctgttgcagatgtaactgaaggggaattgttccgtgttgagatggtcgattggactggaggaagagtcagtgatgataactccgcagatgacatcaaattcctggatctcacaattactcattatcttagtgggcccttaagaatagttgatgctgaaggggttccagctgcacctggtgatcttcttgctgtagagatctgcaaccttggtccacttcccggtgacgaatggggatactgccatatttgaaagggagaatggtggtggattcttaaccgaccacttccctagtgcaagaaaggcgatttggtattttgaaggaatttatgcatactcccctcaaataccaggtgtccgatttccaggattaactcatcctggtatagtggggactgcaccatctgctgagcttctcaatatatggaatgagagggaaaaaatattggctgagacaaatcatgagtcaatcaaaatctgtgaagttctacatcagaggcctcttgccaacttaccaacccctgagaactgtttacttggaaagattcaagaagggactgctgattggcagaaaatcgcaaatgaagcagcaagaactattcctggaagggagaatggagggaattgtgacatcaagaatctaagtagaggttccaaggtttatctcccggtatttgttgatggagcaaatctgagtactggtgacatgcatttttcccagggtgacggcgaagtctcattctgtggagcaatagaaatgagtggatttcttgagctcaagtgtgagatcataagaggtgggatgaaggaatacttgactccaataggtccaacaccacttcatgtgaatcctatctttgatataggtccagtggaaccacgtttctcagactggttagtctttgagggcatcagtgtagacgagtctgggaagcagcattttcttgatgcatcagttgcctacaagcgtgctgtcctcaatgccattgagtacctttccagatttgggtactccaaggagcaggtataccttttgctatcatgctgcccatgtgagggtaggatatctggaatagtagactcccctaatgcagtggcaactcttgccatccctacagcaatatttgaccaggatgtaaaaccaaaacgcctgagtgggaaacaaggaccaaagttgagaaggcttccagatgttttgagatgctcgtccgatggacaccttcctgttacacaggacccaagcggtacaaaggcaccttaactactgcaaaatgcgtggtcatattcacaatccactatatgattagtaattataaatctaaataatcatatttattattccaacatctatctagtgtaatccataatgtgggtcacatgttgtattttctgtattgtacgtgccgtattttctgtattgctaccaagcaccaactcgtgttatctgagttgtgcaagcaactaaatttccttattgtccc

SEQ ID NO: 15815 - DNA, 850 bp, Oryza sativa
  ref <308>: DATABASE ACCESSION NUMBER: AK066329
  ref <309>: DATABASE ENTRY DATE: 2001-12-06
gattcgccgccgccgccgccgccggaaaaccatgggtatcgacctcgtcgccggcggccggaacaagaagaccaagcgcacggcgcccaggtccgaggatgtctacctcaagctcatcgtcaagctctaccgcttcctggtgcggaggaccaagagccacttcaacgccgtgatcctgaagcggctcttcatgagcaagaccaaccgcccgccgctctcgatgcgccgtctcgtcaggttcatggaggggaaggtacctgatcgccatgccatttcgggggaccagatcgccgtgatcgtgggcaccgtcacagatgacaagaggatctatgaggtgccggcgatgaaggtggctgctctcaggttcaccgagaccgcgagagcacggatcatcaatgccggtggcgagtgcctcacgttcgaccagctcgctctccgcgccccgcttggccagaacacggtcctcctgaggggtcccaagaacgctagggaagctgttaagcactttggccctgctccaggagttccccacagcaacactaagccatatgttcgctcaaagggaaggaaatttgagaaggcaagaggaagaaggaacagcaagggcttcaaggtataagttgtggcagctttggcaccattacaccaaactgctcatatcagttagacatcactgttttggatgccagacttgcactgttgttttggatgctagacttacactgttttagatgtcaaaatattgtgttactgacttcacaggaacaattaaattgtttacctcctttgcacttcaagatatttgtttggcgtctcgcattatgaatataatctcctttatttatgaggc

SEQ ID NO: 15816 - DNA, 2332 bp, Oryza sativa
  ref <308>: DATABASE ACCESSION NUMBER: AK066330
  ref <309>: DATABASE ENTRY DATE: 2001-12-06
ggctctcgccctcctcctcctcatctcatctcgcgattggtgaaattctagggttgtgcggatttgctcccccgggccaaccggatccaggtcgacgagcgcgcgcgcgcgaggggtcttcaaaagcgctcttcgggatcgcgttcgcgtgagcgccagctatacactcactccgccgccgcgacgaacgacttggggcttctccgttggctactgctattgcagggtctagtctgaagtctgaacataaatgatgaatcttctcagaatgtggaagtttgagctctaaatccacttggtttgtgaggtgttaagagcactggacagtgatagttgttactgtgcaaaatgttttggcacgtacctggaatctctgctgcatcaccggtggatactattttagacaaggaaaatttcaagttggaggaccttcttgatgaggatgaaataatccaggagtgcaaagcactaaacacccgcctaatcaattttctgcgggacaaagttcaagtggagcaattactccactacattgtcgaagaggcacctgaagatgctgaaaagaagaggatatttcgatttccttttgtagcttgtgaaatatttacatgtgaagtggatgtcataatgaagacattagtggagaatgaagatctcatggacttgcttttctcctacttaaaacctgaccgacctcatgggacactgttggctggttacttttgtaaggtcgtgatttgcttgatgctgaggaagactctcccattcgtcaattatgtgcagggccatcctgaaatagttagccaacttgttgaccttattggtataacttctataatggaggtgttgatccgcttgatcggtgctgatgaaactatgtattctggttatgttgactcaatgcaatggttggatgacataaaggtccttgagatgattgttgacaagttcagttcatctgattctcctgaggttcatgcaaacgctgctgaaatcctttgtgcgataactagatatgccccaccagcgcttgctacaaaaatatccagtgcaagttttgtggcgagactatttcaccatgcttttgaagattcaaggcctaaatcggtgttggtccactcattgtcagtgtgcatatctttgttggatcctaagagacttgtattagcttcctaccaagttttccgtagtcaactaagccatgcaacattggtcactgcaagtccagagacagttggtggcatgctggatagcctaggtgatttgttgaagctgctggatgtttcatctgctgaaaatgttctgccaacgacatatggagtcttacaacctcctctaggaaagcaacgcttgaagattgtagagttcatctccgtcctgctctcaattggaagtgaagctgctgaaattcgattgatccatctaggagcaatcaagcgtgtcatagatctattttttgagtacccttttaacaactttttgcaccaccatgtggagagcatcatcagttcttgtttagatagtaagcaggatcagctgatctgtcatgttcttgatgagtgtaagcttgttacaagaattttggaagctgagaagaactctgctctatcaatagatttaactaagcacacggttcctttggaggggagatttacaccaaggatcggacttgttggtcatatgacacgcatatctaacaaactcattcagctggctaagaccaacagcataattcaatcacatttgcagcaaaattctgggtgggctgagtggcatgctggaaccctaactaggtgtaacgcagtagaaaatgtttaccagtgggcttgtggccggccaacaacactgcaggatcgaggtagggacagtgatgaagaagactttcgagatagggactacgatgttgctgcgcttgctagcaatttgagtcaggcatctaaatatggtatttacagttatgaagatattgatgaggatcaagtaccacatgagcgagatgatgaggacgtatattttgacgatgaatctgctgaagtggttatttcctctcttcgtcttggtgatgaacatgacagcaactccttgtttacaaattccaattggtttgcatttggtgaggataaagcactgaacggcgaggtcaacccagaagcttccccatccccaaattcagagatatcttctccaaatgttgatgatgagaatgatgaagtcattcttactgaggttacagatggcagaaagggttcagagtcacttttagcagtcgacttgaatgaagaatctagtcacacaggcttgacaaatgtctccattgataaattggaagatg

SEQ ID NO: 15817 - DNA, 3183 bp, Oryza sativa
  ref <308>: DATABASE ACCESSION NUMBER: AK098954
  ref <309>: DATABASE ENTRY DATE: 2002-08-28
gaccactataatctcctccactcccattccctccatctcccccccacgctcgcgagcttcgcggagtcgggagatcgaccgccgcctcccccaccacacatccgcccgcggcggcgggttgcgcctgcgccggccttctcggagtcccgcctctccactccggctcactctctccgggctagcccaaaggatttaaaatggtagagaatggtgttctggagcaaccaaagggggtgtctcgaaataggccacgtgctcagtcgaatgatcatccagttgatcctggatacctcccagagttgacatgggaacacaagcttagcaatattggctatgatttgccatccttcagacttacatggagagagacattccagttggctggccttggtcttcgtcttggccgacacatccttgaagaaacatcaaaaggacgtgctgctgtgattgatcccatgaagaagcgcattgcaaaatctggtcagggtgttccacttggcggcattggttcaggaagtattggaaggagctacaaaggcgagtttcaacgctggcaattgttcccgggaacttgtgaagagagacctgtactggcaaatcaattttctgcgttcatttcccgcaaagatggtagaaactattcctcagtgctgcatcctgggaaaccagatttgccaaaaggaagtaacatttcaggaattggatcctgggactggaatatgagtggacaaaactctacgtaccacgctctttaccctaggtcctggacgatatacaatggagaacctgacccagatgtcaacatagtgtgtcgtcagatttctccaattattccgcataattatcaacagagcagctatccagtttctgtattcactttcacagtaactaactcaggcaatacggctgctgatgtaactttgctttttacatgggctaactctgttggtgggaaatctgaactaactggatatcactccaattcccctatgatagaaaaggatggtgtgcatggcattctgttacatcacagaacagctaatggacaaccaccagttacttttgccatagctgcacaagagaaagaagatattcatatctcggaatgcccttactttataatatctggaagttctgatgcattttcagcaaaagacatgtggaattatgtgaaagagaatggatcttttgataaccttgatctcaccaaaacatcgatgtgctcaaaacctggattatcaataggggcagctattgcagcttctgttaagctgcctccccagacaacccagaatgtatcatttgcacttgcctgggcttgtcctgaagtgaaattctccagtggaaaaacctaccataggcgttatacgaaatttcatggcacggataatgatgcagcagcaagccttgctcatgatgccattctagaacataattcttgggaaaggcaaattgaggagtggcagaatcctattttgcaagatgagaggtttcctgactggtacccggtcacacttttcaatgagttatactaccttaatgctggaggaactatatggactgatggattgccaccaattcaaagcttgacaggtattggtgaaaagaagttttctctggacatgcaaaatggggacgctgatgatgccaatgggataatcccacggaataatactgccagcgacatccttaatcaaatggcatcagtactcgagagaattcatgcatctatggaatcaaattctgccataggaacaactttacttcagggtgaagagaatattggccaattcctctaccttgagggcattgagtattatatgtggaacacatatgatgttcatttctatgcatcattctctctgatcatgctgtttccaaaactccagctcagcattcagagagatttcgctgctgctgttttgatgcatgatcctgaaaagctcaggatgttacatgatggaaaatgggttgcgagaaaagttcttggtgctgttcctcatgatcttgggctatatgacccctggttcaaagttaatgcatatacgctctataacacagatcgatggaaggacttgaacccaaagtttgttctgcaagtttatagagatgtggttgccacaggtgacaaatcctttgctcgtgctgtttggccatctgtttatatggcaatggcatatatggagcaatttgacagggataaagatgggatgattgaaaatgaggactttccagatcagacttatgatgtgtggtcaatggctggtataagtgcgtactgtggtggactttgggtggccgctcttcaagctgcgtcagccttggcacacgaagttggtgacaaagcgtctgaaaaacttttctgggacaagtatgagaaggctaagtctgtttatggcaagttgtggaatggttcttacttcaattatgatgatggcgacaacataatgagtgcatccatccatgcggatcaattggctggacaatggtatgccaaagcttgcggtctcttcccaattgttgacaaggataaggcggaaagtgcactagaaaagatatattctttcaatgtgatgaaattcaaggatggtaaaaggggagcaatgaatgggatgtggccagatggcacagtggacatgtccgcaatgcaatctcgggagatatggccaggtgtgacatatgcacttgctgcaaccatgattcaagaaggcatggttgagaaggggttcaaaacagctgaggggatttatcatgctgcctggtctccagaaggacttgggtactcatttcaaacccctgaagcttggaacaatgacgatgaataccgatcgttgtgctacatgcgccctcttgcaatatgggccatacagtgggcactatcaaacccaaaactccacaagcagactgcagatatcccacaggactctttcccaaagaaccagttctcgtatgctcggattgcgaagttgctgcatttacctgaagacgaatcgccgaagagtttccttcgagtgatttatgagattgttcgtaacaggtataggtcctgatggaagggcaaatatgctccttattgttgggtgtccattggccgtattttcattgttggttgagaacatttgttgctgttgatcagcacacttgagtatatagtttatgataataaaactttattaatcgtgg

SEQ ID NO: 15818 - DNA, 1661 bp, Oryza sativa
  ref <308>: DATABASE ACCESSION NUMBER: AK066331
  ref <309>: DATABASE ENTRY DATE: 2001-12-06
gattcatgttttgttttctatcgcatgtattgactaaggataggaaatcaaacctaccacatatgggtgaaatcgattattcgttccatcatgattggggtaggttagttagggatctatttatagccacagaacattgccctggagaatacactgctgcagtgctgcttaagctcgccatccagccgcaatggaagatcagagcctgaagcccatccgttgcaaagcggcggtctgtagagcggccagtgagccactgatcgtcgaggagatcgtcgtcgatcctccgaaagcctacgagatccgcatcaagatcatctgcacctccctgtgccacaccgatgtcaccctctggcacaaggtagaccctgcctttccaagaatcttgggccacgaggcctacggggtggtggagagcgtgggggagaacgtggaggggctcgcggcgggggacacggtggtgccgacgttcatggggcagtgcgactcgtgcgccagctgcgcggcggagtggacgaaccagtgcaccgccgtgccgttcaccatgggccccgggatgcggcgcgacggcacaaccaggttctgggacggcgaagggaagccgctcagcgacacggtggccgtcaccagcttcagccagtacaccgtcgtcgacgtcaaccaggtcgtcaaggtcgaccccgccgtgccgcccaaaatcgcctgcctcctcggctgctgcggcggcaccggggtaggagcagcatggaggttggccaaagtgcaacccggttcgtcggtggttgtcttcgggctgggatccgtcggattggcggtagtgcaaggggcaaaaatgtgtggagcaacgaagattatcggtgttgatttgaatcctaacaaagaggaagttggaaaagagttcggtgtgactgatttcgtcaatccatcccaactcggcgacaaatccgtcagtgaggtgatcaatgcgatgacagacggtggcgctgactacagcttcgagtgcatcggtatctcgtcggtgatgactgaggcagtcagaagcaccaaatcaggacggggcaagacgatcattctgggggtcgagaaggacagccagccgttgtgcctgccgtccttcgagtttctgttcggcaagtgcgtcatgggatcgctcttcggtggggccaaacccaaaactgacatcccaatcctcgccgagaaatgcatgaacaaggagctggaactggagaagctggtcactcatgaggtaggcctgacggagataaacacagccttcgatttgcttctgcagggaaagagcctgagatgcatcatatggatggacaagtgatggccacaacttggggtggggatgcttttcctgttcaggttctgaatttggttgattgatgtgttcaataagtatgctgtttatttcgctggtgttgctgaaacaaggagtaatacactaatacgtccatcagccatcacgaataactgatgtacacttaatttcatgggcggttagcagcatcctcctttctgaatcaatgcagaatattttcattccaaaagaaaaggattatctttcttatggagtatgttcagatttgcgtgtaaagaactggattagtccaatcttgtttcttctttttttttgatctcagtccaatcttgtttcc

SEQ ID NO: 15819 - DNA, 1800 bp, Oryza sativa
  ref <308>: DATABASE ACCESSION NUMBER: AK066332
  ref <309>: DATABASE ENTRY DATE: 2001-12-06
ggtctgacctgagccccctcgctttcctgcgcccggtgcccgatgccgctcgccggcatcgccctcgcgcctctcttcgtctcccacctcgcgcctccacatcatcgccgcagcagcgttgcttccgccgccgccgccgccgcgagaaggaggccgcgcgcggttcagtgctccgctaccgctactgccgcgtccggtgaaggcgcaggagacgacgttgagctctcccgagggacgctgctctggagggcggcaaagctgccaatctactccgtggcgcttgtgccactcacggttggaagcgcctgtgcttaccatcatgtgggttcattctttggtaaacggtattttgttctcttggttgcatcagtccttgtgatcacttggctcaatctaagcaatgatgtttacgattcagatactggggctgataagaacaagaaggaatctgttgttaacatcgttggcagtcgaacgatgacgcaatatgctgcaaatatttctctcctgttcggatttatggggctattttgggcctttgcccaagctggggatgccaggttcattttatcggtaacctgtgcaatcatctgtggctatgtttatcagtgcccaccattccgactaagttacaggggactaggtgaaccattatgttttgctgcatttggtccattggcaaccacagctttctacttctcaaacagcagcagaaacatttccagcggaacagctcttctccctctcagtaaaacagtcattgcttcatccattctagttgggctgacgactaccctgatactcttctgcagccattttcatcagattgatggagatcgtgctgttgggaaaatgtctcccctggtaagaattggcaccaaaacaggatcaagattagtgactcttggggttgtcacgctttatgttcttttggctgcttttggcatgagcaaatctcttccatcagcttgcactgtcctttgtgccttgacactccctgtgggcaaatgggttgtggactatgtgctgaaaaaccatgaagacaacagcaagattttcatggcaaagtattactgtgttcggctacatgctctgtttgggatggcactggcttctggtttagtcttggctagaaatggcacactggtctgacagacgaccaaccttgacatccttgtgaagacccagagcagaccgccgtcttgcagtttcagactgagtacctccagtagctgtttggttccagagcaagcttgaacgacgagtgcaatggcagtgcaattgtgcagccatttggcagctagattgggtaggcagagcgaatcagagaaagaagcacaggtttggaagcactgccagccaaggcagtggagagtgtagaggatggtaaattgcctgaaaccggaatgaatggagaggtacttgagttgttggctacagaatcccagtcatttatctccatgagaaaaaaagcccagctatgcatttcttcccatcgcagtaaagattgccgttgcacaggaggctcccagtgtgaattgattttcatgccgggacagataggacatgtcatgttctaccattacttcttcctcccaagcaccaacagctatttggtagtacaccactcatctgggcagtttcgcatgtgcctttaacacttctagtttcctggctagtgatttgtgatattacttttacagattttctgagtttatgggtgggagatgagttggttcatgattttttttctctgtttttaaactcatgaattccttaattctaaaaacaggttacttc

SEQ ID NO: 15820 - DNA, 1655 bp, Oryza sativa
  ref <308>: DATABASE ACCESSION NUMBER: AK066333
  ref <309>: DATABASE ENTRY DATE: 2001-12-06
gtcccccactccgccgccgctcacaaccacgtgcgcacagaaaacacatcgcgttttttctttctcccatctaccgatccctaattccccattcctctcttttctctgaatagaagtccgattggtgaggcgaggcgacgccagggagccagcgaggcagcgacgtgcctccaggccgcgcgccgccgtcgccgcctcgaagctccctgcgccgccgtcgtaggttagtagcgtgccgctgccgctgccgtgtgtgtggagccgccgtcgcatgtgatgtgtactctgttgaactccaaaacatgtgagcttgttatgtactgcatgtgatgtgctgctatgatgctatgcatgcaccgatgtactgcttaagtttatgtgatgaacttgttaagtttaatgtttgttggagtaagtttactatgttttcttcttcctgtaatcctgttgttgcttgcttgctgtttttctgtttctttcgggtgctgagacccggcgggtgccccgtacccgctgcggggacggggacgggggaaatctaccccctgtgcggggatggggaaggggaacgttctgttttttatgctgtggggatgggtacggggtgcacaaacccgacgggggcagccccgttgccatccctaatctccctccagtccctccctaccacagccacagccagatccgcttattcttgcgcacttttttctgcatcctgcgatttattttgtttcgttttgatcttttttttcacggttgttttgttgttttattatgcaagcgatgcgatggcagtgacgacctggtaatattcaagctcaacagaccaaatcacaggtctttctctctggatctactcctcagggattgatttgtatgccgatttttccgctgaaccgagccatctgattttgctcttttttcttatctggtttaattgtttttctgttaaaaattgctatctttctcgattccttattggtttatattcgtgttctttgcactggaggagtctattgcgatgaggatattaagctccctcttctgaaggcattgaggacactcgctggcagaatcgaaccaattaacaaagccaccactgagtaacttgaaatcctccttcaatttgttctgctatgttttttctgttgtttttcttagatctgtttggattgtgaggaggtaattgatgcataatccaacacttgatcagaggacggcttctgtcgtccatgtgacgttacacatctttgcatctgaatccaatcacagaacagatcttatcgtttatggttttatgtggattttttacagtatcagaggatgaaaccttataacaatcttaggacaccttctgacacagtgctataacactgtgaatgagaaggcttttctttctgatgatgctttaaagatcatttttatattcttttctttaaatcttgcgtgttctataattttttctccttcctatatctacgattttaagcctatgatgattagcatattgttggaattaccgtcagattatcaaatgacgacatttgtctggcatcctgaggctttataatccagtaatattgtagtgtataaagatctagattttgttcatgtattatgagttgcaatctagtcccagtgaggattctatgacc

SEQ ID NO: 15821 - DNA, 1390 bp, Oryza sativa
  ref <308>: DATABASE ACCESSION NUMBER: AK066334
  ref <309>: DATABASE ENTRY DATE: 2001-12-06
gtgaaccaaagaaccatcacttggtaccagtagtgcaacaacttgttcagtcgagaggaataccttctagccttctagtagccaggatggccatggagagagcttggaagccaagggaaattgctgacacttttggcattgagatggatgaagaggaggctgcggctgcggcgataccgcctccgcagacgccattggagcccatggagtacctgtcgaggtcatggagcgtgtcagcgtcagagatatccaagatccttttcaacgggagcaagaagagctttgccgccaagcgtctgccggagatgaccataccggaaaactctgtggtcgctgcgtccattgttcccagccatctgcaacatatagacacaagaaggaattcaatcagcagccaccacctgccaattgggaggtggttccaacacaaggaggcaagccgggtcaagcagagcagcaaagagaagctgcgagccgagaaggcccatgtacacgccatggtgtcggtggcccgggtcgcagctgccgttgctgcggttaccgcggccaccacgagctcagatatccagacctccaagatggccgcggccatggtgtcggccaccgagctattggcttcgcactgcgtggagatcgcgcagcacgcgggggcacgccatgagcaggtggcctgtgccatccagtctgcagttggtgttagaagctctggtgatctgatgacactcacagcagcagcagctactgctcttcgaggagccgcaacaatgaagcagagagtgcagcgagagatgagaagcaatgcgagtgttcttccgtatgagaagggtcactcatggagtcctgacatctggtgcaaggagggggagttactgaaacgcacaagaaaaggagatttacacaagacacgagtatctatatacatcaacaagaggtcacaggtcatattgaagttgaagagtaaacacataggaggagcactatcaaagaagaacaagagtgtggtttttggtgtgtacaacgagcttcccacatgggttgaggcagggaaacatttcacagaggagagatgctgctttggcctgagcacggcacaaggtctggtagagtttgagtgtgagaacagcacaagtaaacagaggtgggtcgatgatgtgaagaatctgcttcggcaggtcgctgcagaagagcaagtggaaaataagttgggatcagtgaagctcagttgatgtagttcatacatgtgtacactattttcatgttggcaggtggtataccatagaaggtgccttattgatgccaggcgtatatattgttgtactcttaaattgtcaggtagttttgtactgtacacacaaaatgataagatacataatagatcatatgttagtcc

SEQ ID NO: 15822 - DNA, 1351 bp, Oryza sativa
  ref <308>: DATABASE ACCESSION NUMBER: AK066335
  ref <309>: DATABASE ENTRY DATE: 2001-12-06
gactagagatagtgagagaagataacaaagtgtgttctcgctgacgaaccaagaatgcagtgtcactcatccacaaatggtgatgcttgtttgctgcggacaaccggaagaagcagaattcggccgatatagtaccaaattgcaataagaaaatgcatccatattcacttaaaagttccaagggagcaccgtttccaccgcgaccgattcttgtcttcctcattgcaatatttggattctatgtatgctacatctcctttaaccagataacactagagaatagatctgaggagaacagtggagaagtgcaggcagaaattcattgccgaaagcctcatcttcctcatgaggagctgcgttatgtgcactttccgaaacctgagagttatagcaggggagagtgttcctgcaatctggttcgatcctttgtgcttgtatctatgcaacggtcgggaagtggatggtttgagactttgctgaacagccaccctaacatcagctcaaatggtgaaatatttaacagggtggatagaagagagaatatctcatctatcttacagacccttgacaaattgtataatttggattggttcaccagtgcagcaaagaatgagtgcacggctgcatttggattgaagtggatgctaaatcaggggtttatggaccatcatgatgatatagctagttatttaaacaagaagggtgtttccgtgatatttctcttcaggagaaatacattgcgcaggcttatctctgttttggctaatgattacgacagagatgcgaagcagctgaatggaacccacaaatcccatgtacactcaaaagaagaggctgagatattagcgaaattcaagccggtgctggatgtgtcaaatctgattccaaacatcagaaatgccgagaaatacatcagagattgcttggaccacttcaacaccacacggcacatgatcctctactacgaggatattgtccgcaacagaaatgcattgttccaggtacaagaattcctcggagttccggtgagaaagctggtcagcaggcaggtgaaaattcacactagtcctcttccaggccttgtcaggaactgggatgatgtgagcaacaaactgaatgggacacagtatgctcattttcttgacggtgcagattatgtcaggtgatctacatggatgtgagcgacaggattttttttttcatatggggttttagttgccatatgattgattcttttggtacaaatgagttggtaaaagaaagggataacgataaatagatcaagatgagagaccttgtgatcaaattgtacatgctttccactactcattaccttcagagctcaaattgc

SEQ ID NO: 15823 - DNA, 1919 bp, Oryza sativa
  ref <308>: DATABASE ACCESSION NUMBER: AK066336
  ref <309>: DATABASE ENTRY DATE: 2001-12-06
tggcgagctagagccatggcgaccggagagctcgctctcgtgtcctcgctgttcatcgtcgtcgtgttcctcttgcttggtgcggtggcgagagaggcttctgcgctcacccggcatgacttccccgagggcttcgtcttcggcgcaggctcctccgctttccaggtggaaggggcagctgcagaggatgggaggaagcccagcatttgggacaccttcatcaatcaagggtacatgcctgacggctccaatgcagatgtctcagcagatcagtatcaccattacaaggaggatgtaaagcttatgtatgacatggggctggatgcgtacagattttccattgcttggcctcgtcttattccggatggaagaggagagatcaaccccaagggcttggagtactacaacaatctgatagacgaattgataatgcatggaatacaacctcatgtcaccatctaccattttgatctccctcaggcccttcaggatgagtatggtggaatactcagccccagattcatagaagattactcggcttatgccgaggtgtgcttcaagaacttcggtgacagggtgaagcactgggccacctttaaccagccgaacatcgagcccatcggcggcttcgacgccggcgaccggccgccgcggcggtgctcctaccccttcggcaccaactgcaccggcggcgactcctcgacggagccgtacatcgtggctcaccacctgctgctcgctcatgcctcggcagtgtccatctacagacagaaataccaggcaattcaaggaggccagatagggatcactctcatggttcggtggcatgagccatacaccgacaaaacagccgatgcagctgctgccattaggatgaatgaattccatattggatggtttttgcatcctttggtgcacggagactaccctccggtgatgaggagtcgcgtgggcgttcggttgccatccataacggcgtcagattcagagaaaatacgcggatcgttcgacttcatcggcatcaaccattactacgttatctttgtgcaatccatcgacgcgaatgagcagaaactacgggactactacatcgacgcaggtgttcaaggagaagacgacacggagaacattcagtgtcattcttggtctcttggcaaggtgctgaatcacctgaaactcgagtatggcaaccccccggtcatgatccacgaaaatggttattcagattcaccggatatcttcggaaagatcaactacaacgatgacttcagatcggcgttcttgcagggctacctggaagctctgtacttgtccgtacggaacggatcgaacacgcggggatacttcgtgtggtcgatgttcgacatgttcgagttcctctacggctaccgcttgcggtttggcctgtgcggcgtcgacttcaccgccgcggcgaggacgaggtacctcaagaactcggcgcgatggtactccggcttcctccgcggcggcgagctccggccggagaaatcctacgccacactgtgatcactccagagaaattcggaggcgtacagtacaggaagatggccaacgctggctaagttattactacctccgtattttaatgtataaagccgttgactttttatctaacgtttgaccattcgtcttattcaaaaaatttatgtaattattatttattttattatgactagattcatcatcaaatgttcttaaagcataacataaatattttcatatttacacaaaaaaaattttgaataaaatgaatggtcaatcgttgtttaaaaagtcaacggcgtcatacattaaaggcaaattttactacaggacactcgttatgtgtggttttaggcctaagacactgcccaaactcacttttgagggaaaacactccataaacatggtaatttgcc

SEQ ID NO: 15824 - DNA, 1607 bp, Oryza sativa
  ref <308>: DATABASE ACCESSION NUMBER: AK066337
  ref <309>: DATABASE ENTRY DATE: 2001-12-06
ggtcaccttcttcctccccacgccgcgctctcctcccctcttaaaccactagcgccgcctccgcgctctctcctgcctcctctcctcgcctctcctcaccctgtgggttggtcggcgtgtagctgcttgctttgctctcactgccggggctcgatctgcttgctctgcagaaattctttccaattcattgcttcttgtggcctgtgggcacctctacaatttgatttcagatggattgctgctttatgttcagaaaaaaacaacctgttgaaggtgatgatggtgaacatagagtgaagatattttcttacagtgagttgagaaaggctacccatgattttagtggggcaaataagattggagagggtggttttggctctgtgttcaggggagtgcttagagatgggacaaccgttgccgtaaaggtgctgtctgctacttcaagacaaggcgtccgagagttcttgactgaacttacagcaatttctgacatcaagcatgaaaacctcgtcacacttattggttgctgtgctgaaggatctcataggatccttgtttacaattatcttgagaacaacagtcttgcacagacattgctaggatctaggggtagcaacatccggttcgattggaggacccgtgtaaaaattgctgtgggtgttgctcgtggaattgcatttttacatgaggaaattcgccctccgattatccaccgtgacataaaggcgagcaacattcttcttgacaaggacctcaccccaaaaatttctgatttcggattggcaaggctccttccacccaacgcaactcatgtgagcacccgagttgcaggcacattaggatacctggcacctgaatacgctatccgaggccaggtgacaaagaaatccgacatctatagcttcggtgttcttctactggaaatcgttagcggcagatgcaacaccaacacaagattgccttatgaagatcaatttcttctcgaaaggacatgggtacgctacgagcaagaacgcctggctgagatcatcgatgctgacctggggaatgacctggacgtcgacgaggcatgccggttcctgaagattggcctgctatgcacacaggacgcaatggcgcgccgccccaacatgagcaccgtcgtcaggatgctcaccggggagaagcacttctcggtgcaccggatcaccaggccggccatgatcaccgacttcgccgacctcaaggtcagcagcagccagcagaaggagaacgagacaacacggtcatccaacatgagatcgttcagcaccactgatgaaacggagcctttctcatcgtcagagacgccgacgcagacgtctatctgaaaaaaaaaaacaagaagaagaactggaaatgtggagacaggactagtgttttttttgtgtttgtatattattgctccgaaaggggataggattacgttcaatttttttttctctttttggagagagtttcgtgtttgtttgatttttgtgacgaggagatgtttaagataggcagcgtattgcttctcgatctgggtgtaaatatctcgaaatgaagatgttcaaagcctcaaagataagctctgcacgattcacatc

SEQ ID NO: 15825 - DNA, 1256 bp, Oryza sativa
  ref <308>: DATABASE ACCESSION NUMBER: AK066338
  ref <309>: DATABASE ENTRY DATE: 2001-12-06
gattagtccgcatcgaggaataggttgatgtcatctcctgtgctgtcgccactcgaggatagccgagcggagcactctgttcggcgtgagctcgcggttttcgagactcaggttcgtcatcggcgacctggcgttgccgccgtcgagccagtttctgatggcattggcttcgtacgtgtacccgtctgctgcgatttgaggatcagtcatcacctcctgttcaccatccatcggagcaaaagttctggcggcacatatattgcaagaaggttttcattgggttccctatggccattgcaggtaaaccatatcttgcatgatggggatgcagtctccatcagcttgagggctatcttggaatttggttctttcatttccctacaggttataatatcataaggaaaaacgctacattaggcagatgtggtccatactctgagtagtgttggtctgcggctgctcccatgacaagcctggtgatgccatgaaggagcatattcatctaggttcttctcggcctcttccttcgccaacatcaggtactcgctgatctcttcaggcttcattctgggctgtggacatgagcaactacaatattggccccgtccgtggacaggttctgcagcgcccaaaggaatgtgctcttgccgtgctcgacgtcctcgtcgacggccacgaacaccttgtcctcgccggcggccaggctctgctcgtcccactggtcgccggcgtcctgcagagagccggccgacgagctgacgctgcaccaagcgctccacatcgcgtcgtactcttcgccgtcgctatccattgctgcttcctgacgttgagaaatgagaagcacaagaccatgcagctgcagagtaactgcccagccgtttcatgaatggaaatttcgagatcaagttacagaagaaagcagaagtaaccagaagccaaagtcgacgctgtgactttacacaacggtgggacgagatgccatttgcgctcgcgttggcgtgatcaagcaagcaaacgtagctcatacgcgcgtatgtcgctaaagggagatgtattgtatactactgtatgcagggacgatgtttgccgcgtggacccaagctgagtaacttggaaattaccgagcattcgacgtggacgtgacaagttgatgcagtttatagtttaagaccagcgtcaagcaatgaagcgagcacgcaacacaagtacaacgaacagttctgcttgggcctatataaaaaagttttgcttgggcc

SEQ ID NO: 15826 - DNA, 641 bp, Oryza sativa
  ref <308>: DATABASE ACCESSION NUMBER: AK066339
  ref <309>: DATABASE ENTRY DATE: 2001-12-06
ggcttaccctaccttacctgctcctactactgctcgcctcgcttacttactaccctcctgctcctaacaacaacaacaacaacaacaacaacaacaaggaagctctatcgggaaagaaataggaggaagaaggattaaggaaggaaagcaaagcaagcattaattaaaggaaattaggaaggatgtcagactgggggccggtggtgatcgcggtggtgctgttcgtgctgctctcgccggggctgctcatccagctccccgggaggcaccacttcgtcgagttcggcaacctgcacaccagcgccatgtccatcgtcgtccactccatcatctacttcgccctcatcaccctctttgtcatcgtcatcggagtacacatcaccaccgattaatttttacttcttctttagtttcttcatttctgcagttcgtctgccctgccctctgtaatctctatcttcttctttcttgctcatcctgtcttctcccctcctccatatatatcctacctcatattaattctactatctacatggtgcttccttgatgttcagcacatcaaaccatgcataaaccaagactgttttaaattattactgttttctactagtattatgtatgcatgggcagttggcactgct

SEQ ID NO: 15827 - DNA, 723 bp, Oryza sativa
  ref <308>: DATABASE ACCESSION NUMBER: AK066340
  ref <309>: DATABASE ENTRY DATE: 2001-12-06
gcccgaaccctaactccatcttccccggcggcggcgcagcagaggatatcagccatggtgaagtttctcaagcccgggaaggcggtgatcctgctgcaggggaggttcgcggggcggaaggcggtgatcgtgcgggtgttcgaggagggcacccgcgaccgcccctacggccactgcctcgtcgccggcctcgccaagtaccccaagaaggtgatccgcaaggactcggcgaagaagacggcgaagaagtcgcgcgtcaagtgcttcctcaagctcgtcaacttcacccacctcatgcccacccgctacaccctcgacgtcgacctcaaggaggtcgccgcggggcccgacgcgctcgccaccagggacaagaaggtcgccgcctgcaagtccgccaaggcgcgcctcgaggaccgcttcaagaccggcaagaacaggtggttcttcaccaagctccgcttctgagctctctcctgcggcggcggcggcggcgatgggatggtactggtgcacggccatctcatcctttttctctttttctaaagcttttcgctttctgagtagcagccaatgaatggttttggattttctaaattaatctcaatcaccctgatgtaatggtactactgcctgcttgtgtgggtgtggatgtttagtagtatggatctattaaagaagcatattgggagacgttctgtgtcaatttttcactggttatggtcc

SEQ ID NO: 15828 - DNA, 2694 bp, Oryza sativa
  ref <308>: DATABASE ACCESSION NUMBER: AK066341
  ref <309>: DATABASE ENTRY DATE: 2001-12-06
gaatttaacatttcactcaaggagaggccaccatttccgaaatgtaccatctttaaatcaagcaatgggcactgtttggttatatttcctgtttgctctgtgttttcttccaccttccatttctgaatcctcttgagaacttgcatagtgcatcatctactttagaacaattttgttggttcggcactgggaaaaagagtctccatgctgctctagcgtttcgtctgcaggcaaaatttttactgtgcaaaccaggtttgtctatcttttcctcagagaagcagctgaagaggaacacaaaacttcttggttgcgcagcaggtagtgcagcacaagcagcagcctggcactgtgattcccaaggaattcatgcctgtgactgtgtgacatgcccatcggcacatggagatttcacgatcagggtagcgaaggaagcatcgaacagatgcttgattgctggcctgctgccgcatcggatgtccagacatgaaccatctcaaacgaagcgaagcagatgctgccgcagtcccaggctgtctttgatcgtaggagtcaagaataaaggtgcaaccaaagttgccacaaggataaagcaggagggaatcaaaacaaaggcctttattgctttgccactgctactactacctctctgtgaatctgtgcagtttcattgtacgctgatctctctggtcgaccaccggcttagctgagagatcctactcgtgcccggtgtcgaggagagcgcgcgatggagtcggtggccgtgaacgcggcgcgatgggtggtcggcaaggcgctgagcccgctgtcgggagggttcgtcgaggcgtgggctgccaccacggagctcggccctaatgtcgacgccatcaagatggagctgctctatgcgcaggggatgctgcacaacgctcgcagcagagagaccagcaaccccgcgctgcagcagctgctcctgaagctccgcggcctggcctacgacgccgaggacgtgctggacgagctcgactacttccgcatccaggacgagcttgatggcacctacgaggccgccgaagagcacgccaagggctgcctctatggcctcgtgctcaacacacgccgcacagtcagaaacatcaagaagaaggcgtgctcatgcggagataatggggaagcgagtcgccataccaacgatggggaagcacttgcaggcagcagctgcattcacaagctcttttccaatgctcgagaaagaagccagttcctctgctgcgcctatccttgcaaagcatcgcacatagagcacaccatgaaaacaccaaagctgaagtttgacagggtggatctgtccacaagaatgaagcacatcgtcgagcagctaaaaccagtctgcgccaaggtctccaccatccttaatctggagttgttggaatcaaaccgcaacattggcctcatgagtctcaatgctgcgctttcccggatgccagggcaagcaccttttcttccaagcagcgttgctatgagccggcctgtaaccacttcagagtttatagaccctaaatttcatgggaggatgagtgagataaataaaattattggcattactcggggtgattattgtggcaaagacctgaccatcattccaattgttggttcaggtgggatatgaaagacaactctcactcagcatatatacaaggaggtacagaaccattttgatgttaaggtttgggtctgtgtctctctcaatttcaatgtgtatagattgaaagaggagattgccaagttaatgcctgaactcaaagatgagaaatctggtggcccagacgatttaattgagcaaaggttgaaatcaaagaggtttttacttgtcttggatgatatgtggaattgtggtaatgaggatgagtggagaaggctcttagcacccctaagaaaagcacaatcaacgggaaatataattctagtcaccactcgttttctagcagtcgcagaaatggttaaaacaattgatcattcaatacagttggaagggctagaatctgaagtgttttgggaactattccaagcatgtgtatttggtgatgagaaatcaataggcaatcacgtggacttacttgtcactgggaagaagatagcggaaaaattgaagggctcccctttggcagcaaaaactgtaggacggttattgagaaatcaccttgacttggagcattggacaagtgtcctcgaaagtagagaatgggaactgcaaaccggtgagaatgatattatgccagcgctaaagcttagctatgactatctcccttttcatctacagcattgttttacatattgtgctctgttccctgaagattacagatttgaaagtgacgagatgattcacttgtggataggactagacatattacaatcgcggaatcaaaacaaaaaagtcgaagagataggactgagctatttgaatgatttggttaattatggattttttagaaaagacatgaacaaaaatgggtctccgtactatacaatgcatgacctactacatgagttagcactaaaggtttcatcatatgaatatcttgctataagtagttctagtgtgagaagtgtgcaaattccaccatctgtacgacatttgtctattgtgatagacgacacggatgtaaatcatagagtgacttttgaaaatgttaagaaggattttagcactct

SEQ ID NO: 15829 - DNA, 1182 bp, Oryza sativa
  ref <308>: DATABASE ACCESSION NUMBER: AK066342
  ref <309>: DATABASE ENTRY DATE: 2001-12-06
gggtagcaatacgaatcggtttcggatttgttgccgcaagataaaaccgaagggagaaggagggagaagatgaagcaaacgagagagatcgagcttgaggccaggtggaatcgcgaggggatttcatggcgaagcggcgggcagagtccgagcttgagcaggtggaggccgaggcggaggcggaggcggaggcggagaagaatgggaggcgagcagctggtagtcaggacggggtgaatcgcgcgttgatcctcgactgcagcaaacatagcgatggatcgatctacagcggcgacgattttttggcacaggttttacaaggtcgccgatacccgagagactctcaaggaggcaatgatgctgtcaaatccaaccaattgccgaccacacatgtgggcttgcaatattcacgaagaacaattcatgatgcagatattctcgctcaagttatccaatatcactgctactgttgatggcccagttcacttgtatggatactttgcagtacgggatcatttggacccgctacgcaactacatcttcaaccgcaccagagatgatcctttcatcatggggcaagacaatggtgttgattcagataattccttgataccaatgcctggccccaagagaggcattggaaaccaagctcgtgtgctcattgagtttgacatgaagatcaagaatggagagacacgagatgatgattttcagctcatagatggtgctatcatatgcagcgaattcgtgcttcccaatagagtgtttacgcaacggattgagggtgattgtggtgcggtggacataagtcttgcacttctccacagtacggtggaggccacagtacaagttagcatatcacaagtgcatggcaatggcttcagcttatctttatattcttataccagtagaatccctgaaaaaattcagctcttcgatggattcatttccaagccatgtgatctgaataggtttgtagttgctgtggtggtgaatactcccttgattttaatcttcaagattgacaagagagatggctcagatcatgttcctggatgttgtgcgttcaaagctagaacacatggatatgagtatgacatgcaagagctcaaacttggttgcaccaatatactggtgaagctgtcttggtcaactttggagtgattttgaacagcccaaggg

SEQ ID NO: 15830 - DNA, 1578 bp, Oryza sativa
  ref <308>: DATABASE ACCESSION NUMBER: AK066343
  ref <309>: DATABASE ENTRY DATE: 2001-12-06
gcaagctcaagcgcttaatacgaatctggctgccatggagctctccggcgatgccgccgtcgtctccggctccggcaaccgcaagcgcaagcgccatgtgcagcagcactccctcgagtacccctgcgtgtcgcggctccgccaccgtcgcctcctcgccttcctcagccgccacgactacgactccaccttcgacgcgctggtgcaggagacgtccgtgctcttccgcgtggggcacatccaggcgctggtgaggcagggccggtgggcggacgccgccagctacgtcaaccgcttcgtgccgccgtctcgcgtgctcaccgatgccggcctggtcttccacgagttcctctacatccaccacgtcctcgactgcatcgtcgccggcgaccacttgcggggcgctcaggtggccgccagctaccagcgccacgtcagggacaaccccaacccctcccatggcgccatcaagctcatacgcatcctcctcaccattctccactgccatccaatcagggcgttcctcaactggcatctgatgaggtacatggcggccgagatcatcaaggacttgatccctcagatccccgagttcaacgacctgctaaagctaccgaaaggtggccccatcaagccacacaacatcctccccattgggtccagttctcatcggaggcgccacgtgaagaatgaagaccggattccacctgatattgcccgcttctatcttcagaagaagagagggctgccctcttctactatctgtcaggagagatattacacaggattatcacgtaatgcagcaaactggcttgcagatatcatcgacaaatctttgcaagctggtgtgctgcgtgatggatatccatttaaacactcctgtaacgaaggtgttactggtgctccaattggtttggatagtcctgctaacagttatgggatctcaacacaaactattgcagacatgatgcgtccgttgatcattagtgatatcggtcaaggttcagttgcaagaaacaatccaacaaggccagaaacaactgctcaccaagcgattagtccaacaacgcaacagataactacggagtttgttcaacattcagaatcacaatttcaagaatacaactcccagatggatggaagagtcagaattgttgaaagtggcatgaaaaggtcgcgttccttcggtggtggttgcagctcgtccgttgaaatttcgagttgatgacttctttagccggactggccggaagaatgaccagttcagtgacttgggttggtggtttcggtgttctcttgtgcttctcatcgaggggagacttaattgaatgagttaagggagctgttagaatatttagttagtgtagtctatgtcaatttttaccatttttagaacaatcacaatttgtggcttggatatactggtttcgcttttgtcttaagccctatagggcgttttcttgtggcgtggaattatcactccatatcctttaatagaccgtcagtgatgaatactgccactcacaaaattactttttatgctaccatttaaatgagatcattgttattctttgcctc

SEQ ID NO: 15831 - DNA, 2834 bp, Oryza sativa
  ref <308>: DATABASE ACCESSION NUMBER: AK066344
  ref <309>: DATABASE ENTRY DATE: 2001-12-06
aatcaaactgatatctcctcatccgatcctcttcttgcttcacctgctgccctctgctccggtcgatcgcttgcatattgcatatttgcatgcagagctgccatgggaataccttctttctacaggtggctcgtgaacagatacccaagcatcgtctccccggcaaaggagagccgccctgcagatggcatcgtcgtctacgacaacctctacctcgacatgaatcaaatcatccattattccttccacccgcaggaccagatgaacgccggcacagatgtgtgcgctccgacgacggtcagcgaggttttcgagtccatgttcgactacctggaccgcttgtttcgcatcgtcaggccgagaaggctcctctacttggcagtggatggggttgctccgtgcgccaaaatgaacggaatgcgaagaggacgacgtttcgcctgggcgagtgaagaggaggaaatgcagaagatatcagaaggggtctctgaccccaatgtcatcacgccagggactgaattcatggagaagatatcgcaagcgctcacgtactacatccgtgccagattgaatagcagtgatccagggtggaaacacatcatggtaatactctctgatgcaaatgttcctggagaaggagagcacaagatcatgtctttcatccgtgcacagcgcagcatggaaggctatgaccccaacacacgacactgcttgtttgggcatgatgcggatttgatcatgcttgctttggcatctcacgaagtccacttctctattttgcgtgaggataattcccagctaacagaagcggatccagagaaacaatatctgtttttgaacatatgggttctgagagagtacttggagattgaattaaagatactggacccagtttgtgagcctgatattgagaggctgattgatgacttcatcttcatttgtttcttgatgggaaacgatttcatcccccacattccgtcgcttgagatgaaggagtatgcacttgatcttctcatcgaggtatacaagacaaccttcaacaaaatgggagggtatattgtcaacatagaaaaggtaaaagataaacatgctgcatatctggaagtctcaaggttggaaatattttttcatcaactgtccatgtatgaagagaaaatttttctaaaacgatacgaactggaacaggaatccctgaagaagtcatgtcgcgatgtgttgcgtgaagcttcagaaagtgaaagattagagctgagccgaaaactagaggaccgcttttttaatgaagaacgtccatatgacaaactaagacttggattgccaggatggaagtcccggttctacagggaatatttcggtatcgaaacttctaatgaaattggaaatcttcaaaacgacatggctcagaagtatttagaaggactttgttggatgcttcaatactatcttgcggacgtaccatcatggagctggtactacccattctatgttgctcctttcgtatctgacctcaaaagtaattgtcggttcgagatatctttcaccgtagacaaaccactgcgaccatttgatcagctcatggcagttttaccactacgaagttcgtgtgctctcccagaatgttacagaaaagtaatgggccgtaaagaatttgaccatccgaagttgcaggctgacacaattggaaaacgtttcttgtggaaatgtatctctgaggaagaactgcttcaggccaccaaagagttagataaagagctgtcgatgcatgagatgagacggaatactccccggcaagagaagatctttctgcagaggaactcaaatgctcaggcacttgccaaagttattgtgcaactgcaaacatcgtcatgttcgccggagcaaaagcttccaatagattcagctataagtggacttggaggctggttatcgcctgatggcttgagcaatggtttcttttgctcacccctacaaaatctgcaggacatcacgaatgatcaggcaatatcagcgatgttcttcaaccctgaggcagggaatccaattccaagactacttagcaatgtcaaagtacatgacaagacggttacggaagctgacatctcaaggaggctgctctggcacacgtacccgggctcgaggccgccaccgcccatcgttgagaggccggacaccatctggaagccgatcagcaagccgtcggcgccacgggaggagcacaagaacgccggaaccgggtggatggggcgggggagagggaacgccgcccttgccgccgccgagacgacgacgcagctcctcaccgccagcagcagcagcagcagcagctacgggcatggggctgcaggcagccgcactgccgccgagacgcaacggagcagcagcagcagcagctccaggagaggttcccgtcgtgcggacatggtggcgccgcaaagccgcaacagcaggtttgatgacagcgacggcggcgcatacggtttccgaccgcttgggattgggagtgcgccgtggacaggagacggcagcggtggcggccatggccgcgggagagcgcagccacgtggttggtaggacactgggctcccggctccgggaattagagatgtacagccatactgagagacgcagaggggttttccagctatcttaataaggcagtggcctagacgacttaggtggtatttacgatatttttaagatgtacagctgtaccacctcaagactttgcaaatgtttctaaatccagtattccaggggcctcccaaatattttggctggcaaacaacttgccaattaactaggcattgtcccggggttatattttccgggtcttc

SEQ ID NO: 15832 - DNA, 741 bp, Oryza sativa
  ref <308>: DATABASE ACCESSION NUMBER: AK066345
  ref <309>: DATABASE ENTRY DATE: 2001-12-06
gactcgttgcatctcacctagagaccagcagagtgtagtgtgctgtgtgcctcttgctagctaagcaaggagatagccggagccatggcgaccatcgccgctgccgccgccgcccgcaccgccgtcgttggccggccgtcaggggtggctcagctgagagcgaggaggggtgagagggtgaggtgcggctactcctccagggacggcaaggaggcgacgcccgccgccgccgtgaaaggcgcgacgtcgatgctcgcggcggcggtgacggcgtcgtcgtcgtcggcgccggcggcgatggcgctggtggatcctcctcggcgtgttcggcctcatctggtcgctctacaccgtctacacctccacgctcgacgacgacgacgagtccggcggcctctccctctgaggccttgttcggttaatccgagaaagagattggagaggggattgagagaataattctacactataataggagtaaaataaatcctctctaaatcctccgctcgcgcgttactcgacacgaggcggcagttaattattttgcattcttagttggtgtagagaccaattgaagttaccacttcgatgagtccgtctactgatcctgcctctatctttttttttttttactgttctgcaaataggcggggcctgcctatgcttgagtgtgcatgtcgaatttggtgtaattaattggagacgtgcatggatattttgtaactaattaagttggtgttt

SEQ ID NO: 15833 - DNA, 1215 bp, Oryza sativa
  ref <308>: DATABASE ACCESSION NUMBER: AK066346
  ref <309>: DATABASE ENTRY DATE: 2001-12-06
gtcttttccaacccaacctcaaacacaaccaatccacctccgattccttcatccgccgccaccgccgccgtcgccgccgccgggatcccgcccgcaaccgcaccgcggcggctccttcccttcctccagaccaaccagattgtgggatcttcctagagagcgctgttgtcctgcacgagtagaatagcagatggcgaggataaagccgaagcaattgctaattcaaagcaagacgaagaaggccccaacacggatcagttactccactatcgttacttggaacctaattgttatcttggttgcgctatccctctatgctacctacaggcattggcatcacaggccaatgctcgagactgaaatggatctccctcgtgctgagcatgttggaagatctgaggattccacgaagactagtagaccaagctatgcggttattgatactgccaaaggctcaattactatagaaatttacaaagatgcttctgctgatgttgtggatagatttgttagcttgtgcaagagtaaccattttaaaggaatgccgtttcgtcatgtcatcaaaaactttgtaattcaagggggtgatttcgatttcaatggtgctgcccaggaatggatactgaaagccaaagccagtggagaaaacgctctaagtccaaagcacgaggcattcatgatcgggactacgaagaatcctaataataaaggatttgatctttttatcacaactgctccaattcctgacttgaatgacaagcttgttgtatttgggcaagttatcaatggacaagatattgttcaggagatcgaagaagttgatactgatgagcattaccagccaaaaacccctatcggcatactcaacatcacgctaaaacagcaagctttgagctgatagcttgttgtccttacctaaaaatgacttatctgtactccaagagggtccatacatcgcctccaattgctgctgaaattgattatgattatggcttcctctagaagcccatgggttgcaaagaaagaaggcgcttaatcttgcctggcagctaaaagcttcttccgtctcatggagtagttgtgtataaatttatccctggtgtcattcggctgtcagtttttgcaggcattacagtgtattttgatgcttggttgtttcattgtaaatttgaagcccatttggatcatgaatcatagaacttggaattcatagtt

SEQ ID NO: 15834 - DNA, 3637 bp, Oryza sativa
  ref <308>: DATABASE ACCESSION NUMBER: AK066347
  ref <309>: DATABASE ENTRY DATE: 2001-12-06
ttttttccgtttgagcggtcgagtcgcaaattccccatccaaaacaccactctcctcctccagtccagtaagcccctcttctcctcccttcccccaattccatccactgctctcaaatctcaatactactactgttctatcgaatcgattcgaaatccacaccgctactacggctaattacgctctctttcttcttctctcgcatcatgccgcgattttcgaatttccctagattttttccgtctcaaagggttagggttttgggatggcggatcggcagcagtcggaggagccggaggagcaggtggacctggagggggacgacgacatcatggacgacgacgacgggtaccgccgccaccgccgcgaggactccgacgacccggaggaggaggatcccgatgagaggcagggggagggcgacggccgtcgggaagacgcggaagggccggggggtgcgggtggggatcccgccgcgggtggcgaaggaggcgccgatgtgatggacaaggttggcggcgatgccgggcccgaggacgaggaggagaagaggaaatgggacgagttgctcgctctgccgcctcagggctcggaggtgttcatcggtggtctcccacgtgacaccaccgaggatgacctccatgagctatgcgaggcgtttggcgaaatttctgaggtgaggttgatgaaggataaagagacgaaggagaacaaaggattcgcatttgtcaccttcaccggcaaggatggggctcagcgtgctattgaggatctgcatgacaaagaacacaaggggaggacactgcggtgctcattgtcacaggcaaagcacaggctatttgttggcaatgtacccaaggggttgagtgaggacgagctgagaaacataatccaggggaagggcccaggtgttgtgaacattgagatgttcaaggatttacatgatccaagccgtaaccgtgggttcctctttgttgagtattataaccatgcttgtgcagactatgccaagcagaaattgtcagcaccaaactttaaggttgatggtagccagttgaccgtcagctgggctgaacctaagggttcatcatcatcagattcttcttctgcagctgcccaggtgaagactatatatgtgaagaacttaccagagaatgcttctaaagagaagattaaggagatctttgaaattcatggagaggtcacaaaagtcgttttaccgcctgctaaggctgggaataagagagattttgggtttgttcattttgctgaaagatcaagtgcattgaaggcagttaaaggaagcgaaaagtatgaaattgatgggcaagtgctggaagtatccatggccaagccattgggagacaagaagcctgatcactcgttcaagcctggaggagctccaaattttcctcttcctccttatggtggctacatgggagatccatatggtgcttatggtggtggtggtcctggattcaaccaggtaaaccaaactaaaccaagtggtgcttatggtagggttggtcctagtatacctaaataccaaacacattctgcgagaaaatccacatataaataggtataatacatatgtataatcttgttgggtcaaatgcttcgttctctggctctttttgtccatccactaaaccctcagtccacaaaatgacccattcttgagcatcgccacttcagctacagtctgcctataaggcccagtggcccacaatgcccaacaccaaaccctagttaaccaatatccagcatctctattcctcaattccccatttccagctacccagctggcagcatgggtgcacggtcacccaggcatggcatggttactgcggtcccaagtgccaaagctgacaggtgcccagggtggcagaacgtcgcatttgccaggaggagcagctgagcaagtagtgtgcctgttgcgcactagttgatctctggatcctgtacaaggacatgcaggtagatggaggagctagcatgtgcgtcttgattctaaatcctaatcttctctgtaatatgtgcatcttgattcgaaattcgaagtttctttgttgatacgtaaatgtgaaatcaaagtatggtacattgtttttttatggaaaactgtggactgtagacaccaaaacaaaaatagaaagatctgtaaccacatcagggcatgttgtaagaacactaacattgacctgtgacggtgtatcaaagcaatccaatagactgttcacttcacatgctcccttgatttgtatgtagatgatgaagttcttagtgttgtctaatgatgataaagcatcatattctgaagttgtgaaaaatgccttgagtctgttgaagattagtcaacatatattgatagtctgttaatgttcttttatacatggatcatgatttttttgcatgaactttccatttagttattagatactacctccgtcccaaaatatatctatttatagcatagtatcttgtcccaaaatgaagctatttctccacctacctcctctcaactaattaatatcattctccttcacccactttcttttttcaatctatcacaaccttcctccaatcattcccatctactttttattacttgtgccaacctaaaaaagcgcacatatgagctgtttgttaattgtggggctaaattatactccctccatcccaaattatagggcgccgctgccccctttttaaggaaaatcaaacttggttgcttttgactaataatcatactaaccatatctatactaagtattatgcatgttatatcactagatttatattttgaagtacttctatgtgatgctaatttcatatttgttgggatcatagaatggaataaaatactagtcaaagtatattattgaagaccgtgtaaaaaaaatataggccttataatttgggacagacggagtagttttctttaatgattttgtaacacctttaaattaaattgcattgtcatctattgtacattgattttggtagttcatatactgtccttttccatgaaatatgctttaagtaactctgaatacccatgctagaaatcctgcatccaccactgcatattgacaatttagtcattgtctctatcaacatttttgttacagcctatgatatatggtagaggaccagcaccagctggaatgaggatggtaccaatggtgctccctgacggtcgtctgggatatgttctgcaacaaccaggtggaatccctcctccgcccccaccgcgtcggggtgaccggagggatggtggcagcagaggtggcgaagggagtcatggccggcgatatcgcccttactagctttttcgttcccttggtcctgccgccatccagccatcacgcaatgtgatggatttcttaacctaaagaaacaagatagaagcttgtaaccctgttccagcataacacctgcaattgcgcaagacatgtaccgtcttcttttttcagttatatttatctgtcatgcatgtggtgcttgtgacttgaaaacagtgtcttgaagctttgtatctcgcggtggcgtctgtagtggtaaaccgatggaattggaaaattatctgcagacatacagttggacctgtctacctctttacatttttttcccc

SEQ ID NO: 15835 - DNA, 2340 bp, Oryza sativa
  ref <308>: DATABASE ACCESSION NUMBER: AK066348
  ref <309>: DATABASE ENTRY DATE: 2001-12-06
ggtctcgtcccaatctactcctcctcctcgcgctcccctcccaccctagggttcgccatggacaagggcgacgtcgccgtggccgtgcccccctccatcgccggcgcctcctcctccggggccaagaagggcaagcgcttcgagatcaagaagtggaacgctgtctccctctgggcctgggacatcgtcgtggacaactgcgccatctgccgcaaccacatcatggacctctgtgagcacgcgcgccgctggccttccgctcgcccccgctccgatctgctgttcctttagattctagggtttcttcttagcttgttggtatggcttgtgatgacgcgggtgcgcgtgcgtgtgttgcgtaggcatcgagtgccaggcgaaccaggcgagcgccaccagcgaggagtgcaccgtcgcttggggtaacattgcttcttcttaatctcccgttaattctaattctgtgccgatgcagcagtagatgtaagtgctgattcagccatgaattgcatggtttcagttagctgaagccggtcttgccctgtttattctgaatttagttttgactttgatttcatagttcgattgagtcaaattaatccatgtgtcaacctgttactgtgctctcagtacacgtcgccttgtgttgtttgtcattggtttgctcatttgataatgatttatcagaatctggggatcgtgctttcccaagactggttatatgctgctaggaatgtttttctctcgaatttcataaaatcctaacatctgttttgctatacgctattttgaatccttcgttctggaattgaggaatgcttctagttttcatgctctggagtattggtgaattgagttgtagtttaatggatcctgcattatctgccgcctctatgtcatttattggtaccagagcatgatttttaatatcgtgtataatatcatttgttgctgatcatgtgatttgcaataccatgttattattagtgattctgataattgcaagttcttgtgatctggagtagttttgactggacatgtatcaaatgagtgcaatgtgattatcttttctattcttttatatgtactggttatattcatagttggaaatttgtactataattatgcatggtttgctatattggtttgtctcttggttttttatctaagtctataattatataatatgtcgcagttagctttggacgtgacatggcccttgtagaatatgttgaatttatctttcataaagaagtatgtagttatgataggataattgaatggctactggctaggagtaccttcttctggattaaccatctactgttcaattataattataccttgaactatgcacacatgaaactcaaatatgataatacagttcatgtctgggtttcctagttcctatgatttgtcaaagagaatcactggaatgtgggttggggagggtgggtgagtgttcatgttagctgtgtcaattgatggaagtgaattcttgcatctggaactagttgaagttagtggtgtatattttcatcaaaggcttttagctacaattgctttatatatttgtatgagattcttgtgtgtggatcttccttggctacccggcatgttaatatgttcttcttctgcccacagtttaatctactttgactgatcttatgtttacagcatgttgttgtttagggatatgtacacttgcaccttctgtgtgccctctggattatatgttcaagtattgttttgaattaaacaatactgacttgcacagtcaaatgctatgttcaatatatttataatactgaagtttctctcctgggggagtattatggaactttgttttctttccgtgtaactggattcttctcgtctttttgtgttgcttttagtggatattgcattttcgcagtgaattaaatcgagctgtgaagtcaactatccatgtactgatgaacaatctatctttgttgtgtcaggagtttgcaaccatgcgttccacttccactgcatcagccgttggctcaagacccgtcaagtgtgccctctagacaacagcgagtgggagttccagaagtatggtcactagacaattctctttcgggggcaaaagcggcttcaagtttctcgtatcaagtattagcactaagtgataactaatgattacgatgggtaggctgcattgttaatgtttcagaagcttgtattttcggtagaaacatatcatgctggtagctcagcgaatctcctcaaacttattttcgctgaaatcaagcagcagttcgtatttactaagtttttttctgctcatgatgttccagcggtataactttttgc

SEQ ID NO: 15836 - DNA, 800 bp, Oryza sativa
  ref <308>: DATABASE ACCESSION NUMBER: AK066349
  ref <309>: DATABASE ENTRY DATE: 2001-12-06
gggctgctcggccgctcctccgcttgctctcccttgcttccgagggctccgccgcacggggtcgtcgcggctagagggtgggctcgccgtcgaggaaggcgggggtgtctggctcatcgagaacagtgccgaggggaatccgggttgcgggggcgatggccatggccgcggcggaggcgcgggtgcggcaggagaaggtgaagaagttcgaggacttcgtcgaccggagactgaagccggaccttgtgaacaccatcgcgcagcgggacaaggtgttccagcagcagaagaccttcttggacttgaaaaggaacatcgaaaatttggagaagaatggagtcaccagtatgcgatccatggtcaatcttggctctgaggtgtacgcccaggcagaagtgccagatacaagacacatttttgtggatattggtctaggtttccatgtggaatttacttggcaggaagctttgcagtttatatctgtaagagaatcaaggttggcaagacagatagatgagtacactcatctcatcgcaagcataaaagcgcagatcaagttggtatgtgaaggtatccgcgaactactcgagctaccagcagagtaaaggtgaaagttggcaatgcaatcgtatgggggtgcttggtagaatgacttgtgcttttgcttttctcacgaaggcatggtcgcccatcttcgaacatgaaagattttacatgtactgttgtgcaaaagatggtttcatacactcatccctgtaataacattcatctaatcagattaactacagtagaatttcgcc

SEQ ID NO: 15837 - DNA, 2352 bp, Oryza sativa
  ref <308>: DATABASE ACCESSION NUMBER: AK066350
  ref <309>: DATABASE ENTRY DATE: 2001-12-06
gggtagccacggcaagcacactgcagcagtgcagccgccatggctcgcccgtcgcagctctacctcctctcctacaactccgtccaggccctcggatggttcgtcgccttgctccgcctgctgccctgcctcgcccctccctcatccgtccactcgtcatacgccgtcgccggcgacctcgtatgcttgctgcagacgtgggcgattcttgaaacgatccatgccgccatcggattggtgcacacgtcgcagcttcttgccttcttgcagtggggagggaggactcacttcgttctcgctgtggttcggcaaatccccgaggtggggaggactgcaaatttctgcttcgtttggaacggatgaattttgcgggattcttggaggaattgaacaaattcatgtgaaaatcccgtagaatttgtgttttttattttgtcatgtgtaaatggaagagccaaccgcaaaaacgaatttgcacttcgacctagtgaagaagggaatttcttccttattataaaatttccaatgatacattttctgttattacctttttacagtagtgcctctcaaggtttcaacttaggtttactaatttagtctcctgtgccaaatgcaggttcagagtagcccttccgtgttcataacgttcatggcttggagcatatctgaggtgtggcacaaaatgatactacatcattttctcctctttttgtggtttgccttgttctcataaaaacaatactgatgctttttgagtacattaaaaaatgattttctatgatgcaatctcatgatataacgagaaatttctggtggaaccttctcaggatgcacatattttgtttctattttactgcacaatgatctatgccaatggagctaatattatttcacctgtttcattcatattaaaatgtcaattacgtgttgaaagggatgatctgacaactacgtttagctgttaagaggataagttgagctggtactactgcctaaggaaatgctagcatgaatagaactgtctgtgcatgtaccaactgaaatccacgacagacaaatatgtttccaagttctatgacacgaaaatacccttttactaacctccgtgcatgtgaacgaaaagcattatttaggcatctacattttggtttaactcaatggtactcagtacttaccttattttgaaataattcgcaagacaatgctatttttgttcagtcttttatctgaagtctaatttcttcatggtgcaggtcatcagatactcacattatgctctgacaaccttaaaagtttgtccaccatggctaacatatctcaggtttgatttgcaaatgaactccagttcccacatccaaggatgcatccacagtattttcttagtagcttctcttaggctcggtgcccagtacacctcttgttttccactattttctggttgttttctattgtttttggtagaaagttacacaattctccattcttcaaaaatatttttggtcacaggtcatttttattttccgtttaaagacaccttgcactgaaaccagcataggaagcagaaagatggacacagtatcatggttgttttaccttctgtcttctaaaagaagttgtaaaattgcaaacttgttgttcaaattacaataaccgtattgagtaagctacagaaagatcactgagctggaactattaactgggatattaaaatgaatcaccatgcatgtcatttttatatccaggttcatctaatattgttcctactccaaaatcgccagtacatcgctgctatgttgattttgtttctttacatgatataataatggatcacaatgtttaactgcagtactactgttgcttaccagtccctagttttaccgcgctgcttatggtcttttttccaggtgactgctgttctcctgatcagagactaattaaccctttctacttatttgcaccatgtaggtacactgcctttataccgctgtatccaattggagtaggcccaggagaaatgtggactatgtaccaagctctcccatttgtgaaggagaggaaactctactctggcttctttgggaagttctccatgagctaccattccttcctagtggctgtgctggcagtctacccgtttctgtggatgaagctgtacctgcatgtgttcaagcagcgcaggtcgaagctggggaaatcgggaggcgccaagaaacgagcctgaagaaaccagctccgtctcgatgctcatacatagtagtacatgatccctttttgaaatttctctttgtttatttatttacgagaaagcatgtactcatgattctgattataatggctaaaacattaagcgcg

SEQ ID NO: 15838 - DNA, 2170 bp, Oryza sativa
  ref <308>: DATABASE ACCESSION NUMBER: AK066351
  ref <309>: DATABASE ENTRY DATE: 2001-12-06
ggccgccgcgtgcgctggccacgccgcctccggcgacctctcctctcgcatccgccatggcggagccgagagctagatgccgagctccccagagcagcactagccccacctggccgcggcgggtggaggcgctgacccatatcctgacccacccctcccactccccgtcgctccactcgcagctcttcctcgcgtcccgcgtgccgtgcccgccaccgggctccacctacccgccgttcctctgccccggcgccggcgacggcgctggcctcctccggtgggcgctcgcctccgtgttcctcccgcgcgccgccaggctatgcctcccgccgtcgtcgtggcggtcccggtgccccttccagctcccgccgccggtcgtgccctccgccgccatcgagccggcgccggagcggtggggcgaggcggagctccggggttacgcgcggcggcagcgggcgcagaggggccccatgagggcgcggccgccgcactccatcgccggggcggtgctcaccatcgtgcccaacgtcgtcatcgtcgcggcggtcatccgcgagctgttctgggtccggcctaaccgcatctgagcccattgaggtacttggcaacgcaggctccattatagctcaacatagattgtatctgatgctggtgattcggtaattagtgcaaccagtggtttgtttgcaaccgactgaatgccttctttattgaagcagagcagtacatgagagctatagattcatgctgtagtacatgacatagatacacatttggggctctatctcttttgaacctgttgattatttatggcgagatgtccactaccgatgttgcttgtggggtcaggaggtgctatgatctcaagttctcaacagctccatcaggcatctggatcaaattatgcgtagggcccatttagcgagtccgttggttacactaaagtactgctgctacaaacctttggcattggtccttggagctgttgagcatacactgcttgcctctttgattgtctagtcatgacaaagtaacggatgttcgttgggataactacattcaggtccgctacatgttgtactggctgccgtcattgggcagagatattttgctgggatatgccatctgggtcaagtgtagcacaatggtaccagtccatattgagtctggatcttatctccacacacattgattctgtggtgttagtcaaggcgaattggtgaagtatgtctagccgtttgtgttgaggaccacttgtatattcctgaatattcactggaaaaacacaaagtttgtagagtcagctctgccatgttgaaatctatgtagtggtttgtagatcatgcagcgactggatgaagcacaaagtttccatcatcttccatgttgaaatccaccatcagattaatctcttgccatgagccagctgcggagttctctcctttggcgggttggctggatgaagggagggggagcctatcaggggtgaaccggtgcaatgcccttgtctaccaaacagcggtgttgttaaatcagacatcaagggggcaggagaaggttttgttgtccatggttctgaatccaaatgcaatgtcacggtagggtgaaggccgtgagttgttcatatgagccctgagcggccaaaaggatgagtttagacttcagagtgcgtagttgacatggaacagagatgactctgaatcatgatttctggctttaggcatgggtatggaactgtaatagttacctatagtttttctgggttccacaagaccgggaggaaatgcttgaccagttaaatttacataggacacccaagcaagtcactggagacaccagtctaccttaaatctgggaagaactatgagtaactgcatgttcttttcaaggttctggctacaagtaacagtggcgcctcatggggacaatcgaggggctaaggcaaccctgaatttattccttctgcagaggttgtccaatttcaaggcatattgttcttgttctcttcttgagagaatggtaaggtaggacctttggtgtcaaagctacatttgttgtaatcaccccctcctttttcttcttgatacaaaaataaacaatattgcctgttctcttaagttggcctgctatctttatttggatagaagtgtgggtacatttgtttgtgatc

SEQ ID NO: 15839 - DNA, 1297 bp, Oryza sativa
  ref <308>: DATABASE ACCESSION NUMBER: AK066352
  ref <309>: DATABASE ENTRY DATE: 2001-12-06
gactttgcttcgcttgggtttcatcgtcgtcccctcctcctccttcctttgacctcggctcgatcgaccatcccgcggaggagacgacgccgcggcggcggcggaggactcgccggcggcggggatggacgtgccgtggctgctggtggcgcacgggtcggtgacggcgctggtggtggtgtccttcctctgcgggcagtggcccatcttcgagggcaccttcgtgcagcgcatcaaccacttcctcaccttcggcgcctaccaccacctcctgcggctcgtccacgcggcgtgcggcaatggggccagggatctcgtcctcggcgtcgagagctactgctgcgaccggcccaacccgatcctgcagattttttacgttgccataataggggtaacatattttataatcgtccagacatctttccagtacattcctgggtactatgtgagtggactgcacagatacctgagtatcgtggctgttgctattggtgctttactcttcgtgctgactagcttttctgatcctggaactgtcactgctgagaatgttttctcaatatctatctgcctatccatatgatggcatcatttttgaggagaaagagtgttctacctgcaagattgccaggccagccagggcaaagcactgtagaatatgtgataaatgtgttgcacggtttgatcaccactgtggatggatgaataactgcattggggagaaaaatactcgctattttgtggcctttttagtttggcatttccttatatgtctgtacggagcggttattcttggtttcattcttgctggtgaattaaaagaaaggaaagttgtctacatattgacagtttattatggcatcgacaattcattctctgggctatttccacatgttgcacagtggctgcttgctgtgcataacacacagatactcttagcggtctttttggctataattgcattgctccttggtgggttttgtgcttaccacacacatctttgcttaacaaatacaacaacgaatgagacattcaaatggcaagactatattatgtggaggaaaaaggtgaacgaggaaaaggctgctgcaaatggtgaagtgcgcaaatcgccaccaagcaaatggaaggcgtttttctctagatcacatactgaggccgatgaaacaattgtgaaaaataacatatatgacagaggcatgattagaaacatgtgcgaggtgtttgtccctttgtcagaacggcagtcattttcccgcaagaaatctgattgatctgaatgctgttgcagctttgc

SEQ ID NO: 15840 - DNA, 3084 bp, Oryza sativa
  ref <308>: DATABASE ACCESSION NUMBER: AK066353
  ref <309>: DATABASE ENTRY DATE: 2001-12-06
gattttcttcagaaacttctctcccccatcatccacaacttgctgtccttgtcttctttttctttttttttttccctcctgctctcatctcagcctctcacttgaactgcagatatatataagcacccagacataaagcaatagtttgagagagagatttagagtttcagagtttcagagaggcagtagaagagaaaggaggatcatcatcttgatctgaatctcgggaagtttttactgtggcctgatgatctgagttcaaccaaggctcgaattttgtaagagaagccaagcaaagaaagtctcgcggagaagagaagaagaagaagaagaagaagaagaagaagagctctctgaccaaagcggcggcggcggcgagcggcggcggaatggaggggcagtcgcagcaccgggcgccggagagggaggggagccacaactacgacatcgagagcacggacgggtccggcgggctgtggcggcggaacggctcgtcgtcgggggcgctgctccgctacaacgacagcggcggcggccgcagcgggagcgccggggagccgctgctgcggaagcgcaccatgaacaccacctcccagatcgccatcgtcggcgccaacgtctgccccatcgagagcctcgactacgaagttgttgagaacgaccttttcaagcaagactggcgatcaagaaagaagaagcagatatttcagtacattgttctgaagtggaccttggtgcttcttattggcctgttgactggacttgttggcttcttcaacaatcttgcagttgaaaacattgctggattcaaactgttgctcacgggtaatcttatgctaaaggaaagtgcaggtatttaactgcatttttcgcttatggaggttgcaatttggtcttagcagctgcagcggcagcaatatgtgcttacattgcacctgctgctgctgggtctggtattcccgaagttaaagcatatcttaatggagttgatgcatattcaatattggcccccagtacgctctttgtgaagatatttggttcaatacttggagtttcagctggatttgtacttggaaaggaaggtcctatggtacatacaggggcatgtattgccaacttgcttggtcagggaggatcccgcaagtaccggcttacatgtaattggctaagatattttaagaatgacagggataggcgggatttaattacatgcgggtctgcagctggagtggcagctgccttccgtgctcctgttggtggtgtcctatttgctcttgaggaagcagcatcatggtggcgaagtgctcttttgtggagggcgttctttacaacggctgttgttgctgtcgtgttgagatctcttattgagttctgtcgtagtggaaaatgcggtctctttgggcaaggtggattaattatgttcgatctcagttcaactgttgcaacctacagtactccagatctaatagcaataattatccttggaataattggtggaatctttggaggcctttttaattttctcttggacaaggttctccgtgtttacagtatcataaacgagagaggtgctccattcaagatccttctcactataacaatatcaattatcacatcaatgtgctcttatggtctcccttggcttgctgcgtgcactccatgtcccgtggatgctgtggagcaatgtcctaccattggacgctctggtaacttcaagaactttcaatgtccaccagggcattacaatgatcttgcatcactctttttcaatacaaatgatgatgccatccgcaacctctttagcaatgggactgaatctgagttccacatgtccacccttttcatctttttcactgctgtgtactgccttggaattctgacgtacggtgttgccgtcccatccggtctcttcatccctgttattctcgctggtgcaacatacgggcgcatagtggggacacttcttggatccatatccgaccttgatcctggtctttttgcccttcttggtgcagcatcttttcttggtggaacaatgagaatgaccgtgtcagtctgcgtgatccttctagagctcaccaacgacctggccatgctccctctggtcatgcttgttcttctcatatcgaagactatagcagataactttaataaaggagtttatgatcagatagtggtaatgaaaggcttgccatacatggaggctcatgctgaaccatacatgaggcacttggttgctggcgatgttgtgtctggcccacttattacgttttcaggtgtcgagaaggtgggaaacattgtccatgcgttaaggttcacaggccacaatggattcccagtggttgatgagccacctctaacggaagcacctgaattggtcgggctcgtgacaaggtctcatctgttggttttgctgaatggcaagatgttcatgaaagaccagctgaaaactagtggtagctttgtccttcaaagattcggtgcctttgattttgccaagccagggtcagggaaaggcttgaaaattcaggacctggacttcactgatgaggagatggaaatgtatgtggatctccatcccgttacaaacacctcaccttatacggtggttgagacaatgtcactcgcaaaagctgcaatcctattccgtgcactaggattgaggcaccttttggttgtgccaaagacaccagataggccacccattgtcggaattctcacgaggcatgatttcgtcgaagaacatatccacgggctgttcccaaatctcaatcctcacaagttccactcgacatcgatgggaggctgatttttaagcgttttgccgccactcgttttatgtgaagtataggaagtgttcattatatgtaatttacaaaattgtgtctgtcatttgttggagagagctcatcatctgtacatcggttgtagcatatcctcttttacaggattcatcttgtagcgtattttgtctcagcttgcttattttgagtctgacaggaagcgctctgtaaatgtagagcaaacattcggaacaccgaaattttatatcataaagttgtgctaaggcatatttgaaagttg

SEQ ID NO: 15841 - DNA, 1608 bp, Oryza sativa
  ref <308>: DATABASE ACCESSION NUMBER: AK066354
  ref <309>: DATABASE ENTRY DATE: 2001-12-06
gagctgctactgctcctcttctcatcgccacgctacctctcaatggaggccttcctcgccggcttccgggcgccgcggccgcgggtcccggccgtctccgccgccgcccggagcctccctcccaacacctccttcttctccggcggaaggcggcgcaggaggcttctttcctcatcggtggtctgcatggcggagccctatctcatagcaaagttggattctgcagagaaggcttggaaggaaatgtcggttagattggctgatcctgatatagtttcggatcccagcgagtaccaaaaacttgcacaatcagttgctgaactagatcaggttgtgagtacgtacaggcagtttaaggactgtgagaagcaaattgaagaaacaaaagttttgcaaaaagagaatgaagatgacccagatatggcagagatgattgattcagagatggagtctctatctaaccagcttgaagagcttgaggaaaaactgaagttactactgcttcccaatgatcctcttgatgcacgcaacatcttacttgaagtaagagcaggtgctggtggtgatgaagctggaatttgggctggtgaccttgtgcgtatgtatcaaaaatactgtgagcgcaactcctggaagttcaaaccagtttccagctcagaagcagaaaagggtgggttcaagacatatgtgatggaggtgaagggcaaacaagtctacagtaaactgaagtttgagtcaggtgtacaccgtgttcagcgcgttcctcagacagagactatgggccgtgttcacacatcaacagcaactgtagctattatgccagaggctgatgaagttgatgtggttatcgatccgaaagatattgaactcaaaactgcaagatctggtggagctggagggcagaatgttaacaaggtggaaactgctgttgatcttattcacaaacctacgggaattcggatattctgtacagaagaaaggtcacaactccaaaatagagaacgcgcattccaattgttgagagcaaagctttacgagataaaattacgggagcagcaggaatctataagaaaccagaggaaactgcaggttggaactggtgctcgttctgagaagataaggacgtacaattataaggacaacagagtgacagatcaccggttgaagatgaactttgaactcactggtttcctcatgggagatatcgagtcggctgtgcagtcctgttcttcaatggagcagaaggaactcctggaggagatggccacatctgtgggcgcagcgaaggtatgatcagcgcgatcgatctgtctgcagtcctccttccacctgagtaccagaccatcagatagaaatcatccaatggacattgtgttgaaacgggtggtgatcaatggacaaatgtacatgaagaaatccgaagatacatatacatatgcttccgttgctcatgagcatgactaatgtcagaaaacacactgatgcattttcagttcctcttacagttacaaattttgagtagttggatatatgcaatgtgtacatctcaacagttgcatagctacaatatgcattatgcacaattcaacctgttaatagatgggaatg

SEQ ID NO: 15842 - DNA, 1772 bp, Oryza sativa
  ref <308>: DATABASE ACCESSION NUMBER: AK066355
  ref <309>: DATABASE ENTRY DATE: 2001-12-06
gggcgtaaaagaaaaatctcccgtctcgtcgtcgcctccgctccttgcgccatctcgcggcgccgatctccttctggcgagccgagcagagcagaccagggcaggggagcggaggggatcctaggtgttgcagtttcttttctcgtggacggtctaaaggtggtgaagaggctgtacagatcacgatcccgcaagtgaggtttgaggatgatgaactaaagggcttgtccgagctactgcggcaggagatctgataaaaccagtcaagaggcgagtctcagaggtgctaggacgagatggatgaagttgctgagattgctgatgctatgggtacggttggcattgataatggggcaagccggaagttgttgtcgaacgagagtttagaggagcgaggagaagagcatgatgtgcaggctgatggggcgcactcgggtgagagtgaggtgatcaaccccgctgaggaggtgggtggagaagccacctcacagccagaagacgtaaagccgcgtgtttccaagggaagccaaagtcattcccctaaggttactaccaaatctcagcgccagagcccacgaagtggagataagagtcaagctaggaaaaacagtcccggttctacttatcccaaggcacccattgcacgagtgtctgacccagatttggttgatagctcttcatgcaatgatggtgctgatattaagaaagctgaaaagagcagtttccgtccagttgccagggcgagtcaatcactggaggactcaaaggaaaagaagaaaactcagaaaacatcaaaccaatgttctgtcaaaaatgatgaagaagagccaaactgtgaaaaagtaaagcctcaaagggttggcagcactcctgcgtacggatttgcattcaaatgtgatgagagagctgaaaaaagaagagagttctactcaaagcttgaggagaagattcatgcacaggaattggagaaaagcaacatgcaggcgaaatcaaaggaaacagaagaagctgaactcaaaaagctaaggaagagtttgaattttagggcaaatccaatgcccagcttttataaggaaccacctcctcccaaggttgagttgaaaaagatccctaccaccagagctagatcaccaaagcttggccgctcaaagaacacaagctcagtaagcactgaagaaagtaccgttccttcaagccgcccagctcgtctgagcctggatgaaagggcctcccagaatggtgtgaagaaggtgcctgctgcgaacacggtgaggaagccccaacggaagtctctccccaaactgccatcagagcaaacagtcactgaacaggtagaaaacaacacgtcggctacagatcccgttcgggagctgatccgtgcccaagttaccccggatgatcaatttggtggatagaaaagctaccaatttgagccgcccaaagaaacgcgcaagttatgcctcaacttcctatatttcattctctgctatttctgctgtaaaactgctggatatgccactactatgtactaaaattagtcctcatcaccaggagtttcgaagaacgcaagtagcccctgtaatgtttatcttgtcaatttttgttcttgatacaagagaggaggaacctactgttgttatttgtagttggtaacaattgcatatgaccatatcctatttcctaggctagaagaacttattatttccatatgaattaccctgcctttttctctttagcaaataagcaataaactttgtgcattctatcttgtt

SEQ ID NO: 15843 - DNA, 1038 bp, Oryza sativa
  ref <308>: DATABASE ACCESSION NUMBER: AK066356
  ref <309>: DATABASE ENTRY DATE: 2001-12-06
tacgaacgagagtgatcgatcgctagctcgccgagatcaccagcctcctcgtcttcttcttcttcttcctctcgatctcgaggagggtgccatgggtaccatggttggccatgtcgcgccgggcgccggcttcatcctcatcggcatgtggcagctgttcaaccacatccggctgttcgcgctgcggccgagctcgtacgcggcgccggtgtggttcccggtgcgcggggtgcgccacctggagctcatactggtgatcgtcggcgcggctatctccatcctgatggagctcgtgatcgggccggcgaggcaccagccgttcgacgacgacgggaccatcccctccaaccacctccacaacttcgagcacgcgtccatctcgctcgcgctgctggtctacgccgcggtgactatccacatggacagggccagggcgcccatgcgcgacgccgtgtcgcagctggtcgccgccgcggcgttcgcgcagcagctgctcatcttccacctccactccgcggaccacatgggcgtggaggggcagttccactggctgctgcagacggtgatcgccgtcacgctcgccaccacggtgctcgggatcccctgccccaggagcttcgccgtcagcctcgtccggtcggcgagcctcgtgttccagggcgtctggttcgtcgtcatgggcgtcatgctctggaccccggcgctcatccccaagggctgcttcctccacctgacgaagctgtacccggaggagccgaggtacttgccgctggtgaagggcggcggcggcggcggcgacggtgacagcgacggcggcaggttcagcatcggagacgacgaggacgacctcgaggccgcgaaaggtggcttcggacacgtggcgggtggcgggaacgccgttgaaatcgagcggtaatttactccgcgattccgtgtcagaggaagaaacaaatgtcaggatggctatgtgattagattgaaaaacgagggcctatgtgtaaataatagtatttctttttaaaaaatatttttagtagc

SEQ ID NO: 15844 - DNA, 2647 bp, Oryza sativa
  ref <308>: DATABASE ACCESSION NUMBER: AK066357
  ref <309>: DATABASE ENTRY DATE: 2001-12-06
gaggcagcagagggaggtggcgcacacggcgcaaaacaactcgtccccccgccccgcaaggaaggggaggcgagacgcgacgagagcccaaaggcaaaagcccaccaccaccaccacgaggaggaggaggagctatctcgccaacaccaccaccaccaccagcgaggacgaggaggaggagagagaggagagagcttcccgtctccgcgcggctcccgaggcgacgccgcctccgccgccgccgccgcccgccgatattggaaggatcccagagggctggagaggtgacctgagttgcatggggagaggatgccagagctgcgaagcagtactcgccaagcacgtctgaggtctaggaagcctgacgaccagaagccagcggaacaggctgcgaaaccagcgttgcctgctccacagagagcaggaaagcgtgttcctccccctgctatcaggggcagaaagggtgctgctgggagaagagggggagcagcaccaaggggtagaagaaaggcggttgaggttgttgatttggaggctggccagggtcgtggagattcccctaaacctgttgttggacaggcagttgttggtgaagcaaagaacgttaaggcacctgaggttgtcgccaataagggtttgcgaatggatggggaaagcgcagagaagcttgttgcggctgacgatgaatcatcactacctgtccctgagaggattcaagtaggtaattctccagaatatataactgacaggaaattaggtaaaggtggttttggtcaagtttatgttggtagaagggtatctggtggaactaatcgtactggtcctgatgcatatgaggttgcattgaagcttgagcatcgaaacagtaaagggtgcaattatggtgccccctatgagtggcaagtttaccataatcttaatggctgctatggcataccagctgtccactacaagggtcgtcagggcgactactatattcttgtcatggatatgcttggtcccagcctttgggatgtgtggaattcattagggcagacgatgtctccacatatgggtgcttgcattgctgtagaggccatttcaattcttgagaagctccattctaaagggtttgtgcatggtgatgtgaaaccagagaactttctgcttggccagcctggatcacctgacgagaagaagctttatcttattgatcttggtttagcatcgaaatggagggagtcatcagggcaacatgttgattatgaccaaaggcctgatatctttaggggtacaattagatatgccagtgtccatgcccatttaggccgtactggtagtaggagggatgatttagagtcattggcgtacacccttatatttctaataagaggaagattgccttggcaaggttaccagggtgataccaagagtttccttgtttgcaagaagaaaatggctacttctccggagatgctaagctgtttctgtccacctccattcaaacagtttcttgaagttgtcacaaatatgaaatttgatgaagagccaaattacgccaaactgatttctctctttgatagtttgattgaggtacctgcctcaagacctatcagaattgatggcgctcttaaggttgggcagaaacgtggaagaaaccatgaagaagatgagcaacccaagaagaaagttagattaggtagcccagcagctcaatggatttctgtttataacgccaggcgggccatgaagcaaaggtaccactataacgtggctgacaacaggcttcagcagcatatagagaagggtaatgaagatggtctatacattagttgtgtggcgtcttcagcaaatctttgggccctcataatggatgcaggaactggtttcctttctcaagttcatgagctctcaccagtttttctgcataaggactggataatggatcagtgggagaagaatttctacataacagcaatagctggatcagctaacggaagttctttagttgtgatgtccaaaggaacaccttactcccaacagtcatacaaggttagtgagtcattccccttcaagtggatcaataaaaagtggaaagaaggttttcatgtgacatctatggccaccgctggaaatcgctggggtgtagttatgtcaaggaactcaggttactctgaacaggttgtagaattggatttcctatatccaagtgaaggcatccatcggcgatgggagactggttacagaataacctcaatagcagcaacaaatgaccaggctgcttttatcttgagcataccgaaacggaagccagtagacgagacacaagaaactctccggacctctgccttccccagtaatcatgtcaaggataaatgggcgaaaaatctgtacatagcatcgatctgcttcgggcgaaccgtctgttgacggtgtggctggctggctgccttccattgaagttgaagcgattgccattcgagagatgaggagatctgtagatggaagaggattcgcatgatcattgggctagggagcattagaagtttcggtattttgcaactgtaaagaaatgttgtattaccggatgccggccttgtgggcctttttccataaaagaagctaacacattcttgcatgttgaaatcgatatctctgcatttttatc

SEQ ID NO: 15845 - DNA, 1141 bp, Oryza sativa
  ref <308>: DATABASE ACCESSION NUMBER: AK066358
  ref <309>: DATABASE ENTRY DATE: 2001-12-06
tggtctggtattttgaaacggggaggcggaatgctcgaccgatccctcaggccgccgcagccgcagcaggcggcggcggaggcggaggcgggccccggcggtggcgagggaggggggaacgtggatcgggtgctgttcaagaacctcgtcgagatggtgccgctcgtggagtcgctcatggaccggaggtcgaacccgtcctactcgaggcgcgcgtcgatggtgtacacgccggcgccggcgaagaagggttctgatttgaagagtgtgaagtcgccgcaaagtgtgtcggtgaaaaaacggagggatcctggagagacgggcaagaagagcaccgccgactccaatggtgagaatggcgcggttgcgccagtcggtctgttggggggagaaaataaacccaaggataaggatgagatcgttttgctgcgtgagcagatcgaagagttgcaaaagacgctgcttgagaaagaggaagcactgaaatccgcggagagtttggtgggtgagatgaatacattatattcgacagtagatgagctgagacgccaggttgctgacaaggaaggtttgatcaaatctatcaattctcagctgcacaatgcgaagattatgcttgcagacaagcaagcatcattagagaaattagaatgggaggtgaagacgtcaaataagaaagtagaagatcttcaaggggatgtctccaatatggagtttgagataggttcgttgatggcattattcgaaaaaatttcggagaatgtttcaggtgaactccaagatggtagcttgccatcatcttttgaattggaagcacttcaatcaactagcgaaatcgacaagattgaggttgagaagatagagcaagaagcggttacatatgccgaagctcttgctgcagcaagagagaacccaaacgaggagcagctgaatatagctgcggaagcacggttaaggctgcaggtccttgtgctatgatgcgccaagtgcatattgtagtgtatgtgtatgataatgtcgaatcgctgatgtaattatgtgtgcgtgcttgatcgagtttatttcatgtgagaccgtactgacggtaatcgatcaagcaccagatactggacacttatttaattggagatgatgtttattc

SEQ ID NO: 15846 - DNA, 2306 bp, Oryza sativa
  ref <308>: DATABASE ACCESSION NUMBER: AK066359
  ref <309>: DATABASE ENTRY DATE: 2001-12-06
gacacgcacgctacctctctctctcgactcccgagcaggcgactcctccctccccggcgattccgccgctccgaccgccgtctctccgcgccgcgcacgtgagccccccgtcgccttcctcgcacggactctgcccccgccggaatctcatctcctacgcctcaaacccccaccccgcgacgccgcctagccgcgattttcctgcggggtactccaccgcccctggaggctggagccgtgctctccggatcggcgttggattggtagcgctcgcgtcctgctctgtcgggcggcgatatgaagccccctgcatcctccgccgccgctgccggcgacaagggcggcggggtcgacccgtctctgccgcggttcaagtgccaggagtgccaacgcgcgctcgtcgtcgtcggcgtcgagtccttcaccgataagctccccgctcatgccgtctccggtatgaacgtgtcctctgttcagggcagcgttatgggtgctagcaggatggacaactcttatgtcgtgctatcgaagcaaaatagatcacatagccatggaattcccccacgcccgccaagcgcagggatcccgcgtgccgagccgaaccaaccaacaagagcaatggagggatcatatatagtgcttccacctgctgccgcttccatatacaagacatctgcctctgaaggaggtggtgcgcagttgtcaccaacaagtatgaaccccggtagccctttaccaggaaataattttcactctagcgtgactgtattaaaacgggcatttgagattgctacatcacaaacacagattgaacagccactctgtctggactgtatgaggttgctgtctgataaaatggagaaggaaattgaagatgttaatactgacaataaagcttatgaggcctgtcttcaacgtctggagcaggaaacctataacatcctcagtgaaactgactttcagaaggagagacaaaagattgaggaagaagaaaagaaacttaaagctgcaattgaggaagctgaaaagcaatattcagaaatttgttccgagatgaagtgccttgaaacaaaatctaaacagttcgaagaactggaagaaaggtattgccatgatctcaatagctttcagtttcagtggatatctcaccaggaagaaagagatgcggttttggccaagatagaagtttcgcaggttcatctagaattgttaaagcgtacaaatgttctcaatgatgcattctatatttcacatgatggggtgatcggaacaataaacaactttcgtcttggccgccttcctaatgtacaggtggagtgggatgagataaatgctgcttggggccaggctgctcttctgttgcataccatggctcagtacttcttcccaaaatttgaataccggatcaaaattcaccctatgggaagctatccaaaagttacagacatcaaccaaaatacatatgaactgttcggtcctgtgaatttattctggagtacccgatttgacaaagccatgacatggtttctgacttgcttgcaagaatttgctgattttgctgttagtttggataaagagaacaatgtaccacctgacaagtcattgaagctcccatataagattgaaggtgacaaagtagggagctatacaatcttcttaagtttcaataaacttgacaattggacaaaagcactaaaatacatgctgtgcaacttgaagtgggttctctactggtttatcggcaatacaagttttgccccaccctctggatctttacacgtagcacagtcttccaagggatgaagtcactggcttgtgatgctgattataagcgcatattggcaaatggcattgactaggctcgtttgtaatttacagtagtacatacagctagttttttttttccttttggccgccttcagttgtacttcctccgtttcacaatgtaagtcatcatagcatttcccatatttataatgatgttaatgaatctatatagatatatatgtctagatttattaacgtcaatatgaatataggaaatgctagaatgacttacattgtgaaacggggggagtatatatggttgaaatctgcacaggaaaaattgcagatgatggtgcaactcagcttatagtcggcttgatcattattcatgtaattatttagccatgtgtgacagaaaatgcgagtgatacgagatcctagagcaattcatgcagctctggttaggtgagtttgtgatggtgcaatcaacagcatatccaatcaacattaagatttataagagatgaaatgtcttcagc

SEQ ID NO: 15847 - DNA, 3148 bp, Oryza sativa
  ref <308>: DATABASE ACCESSION NUMBER: AK066360
  ref <309>: DATABASE ENTRY DATE: 2001-12-06
ggtttgcctccctggggggttgtggtcgctggttcctcgacccggaattggagcgaattggcgcgggaggggaatgggatcttgccaccttggccctccccacctcccgtgcccttttcgggggcgtgtcgccgtgttcacggggcactagccatgatctagtggaggcaattttcgttattgcagctgtttggtgggttgaatgaatgaatgaataaagaatgatcaacctgattgatttgagcgccggagccagcgccagggttgccacaagagatggttccccagtgcgagaaactcaatcggaacggaaggagtatgctgatctcaagacagtgactggcagcgtgcgaaggagctcgtcagatagatcgtgtggtagtggtacacccatgaaagtgctgatagcgcaggagatggcgaaggagggggacacaaatcaggagaccactagtgttgtagctaagctgatgggtcttgatgatgatgcagcccttcctaagcctgttcaaccttccaacaacaggaggagatttccagatggccatttgtctgctatgttggcaagagttaataaccaaatgtcgtttgacaaccacacaggcttcgtcgaaaatatggaatataaggatgtctatgaagttggataccagccaccaagctgtgaacatttgagcaatgaattcccacaaagaagaagaccacacgaagatcatgacaagaaaagaatggatcttgtccgccagaagtttgtcgaagcaaagcacctagcgtcacacgagaatcttctccaatcaaaggaattccacgaagctctcgaggttctcaattcaaataaagacttgtttctcaaatttctcgaagaacctaactcgctctttgcgaaacaatccggtgaatttcattctgcaccaacatcaccccagaggaagcgcatcactgtattgaagcctaccagatcagtggagttgaaaggtgaaaaggaaattaaaaggcagcaagaccagacagtcaatggaagtagagtagagagaagcaatactcataggaggtctcattcaggcggcggtcatgccaaagcagaaaggcttccacaacacacacgaatagtcattttaaaacctagcactgctcttacttcaatggagcattttcagaaaaatgggcatgataacctggattattctgaagcccctgttatatcaaggcatttgagtgatgaaataaattggtcggcacaggacatgtgccaccaacatgatgaatcttttcgaggttgcatgcagtcaaatatgttcatcagagatagagtgtactatggatatgctgaagaagagggtagtagcttcagtgactcggaaattggaagtccaacatcacgccattcctgggagtacatataccggtttagcaatccttacttcggctcaactttaagccatgcttcttgttctcctgactcgcttgtaactagggaggctaagaagcatacctctgataggtggccaactgtatcttctaatgagattagccaagaaaaggtgctggtgcggaggagcttgagcacactcggtgaaatgcttgcgatgtctggtatgaagaaaaaaggggctgctgaacaagtggtcactaataccagcaaccagttgtgcagcaatgaaccaagacttgcagtaccatctaaatgttctgttgatggagacggagagagctccctcaggaaaatttcaaggtcaaaatctgttccagtctcatcagcagcctttgacagcctgaggttagatgatggatgctcaaatcctgaacatgaagaacccacatcatcaaaagaggagatcaaacccaagaatggcaagtcatctctcaagggaaagatttcaagtttcttcctgaaacgcaagaaatcaggaaaagataagcttgccccatcccccttgggggccttgggtaccagagttccgttggccagtaatgcatcaatagttagctcagatgtatcacagactgaatggactagcttacaagatgatgttgcttcagaaaatttagagaagtttgatattgcaccaacagtagttccggtcaatgaacctgaagcaacttcttcatctaagcctcccataattactcttgagaaagcactctcgtttgagatccgaaattcccactttgatcagcccagccctacatcagttcttgatgcatcatttgaggatgctagtgagaagtcacccaattcatccgagcacgcaattatcgctaaacaagaacctctatcaagatctcttcctattggatcaatcgcgcggactttatcatgggatgattcttcacaagaggctacattgtgttcagccaaaggagatagccacgaacaagatcaacacgaatttgtcgaaaagattctatcttctgttgggttcgacaacgaaaagaccagcgatattttcgtgcggtggcattcgcatgatttccctctaggcaccggcgtgcttgaccagttcttggaacgcaaggtggaggatgccaagtgcagggagaggcggtcaaaccagaggctcctcatcgattccgtcaatgctgccctactagacatcggccaaagcaagctttggggagcttacccttgcactgacccacaagttaacaatgcacggagagttgccacaggcgaggtgctggttgttgatgaggtatggaggttagtgaaaggctggctctcggacgatgatggcgagaaacatatggtcaatgcggaggacaatgcggggttagtggctgattgggttgtcggcaaggagattcaaggcaggtcatggcccgaagcactgcggttggaggtggatgaaatcagcacggagatatgtggggaggtcctggacgagttggttggggaggcattttcagaactagttgggtgtcattgaagctgaattttattttccctgcctgtggtgtccacctattgcttttatttccaatctggtggagaccaaggctcatgtgcactcccctgaggctcttactcttgtgtatattgccctcattactgctctgtatgctcaagatgttcccactccctctctgttaaatgtcactgccattcatacattctacagcaataacgtttatgaatcgatacagctgc

SEQ ID NO: 15848 - DNA, 1548 bp, Oryza sativa
  ref <308>: DATABASE ACCESSION NUMBER: AK066361
  ref <309>: DATABASE ENTRY DATE: 2001-12-06
gtccgcctctcctctcttcctccccacctccgtctcctctcttccgcaccggcgaatccccaggcgagccttctagaaccttcgattgctcgggcgggcctcctcctccgcgagccgcagccatggcgaccgtcatgcagaagatcaaggacatcgaggacgagatggcaaggacgcagaagaacaaggccactgcacaccatcttggtcttctgaaggctaaacttgcaaaattacgccgtgagttgctgactcctacatccaaaggtggtggtggcggtgctggcgagggatttgatgtgacaaaaagtggagatgcacgtgttggtttggtgggctttccttcagttggaaaatcaacattgttgaacaagctgacaggaacattttcagaggttgcagcctacgaattcacaactttaacatgtattcctggagttataatgtacaaaggggctaaaatccagcttttagatcttccaggaatcattgagggtgctaaagatggaaagggtagaggaaggcaggttatcagcacagcaaggacatgcaatgtcattctgattgttcttgatgccattaagccaataacccacaagcggcttattgagaaggagcttgagggatttggcattaggttgaacaagacaccccccaatttgacatttagaagaaaggacaagggtggcatcaattttacatcaactgtgacgaacacaaacttggatcttgaaacagtaaaagcaatctgcagtgagtacaggatacacaatgctgatgtctcccttagatatgatgcaacagcagatgatctcatagatgtgattgagggaagcagaatttacatgccttgcatctatgttgttaataagattgatcagataacacttgaagagctggaaatcttggataaacttccccactactgcccaattagtgctcatcttgagtggaatctcgatggtcttctagagatgatctgggaatacctggatttggttaggatatacacaaaaccgaaaggtttaaacccagattatgaggaccctgtaatcgtatcctctaagaagaaaacagtggaagacttctgcaacagaatccacaaggacatggtgaaacaatttaaatatgcattggtgtggggttctagcgtgaagcataagcctcagagagttggcaaggaacatgagcttgaggatgaggacgttgtccagatcatcaagaaagtttaggtatattgtagtggtcacgttctgcaaacctggaaggaggtatgagctatgagaattttgagaagcagtcacttttactgcgtgttattttgctagctatgatgcccatagatgattggctgttcccatgaacgtttcaatgcaatcaaaatgtagacggacagattttccttctgtcaagttagccttgtaattgtgatctttgtctgatcttcctgttgctatatatatggtgagtcaccgatgaacacagcagttgaacacatggaaagatgctttgcttatcttcagaaagatgaaagatgattcacatgct

SEQ ID NO: 15849 - DNA, 3003 bp, Oryza sativa
  ref <308>: DATABASE ACCESSION NUMBER: AK066362
  ref <309>: DATABASE ENTRY DATE: 2001-12-06
ggtttctctattcgcatgttcaatactcaatcttgaacccttatacattgctttcatttatctgatgacatttacatataaatctctgttaatagcattgtcatttaatgctagcagctctgcattattcattttcatttgccacttgtgatgttcacctcgaggaaatcatttataacatgattttaattggtgtggaagcaaacaaagcatactgctagattatagtataaacttgtgaaagatatatttcctttgccttgtttatatcctaatagattaattgtgtttagagaaatacctgagctgaaaatgctatcgagattatggctaaaagaatttgattttggtagaatatataagagggaacaaaaaaatattcatttcacaaaagtcgtgtgtgtgcatgtatctgcgcataggcattttttttagcaaaaatactatatggtgattcttttacaaattgtcaatccattgttccatctgtgtaatgggactatctttttccctatggataatcatggcaaattcatagttgaagcgatgaaaacagatctacatgtaactagccatttgaaagtataacatatcaattttgctgaacgagttaaaaatgaacttttgttactggagtatccttggatttttgtgaagtaatcgacataaaagataattcctaccaaatttatttagcttttgcaactagccattaaaaaatgtgccaagaataaactgcaaaacacaatcctatgttgtgtcattttgagcatgtgcaaaccaacaattgtactcaccgatatcctttgttgataacattcactttccttagatggttggttgagattgtaccttcagcttcagtattgttcgtcttaaggaaactaccgactaaacggggaatcacacagcaccatccaacattaggtcaatctgggagtccccaatatgtcatttcaaattgttcagctactctatgtgagcagaaatgcaggttgtccgatacagatgaaccatgaaatcctattgattgaattgcacagttgcttgatttgctttgtatatgtactggttatgcattttgttctcatataagtaatgttgagtgccaaccccagtttgtagaaatacaaatataaaatgtatcccagtgatatttccactttgaatcgtttataatttggaccacatgattgttctatacaactttttagttgttatttgttgcatgcttacaatatctaatactggaaagaaaaaatattaaaattgctaaggacaaaagaaattacatacaagttacattcttttcttgtttcttaaattgtagtaccatatcacttatcttaagtaaaaccatgttctgttgccacttattaacattttttttcaaaaagaatccattaacaaaaccatggtatttcttcaccgtttgtaattacatatataaaaaagttaatattttgcatggagctgttgaatgaatatttccttgatgtttaagattcttaaaactatgtagatccgagtggcaattttcactttggaggtatgcaactgatcctctcattctattattttttacattatacaagggtctatccctataaagcttattctacagacttgtctacattatgcttgaatggaaaattcatctagcctgcaactcctacaatatctaccatacagatcttggttatagtcatacacttctgctagacctaaaaactcatgggacaatatgtaatctgtattgcattggaatattggaattatttcttaccgctaacttaattcatacactagctaaatgtaagataattggaattatttcttaccgctttgatctaatagaggaagtatcagcgtaaccatttaagtaaaacaatctttttaccccaaatgataggttgatcccaactctattagttgcttatattcacaacatttccttccattgcaatatttctttatatacaatttggtttaaattaatattttcatctatatttgtcatgttttgcttatcagtgccctcacacgcctgttgatatatgatatattatatagtttttgttatgtagacatcacatggtttcaattagattacaaccatatttgaattatcaagatatttgctttgcatgatctacaatgtattttagctttgaaacagctgccagtatcattgttttctatttgcaattagaatattggcagaataatatggccacttcaaattttcacttagttctattgcttgacagaattaatgtggtttggttgggttggtccaattgaaagggttgctgtcattctgctctgtttactggtgacgcattggcttggaaattaagtcttcagccagcttttgcgcaaaacaatttagaataatttttgcttgctataattttatttgtttgtaaaaaattgtgtcaaaaaaatgtcacagaattgctagctattttgcagttctaactaggctagatgactctattgtagttttgaactgacatactgaagtttttcgtctcagtcattctgtgatcccaaacaaaatcagcatgatgtgtctcagtatgctacccattgtttccagcactggctttccgtggcaatagaaggaaagacaaatcttgaggataacctgccattccttccagtgcgtcttaagtttaagagttggaagacaaatcaatatcagagtatgggaccatgttgcttgcagccaccgatcaattgtgcctaaattaaatctgaaggattatcaagaagaaaatataaattctaagaggcatacttatattatcgcagctgctctatattaccagaaatgttagccgctagctttagattatctgtgcaagttggctttctcttccattgattctattgattgtattgcataggtgcttcatctgctttgattctgtaccggatatgagttctcagatcagtaatgtcgagttctatatgaatatagcaccagcccaagtttgc

SEQ ID NO: 15850 - DNA, 1655 bp, Oryza sativa
  ref <308>: DATABASE ACCESSION NUMBER: AK066363
  ref <309>: DATABASE ENTRY DATE: 2001-12-06
gcctgtaaaaagggattccggtcaaattgcagatggaggcaacctaaaatttgtacacttgttttgtagtctctggacaccagaggttgttgtagaggacttgaattcaatggaaccagtcaccaatgtaggagatatccaagagaaccggacaaaattggtgtgcagtctttgcaaggttatgcatggtgcatgcattcgatgtagccatggagcatgccgagcctgctttcatcctatatgtgcaagagagtcaaagcatcagatggagatatggggcaaaactgggaacaccaatgttgagatgagggcattttgcttgaagcattcgacagtccaagaaactatctcaatacagaatgacagaatatgtgctgaagaggatacctcacaaatcgagcttgatgatgcaagccttgccactcagaagattcaacaactgagattgacacgcaataacaaggacaaatttaccagcagcatgattgctagctcttgttcgtctagcctcaaacagacaacagaattagccacatcgccatctactgctaggagtgtggaaagtcaagaaacccaaataacagatatggctgttgatcgacctataggagataggtgtcttgtgagcaactcgggtgatgtctctacagctcttagaaagctaattgaccaaggaatggttaatgttggtgatatagaatcagaattgggtgtgtcttcagaatctttggaagctgctctcgtgcctgaaacatcgaccttctcccctggtctgaagttgaaaataatcaagttactgcaaaacaccattcgtgtaccttctgttcaagagaagtgttctaaagagggttctttggcactacaaggtactgtgtttacaggtgagagtaagagcttaactgatacacaaatttgctcagaactggaggaaggcatctcttcgtttgatcattgctgtccagagggcgataatactaacaaagactgggctgattcagtagaaaatggtttccacaattgtggtgaagattgcatttctggcaaatgctttctcaaccaggatggttcccgatgttatgttcatccattcatagagagaaagttgcggattttgtgggaccatatttttaagcaaaacaagcatccaatacattgtcatgagcaatcaacctgtgatccacatgatcgaattgctggtagctcgtcaacaaaacttgaacagctagcagacatagctgtagcagatcaagtttctaaagcaaaatcatcaggtattctggagcattcaccccatgatgaaatagaaggagaactacttcatttacaatccaggctactagatgatgttggtggtgcaaagcagagatatgaagatttagtactgaagattgtccagtctctttctcatgacttggattctttcaataagagaaaatgggaccatatcattgcaaaccagttcctccgcgacttaagggaagccaagaaacgtgggaacactgagaggagacacaaggaagctcaggctatcatggctgcagctgcgttgtattttacctacctcacgaaatgcaccagttagaaaagtggcagaatgtgatgtactatctgccaaacaagagtctgttcctgttgcagtgcctgccaagcaagag

SEQ ID NO: 15851 - DNA, 1257 bp, Oryza sativa
  ref <308>: DATABASE ACCESSION NUMBER: AK066364
  ref <309>: DATABASE ENTRY DATE: 2001-12-06
gcgcgcgtcttcctcctcccctcgggccgcgtcgctcttccaatccaacccactccgagccagattaagggagaagagatttcctgcgaattcttcgaggaattctgttccaaatcgagtatgaaattcgggaaggatttcaggagccacctggaggagacgctgccggcgtggagggacaagtatctggcgtacaagtccctcaagaagctaatcaagaacctgccccccgatggagatccccctcccgtcgccgcggcggcggaggtgcctgcgggagatggggatggggatgggggcatcgccctggggaactggttcgccagggtcctcgacatggagctccagaagctcaacgacttctacatcgagagggaggagtggtacgtcatccgcctccaggtgctcaaagaaagaattgaacgtgtcaaagctaagaagaatggggcttttacatctaagagcgaattcactgaagagatgttagagatatgcaaagcttttgtcatcatccatggggagatgattcttctgcaaacctatagctccctaaattttgccggacttgtgaagatactgaaaaaatatgacaagagaacaggtggtttgctcagcctacctttcactcaacgtgctcgacaccaaccatttttcacaacggaacctttaacaaggcttgttcgagaatgtgaggctaatcttgagctcctgtttcctatcgaagcagaagtacttgagtctgctagctcctctgctaagttgcaacctcagaatgatgatgcggctagccatgacccagcgtcatctgtcgatgttgaaacctcggacgtgtaccgaagcacactcgcggcaatgaaggcgattcagggcctccgcaaagccagctctacttacaatcccttgtcgctcgccaggttcttccatggagaggacggtgaagcctgctctggagccatcacctctgaaagtgattcctattctgattcccagattgaagatgctgaagatgatgataaagaggtgcaatcaagggagcagaatacggctcaaaatgctgcagaaggccagccacgtgatgaatgatccgtctttgcattgtgctgtttaatcctccgaggccctgataagtgcaaatgatacagctgcggcatacactaataatcttgatccttgaaatgtataaccattactgatcttcccaatggaactcttttcctttttcttttcgctcgtagatatcaaagttggatttatatt

SEQ ID NO: 15852 - DNA, 2453 bp, Oryza sativa
  ref <308>: DATABASE ACCESSION NUMBER: AK066365
  ref <309>: DATABASE ENTRY DATE: 2001-12-06
gatccgcctctcattctccgtctcctctccccaactcctcgcctcgccatggcgccacctcccctgcacctcttctccccgcatgtcccctcgacgtccgtctccccgccggaccccgccaccgaggcccctccggctccgaagcagcaccgtgggcccagaccggcgccaagaaaccccggctccgccaagcccctcaccgccggcgtccccggcggccgcacccgccgcgcggtcctcggaatcatccgcaaggtccgctccctcgagctctccgacccgcgcacacccagccccaatggtggtggtggtagtagtagcagtagcaccgcgaccgcgcgcgtccccttccacctcccgatacatccgccgccgccggagcgggaggaggaggaggagaagaaggggattcgcagggcggtgccgtgggccgcggcgagggacgaggagaccaaggtggtgctgcggcgggagaagaagacgcgggtgccgacgcgcgcggagacggagctggaggccggcgagctggagcggctgcggcgggcggcgcgggggaaggagcggtgggcgcgggccaagaaggccgggatcaccgacgaggtggtggaggaggtgcgggggcagtgggcgaagggccaggagctcgccggcgtgaggatcgtggagccgctccggcgatgcatggaccgggcaagggagattcttgagattaaaacaggaggcttagttgtttggacaagagggggcatacattttgtgtacagaggaagcagttacctagaaaacgcaaagcggcatcgtgactttgttaattataatgaggaactttccccagtaacatctaacaatcctacatcccaagggaaatattggagtaaagatgtaactttaaccaatgataatgatgaagctgatgataaggacgacaaacctatcaagggaacactatatgaaagagaagtcaacagactactggacagtttgggccctcgatttatcgattggtggtggaacacaccattgcctgttgatgctgatctccttcctgaggttgtccctgacttcaagactccatttagacaatgccctcctggtgtgagaccagcactagcagatgaggagctgacctacctgcggaagcatgcacggcctttgccaacacattttgtcctaggtagaaatacaaaactgcagggtttggctgctgctatactaaagctttgggaaaagagccttatagcgaaggttgcagtgaaagtgggtatccaaaataccaatcatgaacagatggccagaaatcttaagcgtcttacaggaggaactgtcatattgaggaacaaggattatattattatatatagaggcaaagattttcttcccggtggcgttgctgaatcagttattgaacgggagtctcaggtacatgaccagcaggcgaaagaagaggaggctcgattaaagatggctgactcacttcaaatgattgttggactatcatcggagagaagttatgtgggaactttcagagagtatcaggatttccatgatagccatgcacgtagaacaactgaaaacaacttcagaattcaactagaggcaaagaagcatcgattggaaaaggaactgaaagaccaggaatggagactttccatgcttaccaagaagattgaaagatcaaaccaagtgctggcaaagcttcatagttcttggagcccttcaaagaaagatggagacagagaactcttgacagaggaggaaaggaggatattccgaaaaattggcctaaaaatggatgaacatgtgctgcttgggagacgtggtgtctttgaaggcgtaattgaagagattcatcaacactggaaacataaagaggttgtgaaagtaattaccaagcagaaccaagccagccagatcacgtacacatctatgatgcttgaggttgagacaggaggcacattaatagcaatagagaggttcactaccagccatgccataatactttaccgaggaaagaattatcgtcggccaacaaaatcagcacccagtaatctcctgacaaaaagagaagcattacaaagatcaattgaggttcagcgacgagggtcaatgaaatacttcgctcaggagaggaaaaagtccattgatgaattgaagagagaactgaggaatgtgacatgggaaatcaggaagctaaaccatgatactgaacagtcttggacagcatgatcgctatcaacattgaagattggaataacgattcatcctctcttttttttttcgtttttaacatgataactacaaagaacaaagtacacagaggccactagatctggtaggtatggtagatatggccacaatgaattatcttgcaagtgtgaagatgtttttttttttgtttatgtacatgtgatacactaaagcacatgagagcagaatcattcaatttggctctg

SEQ ID NO: 15853 - DNA, 1420 bp, Oryza sativa
  ref <308>: DATABASE ACCESSION NUMBER: AK066366
  ref <309>: DATABASE ENTRY DATE: 2001-12-06
ggcggactcgctccctcctcccctccgccatcgcctcgctcgcgcagcaatccgcgacaaatccaccagccaatcgcggcatcgcgcccatcccttcccctatactgcaaatccgcttccccgagatggaatcctgtccttcggtgaagaacattcttgtgctggattccgaagggaagcgcgtggcggtgaagtactacagcgatgactggccctctttgtcctcgaagcaagctttcgagaagtcggtctttgctaaaacccagaaaacgagcgctagaacagaagctgagatagtaatgtttgacagttacttcgttgtatacaagttcatccaagatctacacttttttgtaactggaggtgatgaagagaatgagctcattttagcatctgttcttcagggcttctctgaagctattgattaccttctcagaaacaaagtgcacagaagggctgcgcttgaaaacttggatcttatcttcttatgccttgacgaagttgttgatggagggtaattactatgtttgcattgcaatatgctaacctttgctttccatcaattgaacaagcccagttttgataactatcacatttttacgttcatatcaaaggcaacagacaaggtcttgggcttgtattgctgaaatgtgaggttaggcactagttggttaatgtaaagaaactacactctggccttgtttaggtgatgagaattgagccagaattttacacaaaatcagcattgacagctatcagttatctataatatttttatagttcattgttgggtatgctcagttcacagccaaccaattttcagataaacatttgcacaaatgctatgctaatgtagaacatctacaatcaggcatattaaacatttgacaacctgtagttattgattgacgctactaattgtttcttcacaatcgggttttgcaggattgttctggaaacagatgcaaaggcgattcttgaaaaggtatcaggtcatggattggaaggatccgggtctctcactgagcagaagttaagcagtgccctagcaacggcaagagaacactttgcgagatctattttcagctgatggcgtgtcatccttcaggttgacgatgagcaagcctcagatagtgtctctgttagcagatcagtactcccagtttgcaatgtcctttgaacatttgccacgggttagtggtaggtgcagcttaactggcgatcattgtcatcctaagaaggttgtggtcggcacacttgttactcttgtggtttcatgtcgatcttggctgtaatcgagcacagtaaccatgtagcaacatgtttctgctcaaagacgagccagtttccaaattgtcttcagtatacagccgccatgttttgacgtagtactacatacatttacttcggcctggtttgg

SEQ ID NO: 15854 - DNA, 1053 bp, Oryza sativa
  ref <308>: DATABASE ACCESSION NUMBER: AK098955
  ref <309>: DATABASE ENTRY DATE: 2002-08-28
tggatgattgggtttggcattgggggcgtcgcaggagccttgcccttggtcctccgccgcactcgcacctgcacccctcccccgccgatggcgatgaccccactccaccacacctgctccttcttcttccgaccacaaccctctcctagtctctcccactccccatgcgccgccgccgccgacgacgacttcttcaccgtcgactacgacccagaggaggagaaagaagaagacgaggagggttctccgtgggagggcgcggtggtgtaccggcgggacgcgtcggttcaccacctcgagtacgccaccacactggagcgcctcggccttggcgacctctcctccactcactctcgggcgcgcgccgccaccatgggaatcctcatcctctcctccaccaaccttaccggtaccaaggacgatgacaccccggtgctcgtctccctcgacgttgccaggcgccgcggccgcctccgcctcgacggcatcgtccgcactgtcatcaccctcggttgctatgggtgtgctgagccagcgcctcaaggtatatttgccaatttttccctcttactgaccgaagacagagtagaggaacctgatgtggttgatctcggcacgatatttgaagaagaacaaaccaaagctccttcgctaaccggaagccaagaagatggagacgatgaagatatagattgggatgaccggctgcatttcccagctggagaaaaggagattgatatctcaaagcacatcagggacatcattcacttggagatcacgctcgatgccctgtgcagtcccacctgcaaaggtctctgccttggctgcggcgaaaacctcaacaccagcagctgcagctgcaacgcagagaaacagcaggccaagaatgttcagcggcgagggcctctcaaagacctgttgaagccactgcaaaggtgatgtaaataccgcacggcagattttatacggtgatatgtatgtaatactttgtaggagtattcgaagataatatgtttagatgataaatttcttctcgtcctcctttttgagctc

SEQ ID NO: 15855 - DNA, 2020 bp, Oryza sativa
  ref <308>: DATABASE ACCESSION NUMBER: AK066367
  ref <309>: DATABASE ENTRY DATE: 2001-12-06
gactatacacttagcttagtgtttacctagctagctagcagctggctgcaacaaacattctgcatgcactttgaattctagagataggagagttaattagatagcttagctaccacaatgcatgcgtgcaacctgatagcttagctacgcgtagttgccaattcaaccggccgacatatatatcggcctgaggaaactagtggaggactccaaagggatcgcattgatctggctagctatctcgatcgatcgcctcatcgatcgacgacgacgtgcgtgatcgatcagtgcaatccctttggaattttcctcttgcttccgcctcctcatcttccttgatcgatcgatcctttgcctgctggacgcgcttgcctgccggcttgcttcttccatcgccgccttgatcaatccgcaagctgctccagattcaggagttaaatcgaagcccaacgctagcacacaggtgtgtatcgtatacaattactgcatatgtatgcatgctccacatcagtatattgatcatccccgtatacaagaaatgaacaacagtaggagtagtattgagtattctagtgttactttcttttactttgagaacgaattaatggcatctaatttgtgtaagcaaattactactggtttcactagtcctgaattgtagatgtaagctactagctgttagactataagaagccattaattagtcgataacaacatgcaattgcatcttgtctttatttgactatatatgttgtttttttccagtatgtatatgtttaaagccctatcgatctaactctgaatatgctaagatagagtacagaaaacatgatgcatatgcaccagtactgcttgcaggactgttcagacataatttaatttgttatgcatctgacctgatcatcaagtggattgattggtgatatataaatggtaacaaaagtatagtagtggagaagaaacgtggagaattgggttttacattaaactttgcacggtacaagacattagacatcgatcggtgcctaagctagttggaattttgcaatgatcttccctttttctgatcttgctttttgtgtgcattaattgttccgcttgttgcttgagagttggagtagtacgcatctcgattgcaactcattttgcgcgtgaatgagtaccaatttggattcgatcgtcatcgagaaagagacaagatacatattttttgcgaacgcgtaaaaaaatagcacgtcaatatattagaagaaactgatacatactccgtagctatcttaattttatctctccatcgcatgcaactaaactaatgtactactatattttctcttatcaagagaaaaggaacacaaacgatcattgcacaatatttccggaacccaaataagctagctctgtcaatgcttataaacgtactcctatataaaatatatagttgatgatatgccatgatgcattattgaacacagtgatgtctgctgaaagtgcatatttggcagtgcaagaaggtcttttgacagacagggtaaaacatatagagtcccgagtcccgacaagttcagtttatgacgatggaatcaatcaaaggaatatggttcgcacggctgaatcgctgaaccactctgaaatctgagggcgtgtttgcttgctgccctcagattcgcgcccggctcatgcgtcgatctcaggcgtccgatttcggtcgcctgcggtcggatcgacctgcctgagcaatggtctccaggcgagggcagcaaccaaacagcccctgaatacctggctagctaaggtttctgatctattctggctgatcagtgtccattttctttcgtccataaggccgagtgcagaacaacttgtatatatatatttatgtgttgatctggtaattcaatgtagtagcaaagaggcaattgaggattctgcacacacgcatctactgtagcagaatactgatgtcttttatgtaatcctgtcaaagttactagtaaaattttctttcagagaggaaaatctc

SEQ ID NO: 15856 - DNA, 3214 bp, Oryza sativa
  ref <308>: DATABASE ACCESSION NUMBER: AK066368
  ref <309>: DATABASE ENTRY DATE: 2001-12-06
gaagtcacatgctcgtggtacgccgcgcgtgctgcctcctccggctctcctcctcctcccacccgcccgcgactagggttttgcccgccgccatctacctcacctcctcctcctccgccgccgcatccgcccccgcgccaccggcgatggcggcctcgacggagtggccggcgagccgagtgcgggagaccttcatctccttcttcgagtccaagtcccacacgcggtggccgtccagccccgtcgtccccgtcgacgaccccacgctgctgttcgccaacgccgggatgaaccagttcaagccggtcttcctcggcaccgccgccccggacgcgccgctgggccgcctccgccgcgcctgcaacacccagaagtgcatccgcgccggggggaagcacaacgacctcgacgacgtcgggaaggacacctaccaccacaccttcttcgagatgctcgggaactggtccttcggggactacttcaaggaggaggccatcggatttgcctgggagctcctcacccaggtgtacaaattgcctaccgatagaatttatgcgacttactttggtggtgatgagaaatttggacttgctcctgatacggagtcgaagaacatatggttgaaatacctacccaaagaaaaagttctacctttcggttgcaaggataatttctgggagatgggtgatactggtccttgtgggccatgtactgaaattcattttgatcgtgttggcaaccgtgatgctgcttccctagtgaacaatgatgaccccacttgtattgagatatggaatcttgtgttcattcagttcaatagggaagcagattgtactctgagacctttaccagcaaaacatgttgacacaggaatgggatttgaacgcttaacttctatccttcagaataaaatgagcaattatgacacagatgtattcatgccaatatttgatgccatccaccaattggctggcaatggaattcaatcatactcgggtaaagtaggtcctgaagatgttgacaaagttgatatggcttacagagtagttgcagatcacataagaaccctttcgtttgctattgctgatggttctcaacctggaaatgagggcagagaatatgttctgaggcgtattcttaggcgcgctgttcactttggtcatcaaaagttgaaagcaaagcaaggattttttagctctcttgtacatgtatttgtccaactgatgggagatgtattccctgagctgaaggacaatgaaaagaagatcaaagatataattaaagatgaagaggaaagctttgagaacactctagcaaagggttttgaaaaatttaagaaagcggcagatgctgttaaagagagtggaggaacagtacttagtggacaggatgcatttgtcctgtgggacacctatggctatccagttgacctgactgaggtcatgggagttgactatggcttgagtgtggatcgggagggttttgatgctgcaatggaagaagcgaggcagaaggctaggaatgcacgcttcaaggctggggaaaattccattgtcttggatgccaatgctacagcacagctgcgcaaccaagggcttgctagtacagatgatagcccgaagtatggttataaggacaatgacagtgtggtgaaggctatctacactggttcagaatatgtaagtgccgcatctggcgatgaggactttggccttgtcctggaaagtacaagcttctacgctgaacagggtggtcagatatatgacactgggaaaattgaagggtctttcggatctttcaatgtaactaatgttcaagtatttgctgggtatgtgctgcatatgggctcatttacaaaaggttccaaggcattgtctgttggtgataaagtggcatgcaaggttgattatgctcgccgtgctctcattgctccaaaccatacatgtacccatatgctgaactttgctctacgggaaatacttggtgatcatgttgaccagaaaggttcaattgttctcccagagaagctacggtttgatttctcccatgggaaacctgttcagccagaagatttgcggaaaattgagtctatagtgaatcaacagataaaagacaaactggaagtatttgcacgtgaaataaaattagcagatgcgaagcgcataaatggtctacgagctgtgtttggtgaaatctatcctgatccggtaagagttgtatcagttggtcgcaaagtggaagatctacttgccaatcctgaaagcaaagaatggctatccatttcaacagagctgtgtggcggtacacacattaaaaacactagcgaggcagaagcatttgccctgttgtccgaggagggtattgctaaaggtgttaggaggatcacagctgttactgctaaacatgcctctgatgctataaaggatgcatcatctattgattctgaaatcaatgaagcatcaaaattggagggagctatattggaaaagacgattgcttccatcaagagcaagcttgatacagctttaattccagctgcaagaaaagctgatcttaaaggccgggtgtcgaagttggaggatgaacttaggaaggccaagaagaaaatgggcgaggagaacatccagaaggccgtgaagtttgcaatagatgccgcccaaactgctctttctgaaggaaagcgcttctgtgttgctcatgtagatgtgggtcttgacacaagtgctattcgggaagcagttatcaaagtcaaggaccagaaggatttgccaatcatgctattcagcacggatgaagccacgaataaggcagtcatttatgctggtgtgcctcccagcgctgctaacagcttgaaggtgttggattggttgacaccatcgattgcgcccctcaaaggaaagggaggtggtggcaagaatggaattgcccagggccagggaactgaggcctctcaactaaaggaagctatggaggttgctacccagatagcttcaatgaagctggtctaacttttggatacctagtttccatctgttctttttttttttcctattgatgcttctttgtaacaatttcgctccttacagaagttttatatcatgtcgaaacgtgaaagcaaaaaaggttgattgatgttaccaaataccgatacgcttctgtacgggccacatttaatcgtattggtttatcaaaatggcaaatttaacttgttatt

SEQ ID NO: 15857 - DNA, 1053 bp, Oryza sativa
  ref <308>: DATABASE ACCESSION NUMBER: AK066369
  ref <309>: DATABASE ENTRY DATE: 2001-12-06
ggcctattcttttggatctggagaggcaccctccctcgtcgccggcgttcgtcctcccccaggctctaccgtccgccctccaccgacgcagacgtccgagagcccgcgcctttcttcccatgcatggccctccctgctcctcggccggccatccacattggccgtggtcgatgcggtgccgaacccgccagcacctcgcgtcggccacggcttcgaccctcatcatcgggggcatcgacatcccgcatgaccacggctgtgacaaccactccgacggtaggttcccatgctgtgactaaccacccatctgttttcctttttttggatctgaacaggcggaggtgctcctggcggcgaacggctgacggccataaccggggaggaccgccagcttactcgacgttgagcagatcggccgtcctccatggtcgttccaccaccggatctggctgttaggatcgacaagcaggaggtaacggatcccaatcgtcgaaggcgacggtgaccaaggagcgacagtcgccgtcgcccgtgcaggacaacgcatgcggcaaggagccaaaggggcgtgagaccaccagggcagtgccatcagcaggagaacaagtgcaagtgacagttcaatgtttcttgcatgggtgatggataaatgttggcggggaggattaaggaatctgcaacactgcgtgggctcgacaatgatgtgtggcacttgcactgtccggcgtctatgggtctctctcagcatattgcattccccagctgaaggttccctgccatgaattcagagaagaaacaacattaagagaaatatgtattcctgttctttagacagtgcatcattagactactacctctattactacaagaagtttgtgttagcaataatgtggctacatgatgtttgtattagcagtaatgtggctgtgttagtcatttggaattagaaattaattccatacaccgagagaagcaatgttggatactattcttcttgttcaatattgtcctattgtacacaaaatagaacattatgtcgtcaggttgcgttgt

SEQ ID NO: 15858 - DNA, 1336 bp, Oryza sativa
  ref <308>: DATABASE ACCESSION NUMBER: AK066370
  ref <309>: DATABASE ENTRY DATE: 2001-12-06
gtaaggagatctgcgtgctgcagttggatgagctcgatttcaacttgctgtgcgtgtagaggaatgcagtacagcctgtacagggtcaagctttgctgagaattgtttgaaggcgctgctagatttgagaattttatagattggcatcacatccggccttttatctcgactttaaagttctgatggatgatggattatggatcaaacagagtttatgaaaattatttgagggcacagacgagagaatttagtattagaaagttgaaaggttgactttaaaaagttctctaagaaatgccgatgaagaaagtttatgcaaaaatcataccgtttgggagtttgggaagtgcgccgcaataatcaaaaatccgtgagaggaaaagaatgctttttttaattatttttcatctcattttatactctgcatttgctgtttcattctagcattttggatttaattaatgtgctagttattcaattaacttacacatttgctgggctctacaaaacctactcaattccgtgatgaactggctaccttaaattcagtccaaggttacagtcaaccattttatctggtacaagtctataagatagtaaattatattcaatattgatcttgtttacatccagactgtgctggtatcttcgctgtcacaatttgttcatgttaacggtcgtttaaaaccaagtagaatacagatttagtttagaaaaaataaacaataaacttattttgcactttattttagtcgaaatgcatctgcactttggttgtgcagcaggcacaaaataaacagaacaaaatttctaacagattcaggggaagctatagcatgctacacatgttttgagccatttggtactcttgctcttcgatactcgattgctggttctttcatgggttgcaggttttagttgtacaggcaagcgaggcgccgaatgacttgagaagtacagctcaagccaacccagtgggggagaatacgcatgatgcgacgaagaggaatgcaagcgaatcttcagcgttctcgagcacgaaagcggctccagaaggaacctacaaagctagagaaatagtcgcctacgatgatctgttctgaacttctaataaccagccttctttagggaggaggtgagacaaccattcaggtttgttcttgtacactgctagggtctttaggtgagtaagctatgggtattttttagtgtgtgaaggtaccttcagatgggtaggtgtttcttgtattcagcatgtattgtggaagttatcatcaaaacatgagaatttatgtatgttagattgttaatattgacagtgccttaccatcttccc

SEQ ID NO: 15859 - DNA, 1833 bp, Oryza sativa
  ref <308>: DATABASE ACCESSION NUMBER: AK066371
  ref <309>: DATABASE ENTRY DATE: 2001-12-06
ggtctaaatcaagggagtttcatcgattacgtcaaaaagaggtttcgagagtttcctcgaagcacacccgacgccggcgccggcggcgaggtgtcagtcgatcgtgggttccggctgtagagcatcttccttctgctgtggcgatcgtcgagcgatcgagcgatcttctgttcaatctcatctccttcggcgatccgatccggcatagctccccgcctcctctcttctcctcttcttgtttctgctcatgggaagtgaatccctcctcgggtcggcttctctgaacgcgactgtgaatcaattgaaccaacaaactaaatacttacagtatatgtgtcctcctgatctgggcttctaacagccgcagatgctgctgcactgactgagaataatgattactagcctggaagacgataaagcaactggccaggcctgctgctgctcttcgacatgcctagaaccacaattgcatccgaaattttcaggttacaagaaattttctttctttgccgatataatctgtccaaaaggagtggttagtccttccaaggttatcttccccggagaaaattaaagctcggattgctcacgtaatccgcccacataggcgccatttactgcagcacggatgcttcttcagtcttcacttcacatccgcagccttgcatcctgaagatctgtaacagccccgatcaagaaaggatccaacccacctaggaggactaacctgaacgtgctaatgagttcaaagctagtaacatcacctctgaaatccatggagcagggccatctagagcaacctctgcgcgatccgcaggcgccggcggagcagcatgacatggggttatctcccctgacgctcctcggcttcgccttcctgaccttcaactcgggaatggcagtgtacagatcagatagagacttggcaaccatcttcttcgtggtcttctcctacgttgacctcgtatcgctcttctacttcctccgattatttgagaagacgccgccggagtcgcctcgccgccaccacatcaagacggcggtgtggctcctgacgacgatgctcaccgccgtgttttcatataaagtggcggccatcatgcctttcccggttcaggtgctggtttgggccatggccgcagcaactgtgcttggagggttctacgcattcttcctccactccgatgaaaaaaagcctattgagggactgacagaatgaaagtttaagaacttcatcatgagatgtgatcgatcactggaagaatatttcacagaaaccaaacgaaagggacctattgattgattaccttgtgccaattctgctctaatggctctgaaacagatgtgcccacggaactgcataaatttcaagagtggtctatgaaaattggagaatgggaggaattgcacacatgaactgtcttgccagagtggagatgctatggtaatgatatactggaactcctttttatgggctccataatggccgcacttggcatccgactatctgagcacggaaattttcagtggcaaaaccttactgcgaatagaagcaaagcactgcaaaatctagagctttgcatgggtcaagtactcaagtttatgacctttttcagacaagggatacaatctggcttggcccaaagaacacattacagagacagagacaatgggctccataatcttccattgaaaagaaaaataagaaactggagctggagtgggagatgtttcaagaagaattgagccatcaatctctctctctctggtttcctactggccctggagcctccatatgcaaacattcttttaataaatatgcaaattttctgc

SEQ ID NO: 15860 - DNA, 2311 bp, Oryza sativa
  ref <308>: DATABASE ACCESSION NUMBER: AK066372
  ref <309>: DATABASE ENTRY DATE: 2001-12-06
gagctttcacccacgggcgggacattttttctaaggaaaagagaggaaaaggcaacccctttcctcgcgcgcgaccgctggctggcggcggagccgacctcacctcgccggagtttaatcccccctccattcttcctcgtcctgattgccaacgacggcggagagctcgccggtgcccgacgtaccgacggctcgatcagtccttcccatcctctgttagcctcgcgtgacgcccgcctgcggtggggggaagaacctcgccgtcgcacgcgatggcggggacgccacccgatggcggaggagataggccgtgggagtcgtaccacaccgcctacaccaacgccaaagctggaatggagggagttgacaaagagaaggtgcagaagaaggtcgccgaacataaaattttggagctggaagcttcacgggatctttcaaagatatggcttcacaccgacatggatgccttttatgctactgtcgagatattggaaaatccatccttgaagggaaaaccattggcagtgggtagcatgtctatgatagctactgccagttatgaggcacggaagtttggagttcgtgcagcaatgcctggttttattggctgtaaattatgtcctgagttggtttttgtccgtccaaattttgagagatacacttattatagtgaattgacaagaaaagttttccaaaggtacgatcccaactttgttgcaacaagcctagatgaagcatatctcaatattacaaaagtctgcttcgatagaggcattactggtgaggaggttgctacagaacttaggggtgccattcaccaggaaaccggtctaacttgtagtgctggggtagctccaaaccgcatgattgctaaggtttgctctgatatcaacaagcctaatggacagttcattttgccgaatgaccaagaagctgtgacaacatttgtatcaacactacctataagaaagataggtggtataggcaaagtaacagaacaaatgttacgtcaggttcttggtatcagtacatgccaggagatgctgcaaaaggcttctttcttatgtgctcttttttctgaatcctcagctgatttctttatttcggttggtcttggactaggcggtactgaaactcctgagcaaagactaaggaaaagtataagttgcgagcgaactttcagggcaacagatgattgttctatgcttttcgagaaattagatagtctcgcagacaatttggccgatgatatgcaaaaagaatgcctgaagggaaggacactaacactcaaactaaagactgccgcttttgaggtcaggacaagagcagtaaccacacaaaactatatcaactccaaggaagacatcctgatctacgctaggaaattgcttaaggctgaactgcctctttctttgagattgatggggttgcggatgtcccaacttcgcgatgagaaggatgattcatctacccaaacccaaaagacactagatagatttttccgcacgcctgacaactcaaatgtcattggagcaaacagtccaagcatcggtaataccacaggaggggataactattgcactaatgtgatgaccaaggtcgattatttagagcatgattccatggatgatcaggcattgtttttgcatgaaaagaacttatttgttccagaagtaaggagctcagacaattataataatgatgctgcatcaagcaatccacttatgtgtgatggtgttggtggaaaagaattggatgatgactcctccagttcgaagggtacacatactgtaaagtttgatggccagctcaccagctctaacgcaactacttcatcgagtaaacctgatcagcttttctggataaatggctacatttgttccatttgtggatttgaactacctccaggttttgaggaggagagacaagaacattcagatttccacttggctgaaatgcttcagcaggaagaggcagtggacagcacaggccccctctcgaaagagaggttagctgaaaggccatgctctagcacacccacaccaaagaagaagctcaagtcttcaaaagaaggaaaacacatacctattgatgctttctttcacaaggttaacaagaacttgtaacatactgtagctacctattcaggcactctttttaatcctacagagcgatttgcccacttgaaaaactgctgtacatgtaacttcattccatgttcttttcagactagcatgtaaattgtaaatatataactcaagaatcctgttaaattaatttcataatttattcaaatgtcatacgattctgc

SEQ ID NO: 15861 - DNA, 1205 bp, Oryza sativa
  ref <308>: DATABASE ACCESSION NUMBER: AK066373
  ref <309>: DATABASE ENTRY DATE: 2001-12-06
gatcctctcctctcgcatcgcaactcgcgcgcacacagaaaaagaaaaaaagaaagagtcaaggggagggaaggcgagagagagagatgagggagccggtggtcgtggcagcttcttctgcggcggcgttgcggggtttctgggaggaagtcaacgagtcgccggcatggcaggacggcgccttcttctccctctccgccgcatacgccctcgtctccgcactcgcgctgattcaattgatcaggatccagcgccgagtgcccgaattcggatggaccacgcagaaggtctttcacctcatgaacttccttgtcaatggagtccgtgctctcgtctttggattccatctccatgtcttccttctctccgcaaaagtttataagttggtgctgctagacctccccggcttgttgtttttctccacctacactctgcttgttctcttctgggcagaaatataccatcaggccaggagcctcccaacagataagttaaggattatatacatagccgtcaatgccatcatttacacaattcaggtttgtatttgggtatacctcggaatcaacgacaacccattggttgagctggtcagcaaaatcttcatagtagttgtctcttttgtggctcttcttggcttttcagtatatggtggaaggctgttcttcttgctgagacgtttccccattgaatctaaggggcgaaaaaagaagctttatgaggttgggacagtgactgcaatctgctgtgcttgtttcctgataaggtgcatagtggtggcgatatcagcatttgattctgatgtatctctggaggttttggaccatccaattcttgatttcttctactatatgttgacagagatactgccttcagctcttgtccttttcatcctccggaagctccctcctaagcgggtgtcagcgcagtaccacccaatcaactagctagaggcctcctagttagttactacataatatgatgttattatatactactgtacttagtatgttagttatgggaaaactttgaactcctcccaaaaagaagaaagaaaacaaactagaattgcgcctggcaagcaggagcgggatgctggtagtgctttgagctgtaaatgattgaaagcgtcaacaaggccttgttacttggatggatagtcagctgctccattaatgatgaatgaattttggtgcttgtgtagt

SEQ ID NO: 15862 - DNA, 456 bp, Oryza sativa
  ref <308>: DATABASE ACCESSION NUMBER: AK098956
  ref <309>: DATABASE ENTRY DATE: 2002-08-28
ggggttttcgttgctggcggcaacggctgcggcggccgcgcacggagggagcagctgcggcggttgcgaccgcgcgccgagggagagagcggtggcgtcgtggcgctgaaggaggaagcgtcggtaacagttgcggccgttgcactcggagaaaggaagagagcggcgtcggctgcggctgtccttggagcagaggaagggagctgcgcctgcgcaagatccagctgtgagggcatcctatgctggatccagctgcgcaagatccatttttgcagttctactgttgattgaagcaagcaatgatctagaagaatggtctgcagttttgctgtaggcttggattttggcatatttttttctcttcgcacctttttttctagcttgttcaattgttcttgggtgtatacgcaaattactttgtttacagagagcggttagtaaatggatctcgttttg

SEQ ID NO: 15863 - DNA, 2073 bp, Oryza sativa
  ref <308>: DATABASE ACCESSION NUMBER: AK066374
  ref <309>: DATABASE ENTRY DATE: 2001-12-06
gtcctttcaccaagttcgaattatttttcgcctttggagacggcacaaaaggcaagaaaacggaggaggaaaactaggccacgcattgacaggatcttctcccttgtgttcttgctgcttttctgctccatgtcctgctcttggagatggccatggctctggctctgagctgtggcaggaggcagagagggaagaaaggcggcggcggcggcggcgactgcggcggccgccatttccatgtccactaccatcttcctcgccgggtctgcgcctcctcgtttgttcccaatttgctgcctcgttttttctcgctgctgtcagcttgcgtgctggttcctcctgtgctgttcttggctgtgcttgccttcctcgtcttgtttctctggttcaccttgctgtattttattcgctccctgtggaacaaagacatcaacggtgagaccttcgagaggagtagcaacgatcatggcagcgatgctgataaacgccttggagaaggcgttgcagaagaaggaaaggcagagaagaaaactctgaagatttcgtctgaagattgtgctagaaggtttgagatagaagaggtactacatgttaattctgatgattctcaaaacttgcctagtatggtgtcatctgatggttgcctgaactgtaagatgcatactgatgatgaaaaactcatcaaagaggtgactgtctttgagataaaaagaagggaatcgggagctgctattgtctgttctgatggtttgtcacaaaagcgtcagccacgagatatgtcagttgattggtttgaggaagaaactaaaagtggagatatcatcaaatcaggtgattcatctccaactgtactgtcaactttttcatctgaatttcatgatttctctgacaacaatgaagtggtagggttggccacggattttcttgatgtaaacaatcaaaataaagcagtattgctagatagttcatctcatcgtggtatcatggacaatcattgcaaatgtggtgaggaattttcttctgataaggaggctccagcttaccatttatttgaaaattatgattttgttgacaagcatgaaacaaaagaggtggtacttggtgatacagtagtcttgacctttgtagatgatttagccaatgatgactctgaatatagggaggatatttcagaacaaaaggatccaaataatttatcaggattgcttgataacgttgcagatattttttaccagcagcaagaaatacataaggtggttgtttctgacgacaacaagccacctgaagttttgttcctcagtggaaagcaaactgtcagcagttcaggtgaatttagttctcctaatgagaatggaacatcaggatttccttttgattctgtttgtgaagataaaaatggaacagtggcctatcccagcgtagcatcccattataatatcggtattgaagatgacaaatgtgaggatcatactgacaacaacatagaggaggcatcaagtatcgcatctacaaattgtggttctgctgataagcatcagactatacaggtgttgcctgtttgtttagcaaatggagataacattgatgatgttgcttcattggggagttcaatttgtgaagacgttgaagataaagacaacaaaagtaatgctaattgtatttcagagggagctccacatggaaacggaatgccacttgttaggtccccagcatcatggtggaatttatgtggagttattgatgtgtttgctggatgtaaagattgaattgagatgttggcaggtcatgggtggaactttgggacaacagaaaactttagatgctcatcctaatcctgtgttgacaatgaagaagtatttgacagtttggattgaggtattgaattgtttatagtgaggctgtttgttttgttggatgtatatatttttttgttagattgcctgattagtttttgacatgttgtggttcattggctttttctttaaaagctgagtgctattctttctcaagaaagaaagcttcaacttactgtaattgattttgaaagggaaatggaactggaaatgcttgttg

SEQ ID NO: 15864 - DNA, 2695 bp, Oryza sativa
  ref <308>: DATABASE ACCESSION NUMBER: AK066375
  ref <309>: DATABASE ENTRY DATE: 2001-12-06
ggctcccctcgtctccctctgcggcaagctctctcatggcgtgcacggctccacgggaggaggacctcctcatggaggaagacgagcaccggccgcctctcaaccgggccctgctccaccgcagcgccaccaacaacacctcccaggttgccatggtcggctccaacccctgccccatagagagcctcgattacgagataatagagaacgacctgttcgatcagaactggaggtcgagagggaaagccgaccaggtgcggtacgtggtgctcaagtggaccttctgcttcgccatcggcatcatcaccggcatcgccggcttcgtcatcaacctcgccgtcgagaatgtcgccggcctcaagcacaccgccgtgtccgccctcatggagtccagcagctattggacagcgttctggctgttcgccggaaccaacctggccctgctgctgttcgcgtcgtccatcacggcgttcgtgtcgccggcggccggcgggtcggggatcccggaggtgaaggcctacctcaacggcgtggacgcgccaaacatcttctcgctcaggacactcgctgtcaagataatcggtaacatcgcggccgtgtcatcctcgctgcacgtcggcaaagctggcccaatggtacacacgggcgcgtgcatcgccgccatcttcggccagggcgggtcgcgcaagtacggcctcacctgccgctggctgcgctacttcaagaacgaccgcgaccgccgtgatctcgtcaccataggcgccggcgcaggtgtcaccgcggctttccgcgcccccgtcggcggcgtcctgttcgctctcgaatcactctcgtcatggtggcggagcgcgctgatctggcggtcgttcttcacgacggcggtggtggcggtggtgctgcggatgttcatcgagctgtgcgcgtcggggaagtgcgggctgttcggcaagggtgggctgatcatgtacgacgtcagcaccaagtttgatgacctcatgacctaccacctcaaggacatccccatcgtcgtcctcatcggcgtgatcggcgccatcttgggcgccctctacaacttcctcatgatgaaggtcctgcgcgtctacagcgtgatcaacgagaggggcaacgcgcacaagctgcttctggcggcggtggtgtccatcctgacgtcgtgctgcgtgttcggcctgccgtggctggcgccgtgccggccgtgcccgacagccggggcgccgtcgccgccgaacgggacgtgccattcgctgaaccgattccggcggttccactgcccggcggggcactacaacgacttggccagcctcttcctcaacatcaacgacgacgccatccgcaacctctactccacgggcaccaacgacgtctaccacccgggctccatgctcgcctttttcgtcgcctcctacgcgctcggcgtgctcagctacggcgtcgtcgcgccgtcggggctgttcgtccccatcatcctcaccggcgccacctacggccgcctcgtcgccatgctgctcggcggccgctcaggactcgaccacggcctcgtcgccatcctcggctccgcctccttcctcggcggcacgctccggatgacggtgtccgtgtgcgtcatcatcctggagctcaccaacaacctgctcctcctcccgctcgtcatgctcgtgctgctcatctccaagaccgtcgccgactccttcaactccagcatctacgacctcatcctcaatctcaagggcctcccgcacctcgacggccacgccgagccgtacatgcggcagctcaccgtcggcgacgtggtggccgggccgctgcggagcttcaacggcgtcgagaaggtgggccacatcgtgcacacgctccggaccacggggcaccacgcgttcccggtggtcgacgagccgcccttctcgccggcaccggtgctgtacggcctcgtgctgcgcgcgcacctgctggtactgctcaagaagcgggagttcctgacggcgccggtgcggtgccccaaggactacatggccgggaggttcgaggcgcaggacttcgacaagcgcgggtccgggaagcaggacaccatcgccgacgtggagctgtcgccggaggagatggagatgtacgtcgacctgcaccccttcaccaacacgtcgccgtacacggtggtggagaccatgtcgctggccaaggcgctcgtcctcttccgcgaggtcggcctgcgacacctcctcgtcgtgcccaagtcctgcgacaggtcgccggtggtggggatcctgacgaggcacgacttcatgccggagcacatcctcgggctgcacccggtgctggtgggaagccggtggaagcggctccggtggcagaagggcgccgtcgccaagaaattccggtcgctcctcgactggctagccaacgacagcggctgatcgatcgatgcagaggagtacattatattgatacacgcacatacattctggccggacaacgagggatgatgatgatggagtgcttgcacataaatatacgtacatacacgttggattggtcattgagtttttgtgaattttgtgcaataataacagcacctatacctggtggtcatgaatgacatagacacaatcattcaattttcttttcttctttttgcttgtatattactccctctattttatattataagttgttttgatttttt

SEQ ID NO: 15865 - DNA, 4090 bp, Oryza sativa
  ref <308>: DATABASE ACCESSION NUMBER: AK066376
  ref <309>: DATABASE ENTRY DATE: 2001-12-06
gatttgaccatcagcgacggagcgacgatagtgctctgccatgggcgtacggcggcgacggggttggctacggctgctgctccactacgcggagagccctatgaggaccaggggaggctgcgctctcggattggtgtctctcccacatcgcgtcttgctttggggggagggggggggcatctttgcctccctcagctacttctcgctaaggttgcgggctccaattggcgtctctcccacacatcgcatcttcttttggggggagggaggggggcatctttgccttcgtcagctacttctcgctaagaaatgacatggagccatccagattcgttcgcatctgcccgcggaagcgtccagatggtacttggtgatgtcattatagtttcgtatgcaagcctcggagttagcaaggccattagcgatccttttttttccctgattcacacttttgctcaccaatagatgggtcctccatatcatctgctgccaataagcacttagagcttacgagtggtgtgtcatgtgccatagatgagccgtcatcatcccgcggtgccactgggttctcaatgctcacgggtagttcatcatgcactatagggagtcgtggagctggccacattcagtcttctcgacccaacagagatcatttttgcccaatagtgccagcacgtgttgctcgagtgaaccgggaaaaaagacaggccgctaggaaaatgcgtcttattttgcgacaagaacatgtgccacgttcactgtcgatgagattcacatattccataccaaaggagcacatgcaaattcttaaagttccgtcttgctcgagacaagctgctttctccaagtgctcctgagattgctatcaagctcattgggtcagaccattctcagagtgaccattacagccttcccaccatctctgagttggcaacactaattatacctggtgcatcttgtgaggtatcaaagtttgatgtcattgtgcagaagcattcagcttagagaggtagatgatcagccacccggtagttgcgacgaagcatcgatgcttggattttatcggtacgagtcccactatcgaaaggatgagcccaatccattcacctgttgtgaaaaaacttcgctctgagacacatcaaggtatatctgatgctgttgttaggggagacagtggtggaaaggatgttggcaccaaggtaattctgccatcaagtttcataggaggaaggcgatacatggttcaaaactaccatgattcaatggcaatctgccgttcttacggtcctcctcaaatattctcaactttcacctgcaattctaaatggccagagattattgaagctattcgttttgaggcagggcaaaaaccaagtgataggagtgatatggtcacacatgtttaccatatgaagctagatgagtacatcacatctattaagaatggagaagccttcggtcccataaaagctgaggattgccgcattcccacacattaacatggctcacagctcaatctgaagaaccttcacctgcattcattgacaacctgatctgtgctgagataccagatataacagctgataggtttgggtttggtcttgttgatgaattcatgatacatggcccatgtggtgagcacaatccaagcagcccttgcatgaaggatggtcggtgttcaaagggctatccaaaatagttctgtgatgttactaccatagatgatgatggatatcctatttatcgacgacgcaatgatggtcgctatgtggtgaagaatggtgtttcactagataaccggtgggttgttccttataatccagctcttctgaagaaattccaagctcatatcaatgtggaatggtgcaataaaacataccttatcaagtacctttttaagtatataaataagggaagtgattcgactatgttcgttttcagccacaggacttcagaaaagacagaggctcatactgctagcgatggaggcataggtgaggttatgcaatacatcaaatccagatacctatcaacttgtgaattattctggagattatatggttttgagatccatggaaggagtccttctgttgaacgcctcattgtgcacttgccgaacatgcagtttgtgacataccatgatggagctgaccttgaagaggtcatagaagaccctgattcctctagaacaatgcttactgaatggtttgctaccaaccaacgtcacatctttgccagggatctcacctattgtgaatttcctaccaagtttagctgggatcctgagaagaaagtttggacaaagcgtaaaagaggaaccaagatagggagattaaagcacatccatccaagtactggggagccgttctaccttagaatgttgctcatgatagttcgaggatgtatgagttttgaagatattaggacatatgaaggtgtgttgtatggtacctatcgtgaagcctgtcaggcacgtggtctcattggtgatgacgctgaatgggatcacctctttgaggaggcagttatctgggctacttcataccagctcaggaaccttttcatgactgtactagcacactgtgatgtaggtgatgttagggttttgtttgataagtactggagatacatggtagatgattttgcttacaagttaaccaaagctcttggagtacaacgcacagctattccagaagttatgttgcaggataccttgctcaaagagttggatgccatgttctcaaataatggcttatcaatctcatcatacaatttgccaacaccagttgattgttcaggatccagtgcagcaaacaggcttatcttagaagagctttagctttaaccaacatagcctccatcaagaatctttgtccatgtatgccagcttgaacaatgaccagaagatgatatatgacaagatttttgacaggatagaccatcacgaaaagtgtattttttttatatctggacatggtggaacggggaagacattcttgtggaatgctattatggcaaacatgagatcaagaggtgaaattgttcttgcagttgcctcttctggggttgcagctctgctcatgcctggtggaaggactgctcattcacggtttcggatacctatagatatacatgaccggtcgatgtgtgctattcgtagagggacaatcctaggagatcttattaggaaagcatcactgattatatgggatgaggcgcctatgacacacaagctgtgctttgaggcattggatagaactctacgagatattcaatccgctgatgaaccagctaatgaatataagccttttggaggtaaacccattttacttggtggtgattttaggcaagtcttaccggtgattgagaaaggtacaagagctgatgtggtagatgcttcgctggttaggtctgcactatggaagcatgttgaagtcttacaccttaccactaacatgaggctacataatccatccctgtcgcagcaagccaagggtgaattggcagagtttgctaaataggttcttgacattggtgagggtcgtgctcccatgaacaaaagacaaggtgaggttgagaggacatggatagagatacctaaggagttgctgcttactccctgcggtgacaagattacagctataattgatgccgtgtacccggattttgaattgaactatgactacattccttacctttctcagcatgcaattgtctgtcctgtcaatacagttgttgatgagattaatgataagatgcttgctaaagtgcttggggatgcaaaggactatcttagcagcgacactatttcaaatacacttgaaaagcctgcagattttgatctattgtaccccatagaatttctaaactcaatatccataaacaatttcccgaaacatcgcatatccctcaaaattggttcagctgtagtcctgcttcgcaacattaaccaatcactcggcctttgcaatgggataagattgatggtcacccgactcggtgattatgttttcgggtccaaaatcatgactggcacaaatattggccagctggtctgtattccacggattgtcctaagtgggaacagtcc

SEQ ID NO: 15866 - DNA, 2306 bp, Oryza sativa
  ref <308>: DATABASE ACCESSION NUMBER: AK066377
  ref <309>: DATABASE ENTRY DATE: 2001-12-06
ggatgtggaagtagtagtaggagcaagaggcaaattaaggggaagctgcaggtggtagatgcgtaatgcgagcggcagcagctgctgctctcgggtggcggcgccgttgcatgcgcaagtgcttggctcgccgtctccttctcatggctacggcggcgccggcgacggctgtcttctgcaggcacctcccccggcagtcgtctgcggggagatgctggcactgacgacgccggcgccgccgtctcttctccatgcactggcctccctcaacgtcctcctcctcgtcgcctacctcctcctcttcctcctcgccaagctcgccgccggccttcaccgccgaggccatggtagctgtgacgagcaccaggtcacggagacctccgggagggaggagttcgccggcgccgacgacatcgccggagtgcagcagcagcaagcggagatgctgttctggttcgacgaggccgtgttcgaggacactgctctgcttggtggcgaaggaaaggatcagctcatgtacgacgctgccaccacaccacctacacctacacctgcacgttgcttgcaggtggagagcacctttcccatggtggaatccacccgacgaatctcgccgcaccatcgccagtgcagcttcagccatgaggagcccaaggccgccgccgccgccgccgccgccactgcgtcgagccagaaggatatcattccggccgccgtgccatcaccggagaacgttcccgtcgaagccggggaagaggacggccatggcgaacacggagaagaagacgatgaggaggagaagaggtttaggggagatgacgtgaagctgttcgtgaacagccgggcgctcgccgacacgaagaagctgcttctggagggcgccatggccgggaaaggaggagtgcagcgcgagcgcgaggaggagagcaggttgggcgcgtcgacgctgacgagcgagtcgacgtcgaagagctcggtggagtggcggagctcgacggtgaccaaggactcggagacggagtaccccttctcgtcgtcgtctcgccggagctcgtcgcggtgggagtcgtacgctctcttccgcaagtacgacgaggacatggtctacttccatcgcgtcggcgcccagaagctcaccgagacagagtcgtacaggtcgataaagtatcagccgcgatcggtgtcggagcggatcgtgcagaagctgacgccgaagccgcggccggcgatcgggctgagggacccgtacccggagctggagcgggtgtacgtggcgcagatctgcctcacctgggaggcgctcaactggaactacgccagcttccgccgccacgccggcgacatcgcggcgaggtgctgcccggcgcgcgtcgcgcaggagttccagcaattccaagttcttcttcaccggttcatcgagaacgagccctacgagtacggactccgcccggaggtgtacgcccggatgaagaactcatcccccaagcttctcctcgtcccagagttcagagatgaggaggacgagaaggacgatctgatatcggcggtgcagttcttgtacatactggaggagtcgatcagaacgttcatggcgttcctgcgtgcagacaagaggagccactaccaaatgttcagagaaatggtgaagaggaggaccagctccatggatcagactctggtcatcaccctcaagaaggccaacaagaaaaagaagagccggctcaaggacctgacgaggccaagacggtgtctgaggaggacgaagctgagggaagaagaggagatgtcaatactgctgggcttaatcgacctcaagatcgtggccagagtgctgcgaatgccggagatcaccgatcagcagctgcactggtgccggagaagatgaacagggtcaaagtcgacccggctcagggcaagatgcagagggacccgtctcctcttttcttccctgcacattgacagcagcatcagcagctgtaactagctagtccctgcttgtaatctactacttttttcttgcccatctcctcttcaaatcttcctttgttgatatagtgagaaaaagataaagttgcatagacgacatgagaatatgcatggcacgcagctagcctgatctagttctgtaaaaagagagtcagagatcgatgaagagatcgtgtaaaggcaatatatgtgtacttatgtatttatacatagtagataaataagagacccacatcaatcttgtagttgggtgcatgtgatgtggtgggggtgagatactataaatttgatcgttgcatgcatgatggattttggaatct

SEQ ID NO: 15867 - DNA, 1945 bp, Oryza sativa
  ref <308>: DATABASE ACCESSION NUMBER: AK066378
  ref <309>: DATABASE ENTRY DATE: 2001-12-06
gactaggcctgcgtgcgccgtagccccacgtactccacatcatttgagcccggaaagatccgggacgcgacaaaaaaactcacgacccagagggctcttctttctcttgtggcccgctataagtagggcggtgtgtggcgacattcgcgagacgttcgtacgtaacgtgaccgagcgcgccggacgccgtcgtcgttaattaatcagccatggatccctacaagcaccgcccgtcgagctcgttcaacggcccgctgtggagcaccaactccggcgcccccgtatggaacaacaacaactcgctcaccgtcggctcccgaggcccgatccttctggaggactaccacctggttgagaagctggccaacttcgacagggagcgtatcccggagcgcgtggtgcacgcccgcggcgccagcgccaagggcttcttcgaggtcacccacgacatcacccacctcacctgcgccgacttcctccgcgccccgggcgtccagaccccggtcatcgtccgcttctccaccgtcatccacgagcgcggcagcccggagaccctccgcgacccgcgtggcttcgccatcaagttctacacccgggagggcaactgggacctcgtcggcaacaacttccccgtcttcttcatccgcgacggcatgaagttcccggacatggtgcactcgctcaagcccaaccccaagtcgcacgtccaggagaactggcgcatcctcgacttcttctcccaccacccggagagcctccacatgttcaccttcctcttcgatgacatcggcatccccgccgactaccgccacatggacggctccggcgtcaacacctacacgctcgtcaaccgcgccggcaagtcgcactacgtcaagttccactggaagcccacctgcggcgtcaagtcgctgctcgacgacgaggccgtcaccgtcggcgggaccaaccacagccacgccacgcaggacctctacgactccatcgccgccggcaacttcccggagtggaagctgttcatccagaccatcgaccccgaccacgaggaccgcttcgacttcgacccgctcgacgtcaccaagacgtggcccgaggacatcgtcccgctgcagcccgtggggaggatggtgctcaaccgcaacatcgacaacttcttctcggagaacgagcagctggcgttctgccccgggatcatcgtgccggggatctactactccgacgacaagctgctgcagacgaggatcttctcctactccgacacgcagcgccaccgcctcggaccaaactacctgctgctcccgcccaacgcgcccaagtgcgcccaccacaacaaccactacgacggcttcatgaacttcatgcaccgcgacgaggaggtcgactacttcccatcccgctacgatcctgccaagcacgccccccgctaccccatcccctccgccaccctcaccggccgccgcgagaaggtggtgattgccaaggagaacaacttcaagcagccaggggagaggtaccgttcatgggatccggcaaggcaagaccggttcatcaagagatggatcgacgcactctctgaccctcgcctcacccacgagatcaggagcatctggctctcctactggtctcaggctgacaggtctctgggtcagaaactggcgagccgtctcagcgcgaagccgagcatgtaaggagatcgatcagcgttgcaatctgcttcagtcacggaaggcctcagcctcactctatcggataataattgctactcatactctagcaataccgatcgatcgagtctattttggaaagaggacatatatgatttctatcaccgcacaattcgtgtaccaccatcatgtaataatctgtaacctgaagacacgtttctcctgatacttcatcattattgtaagcacaccttttatcaataatttatatacagtaaatt

SEQ ID NO: 15868 - DNA, 3789 bp, Oryza sativa
  ref <308>: DATABASE ACCESSION NUMBER: AK066379
  ref <309>: DATABASE ENTRY DATE: 2001-12-06
ggtgctctcctcctcctccagtcttccatccacaggcctctcccgccaccgccgccatctccacttcgagccttaactagactctaccacctccgcgccccctctcccgcttcctctcctcctccccggagcccctgccggatgctgccggcggcgctgcttccacatcttctgatcccaccgatgatggggaggatagcctcgcctctgatcccaccgaagccggggaggataacctggcctcgctctgggaggacgccggggacgccgatgacatcttcgccgccgatgctatggtcgacgaggtgctggtcgaacgcgtctgcgctgttgtggagtccacccccgaggatcagatccccttcgccctcgctttcaaggtcgtggacttacaacgagccactcctcgccgccattctcgtgtccaccgccaagagctgctccggtaaaaagctactcctccagttcaaatctattaacttattaaaggaatagaaaaagaaacctccacgttcactctcaaggcctagagattctcacattaatcgggataagaagaaaagtagagtccatacaaacatacaatttaaaagtaacaaaaaattcagaattaaaatagggaatatagaaagaggagactagagtccatacaggtatacaacttagaactaattgatattcggaattaaagaaagaaaactaaaactacaagtcagagtccctatagaaatacaatttaaaaataactaaaattggaattaaaaaaaataaatattggaagaagcccatattgaatataatttagaaaaactgaaattcgtaattagtagaaaacaaatattgaaagatgagtttagagtccatatagaaatacaattagaaacaacagaaattcggaattaaaaaaaacaggaatattgcaagaagagtctagagtccatatataggaatttagaataaattgaaagatgaaattaagaaaaaaagataaaagtagagtttagagtccatatagaaatacaatttagaaataactaaaattcaaaataaaaaaaaagcaatattgggagaagagtctagagtccatataagaatataatttattttggaattaaaaaataaggaatattgaaaaaacatagagttcacataggaatacaatttataataacggaaattcggaattaaaaagaagaatattggaagaagaatatatggttcatataggaatttagaactaactgaaagtcagaataaaaaaaattaaaaaaataaaagtagaattttgagtccatatagaaatacaatttataaataacaaaaattcaaattttaaaaaaataagcaagattgggagaagagtctagagtccatatagtaatacaatttagaaataagtaaatttcgaaattagaaaataattaataactatcaatacaatacaaaattcaaaattgtgttgctatttttaatatattataataataaaatatggaaatatttaagctattatatgaggaaaaatataatgacgttagccgcgtaatctgcgcgggccatcatgctagtttgtcaaaaagcaagtgaaaaattcatccaagttttgaaagtgagggagataaaaaacgaccccttaaagagagatttgataatttaactcttcttaaacgagcgtcacttcgattatttaatatcttgattcactttcattcactcggatagacccacgtatcatgcttataagtgttaattaaagtaaattgaccataaaaaaagttaaattattaaatttatcctcagagtcatcagaaacgaaactagaccaatttaacggaggcctaacttgggcccaaatcaagcccatagataatgagatgggcctgtggggcccactaagcactaggagcggaggcaagagactctccgcgcacatgacgccttcgtgtgctttggactcctttcccccgccgccgctgcctcttgccctctcgtctccggccaccagtccactgcgactgcttgacatggcctcggcgccgtcggccttcatcggcaaccacaaggtcagttacctacctccggtcaatggcattgaggtctccgtagagcaagcggtgccgtcctcttctcacatttcggctggcgctgaaacctaacataacctggatccatggcagcggcgtgggcgtggtgccctgtggaataggagcttgtgtgtttgtgctcccagcaaagtggggtgagggatgtgtggtgttttggatttcggggggggggggggggtgggagggggagccgtcgcccatcaggttctcctcgtgggcgtgagctttcattcacatgtggtgtaccggtgtggtgtagccacagtcggagtgggtgatctccgagatagggtctgtttggttgtctgcggattgagaatgtgcatactgcagctggttgaatccgtcagataccagagcgacatgcgtgtttcagtgtttgtcttgcctttagggtttagcggttgatactgatgaaatgagagtctgatcctagagatagcatggcctgcaggaggtcatttgtagcgggttggacaccacgggcagtggacgagctgttagctttttgcaaacgtgtagtacatccgttcacggtagagccagttaggccagttaggtttagtatatagagattcacagcagtccttgatgagggctaacttcatgagttgtgaaattctacagttataataactaataaacagtggtgtgtgatggattaagatggcgtattgactggcaaatacaattatacaacagtagattatatgcctttgctatgaattgtgattcggctagtgtattcatcctgccaatgattcctcatgatacccaaaaaattagagggcatacagaatctgcactgacatgctgattgcatggtcaaaaattaagtttttctgattatttcattattgcagcaagcagcctatctgtgtttatattgtactgagcgaagtaagctgtatacatttgtttttcttgaaaaggaatgaactctataattgaaatatctagatagctagccaatatgaatcctgttctacatctaccctattgtttcggtctcttagtttggaattacattaataagatttttgagtttcaacctactaaatttgaagtactggtactgatagtgctgttgtttgaactgagcaaaaagcacttgcagacttgagaagaatcaatttagatggtttgagatggtgtgtatttgacgcaaagggccaggtccttggacggttggcgtcccaaatagctgttgtgcttcagggcaaggacaagccaacttatgcaccacatgtggaaaacagagacatgtgcgttgtgcttaatggataagataactgaaatgtaactgtaattattgttgtacacatctttactatggtgcttctatgtcttaattcagttaagttttcacactagaaggtatgtcttctcgttggtgaagtgataaagctactgttcattttattcattgtttaatgatatagactttttttttgcagggttagatatacacttatgttagcaaacacttggatcttttcgtgaactataaggatggttgtgacttgcgaagggtcttgcttcgtatgtaccctgtatgcttttagggtctggtttctgcagtgcctttgctgaactagtgatctgcttctatatcttacaattcctctatgtggtggggattttcatgaggactgtttatattgaatatcaagttcaacatacc

SEQ ID NO: 15869 - DNA, 1969 bp, Oryza sativa
  ref <308>: DATABASE ACCESSION NUMBER: AK066380
  ref <309>: DATABASE ENTRY DATE: 2001-12-06
gactttcgccgtcgtcgtcggcgccagccaccgcccttctccccaaccaaccacgcgcttcccctctccgcttccacctcctctcgggttccctcccgtcgatgccaccgcgccattcctcttcttctcctcactcgccctgcggctgaagcaatggagctcccgtgcccgaggctgctgctgcttcttcgtcttcttgtgttcttggttgcggtttcttggccgctctgcggcgcagggactgaaggcctcggagttggagaggaggggttgagcagcattggtgcttcttctggttctaggaacgttagaagacttctgcagactggtggagtaaaccaaggtgcaccagctcctctaccacttgaacaatctccatcagcatcaggaccggtgtcttctccatcaccctcgccatgtgtatccccaccgaaaggctcaccatcaccatcaccatcttcaaaaatcatagcacacagatctccacaccatccattcacaacccctccacaattggttaggcctaagcctacaactcggcgagctgagcacgatcattcagttgaaactacaggtcgctcttggtttaaacgttcctggacaacttatggttttatcgcagcagggattgctgctctccttatcatatcagcagctggtgcattctactgccgagctaaaaagatggggactgtgaggccatgggcaacgggacttagcgggcaattgcaaaaggcttttgtaaccggtgtgcctgcattgaaacgatcagagctggaaacagcgtgcgaggattttagcaatataattggttgtacatctacctgtacactgtacaagggaactttatctagtggagttgaaatagcagtggcatcaagtttggtaacgtctgcagacgattggtcaaaagaatgtgaatctcggtacaggagaaagatcacaagtttgtccaaagtaagccacaagaactttatgaacttgcttggctattgtgaggaagagcaaccttttaccagagtgatggtgtttgaatatgctccaaatggaacactttttgagtatctgcatgttagagaagccgagaagctggattggatgacgcggctcaggatatccatgggaatcgcttactgtctcgagcatatgcatcagcttaaaccacctgttgtgccaaggaatttcgactcgacgaccatataccttaccgacgatttcgctgcaaaggtgtccgaccttgaattttggagcggtgcaaaggaaccaaatccagccaccagcaactccagctcctcctcggacctcgagaacacggtgcgcaagtatggcatggtattgctggagatgctgaccggaagagttcccgattctgaggaggacgggccactggaacggctggcgtctcgctacttcgatggcgagacgcgcctcgcagagctgattgacccgagcatcggttccttctctgaagaagccgcgcgttcgctgtgcgaagtggtgaggagctgcattgatcctgatcctaagaggaggccgaccatggcggaggttgcagctcggatgagggagatcaccgcgctgggtccggacggagcaactccgaaggtgtcgccgctgtggtgggctgagctggagatcatgtcctccgagagctaatcactagctgcatcaagaatggcatttttcttaaaatttttgcggggaaagaatggcgttcatgtctgatgtctcgttctgaaaattctttcgtttgtcggttgccgctaatcttgctcgtggaatttgtgttcaggtagaatcttagaagatgttctgaatgtttgtttcctgtgcatagctgcagatatagtgagtgctactttacatgtaaaagagtggttagttttcagcagactgaactgcaaacattttagctgactctgcaatggacaaaagagttctgagtttcatctttggcatgttgttctgc

SEQ ID NO: 15870 - DNA, 3864 bp, Oryza sativa
  ref <308>: DATABASE ACCESSION NUMBER: AK066381
  ref <309>: DATABASE ENTRY DATE: 2001-12-06
gtaagccgttaattttttcctcatcaaaaccaagcctagtataagtactagtacgctgagtttccgggcgaatcattacttggttaattagcacattgcctgtcgcttggcgattaatccacgcgacattcggatagcctcctccacagttcacacaaaaatcgcactcatgcagtcatggtctgagtagatcatgccgagaaatatcagcgtgtgaaacggaccggagcgtttattaagtgcgtcagtccagttcgtactctcgcgtacctctcttcgctcgacggaggcgcactatgaagcattaaaggccctgatggtggaatagcaccgtttctccataaatctccttgattacgatccgtaggtcccggagattatttgattagcggttgctaatcccgtttagctacgacgatcacgtctgcttctgtacggtgacgcggaaaagaaatattaatagggagtagattaactagatgcgcagcgaagcagtcaagcagctttacttgcttcagagtttaggggccctttgaatcgcgggataaaaaaacggagaaatataaaaaatacaggattttgataggaatgcaagtgtaaaatagagtattgcaaaacataggaaaaacacatgaatgaccgtttgattggaacacaggaaaaacacagaaatcatatgagagagatagactgagggaagttttccaagaggttagagtggatattaaattttctacgtttttcctctagaatcgtaggaataggaaagttttctacgtttttttcttttctcatttctacgaatcaaagacatgaatagtataggatttcaattcttttgttttttctccaattcaaatggggcacattccggttcagaattcagaaaccgttgagctctgttgatttttttctttatttacaaagaaagtataacttccagccctgcaccaactaaatatgcacatagctatatctgtggacaccagaattttgattgatcttttctacttatcatactaccgcttttagttgtctatagtgcagctttctgctgtgccaatcacttctactagtaatcattccatttttagtgttcgagtgtatcttgctggtgtgccaacgttccgtgattattagtttcggtgctacaatactacgtgggctcaacacacataattagtcgagtgttagaacagtttgtagttcagtactccagctccttctgttaagtacaataacgcttcccggcaagagctaaccgacgaataaatgggtttggtgcggtgaattgcggtccacttgtcgacacacagcaaaagttgatgtgtgctagtcccagtcttgttaatttcggaggtcgacatcttatcacacactttcagaacgaaaggcacaatacctgtaagcctgaattgattttctttttcataaaaaaacaattaataaagcctgaattgattgttgtgacctgcacttccggtgttcacattactcattacatgagaaccgaagccacaggcagtatcttttgtttaggagttgcaattgacaagttaacatctgcttgcttcagatatggggctatgcaattactttggaccagaaaaaaaatctatggttcaaactgtttgtgtacggtctttgggatgcatgtttctgtcgagctgatctactcatcttttaacctaacctaagagaaggccaggcgacttttaaggctcaaaacctggaaatgttggcaggaaccatgactttacacagaaaattgatcttttgtttggatgcttttccaatgctatgacgtcatggtgaaatgttcctgatcattcctgtaaagcgtacaatgagtatgccttgcttggctttatgacttcttctgtgttcttttttttttttcattctcgaaactgatcttcagtgttcttttctgatgttgatatcttacctacaagaaaaccacgtaccctttgccacaacctttttccaaagtcctaatctttttatctagcatgacgtgatgcaccatatcctcacaaaagaaaatagtttttttttttcaacaaaataagggaaaaaagataaaaagaaaagatcatggatcttcttcttatgttagtaccaaatttgaaattttcatagttcatagctgcaaacgtgtagtcaaaaggtataaagccatcccttaaattatgtgcaaggtttccagtctttgtaggttgctatatagagttatagacagtcttaccaggagaaaacagcaaacatggtcaagttcccaaaaatgcctctttataattattattacattatttacatcagcagcagatgcaaaacaaataattatttgatcaaaaaaccaaaagtaggcattcagcttgcattttaattttattttccccaaatcttttttttttgttttttgcttattatatgcaggatcgaacttgaagacaaaaattatagcaggtgtggttggcgggggattatctgcggtgttcgctcttggattaatagccaccgtcttcttcgttcgcaagagaaagcacaagaaggtgaactcgtcttccaagctcctcaagtacagcggctccggcgggacacctcgctccatgggcggcgacatggagtccggcagtgtcaaggacctgcagactcacctcttcagctacgaggagctcgaggaggccaccgattccttcaacgagaacagagagctcggtgatggcggcttcggcaccgtctacaaagggatacttcgagacgggcgcgtggtggcggtgaagcggctgtacaacaacagctaccggcgggtggagcagttcgtgaacgaggcggcgatcctgtcgcggctgcggcacccgaacctggtgatgttctacgggtgcacgtcgagccagagcagggagctgctcctggtgtacgagttcgtggccaacggcacggtggccgaccacctgcacggccaccgcgcgcaggagcgcgcgctctcgtggccgctccgcctcaacatcgccgtcgagtcggccgccgcgctcacgtacctccacgccatcgagccacccatcgtgcaccgcgacgtcaagaccaccaacatcctcctcgacgccgacttccacgtcaaggtcgctgactttggcctctcccgcctcttccccctcgacgtcacgcacgtctccaccgctccccagggcaccccaggatacgtggatccggagtatcaccaatgctaccagcttaccgacaagagcgatgtgtacagcttcggcgttgtcctggtggagctcatctcgtcgaagccggcggtggacatcacccggcagcggaacgagatcaacctggccggcatggccatcaacaggatccagaagagccagctcgaggagctcgtggacctcgagctcggctacgagtccgacccggcgacgaagaagatgatgaccatggtcgccgagctggctttccggtgcctgcagcagaacggcgagatgaggccgccgatcaaggaggtgctcgaggggctcaagggggtacaggacctatgcgtgatggagaaagatggaggcaaagacaagaagggacctgacccgccattatctcccgacacggtgcatgctcagtgggatagcaggcagacgactcctaacactagccagtgaccagcgggttattagattagaccagtatatttgccaccgaggcttaatatgtgtgttactgctattacgctgaggcgtgtgcttgttgtatgagaggtgcgagaccttttttcccccactttccaggcttccctggtgatgtgtgcatatgtgtttgttgggctaccagaacagagggaatgtacataagatgtttagagtggtg

SEQ ID NO: 15871 - DNA, 1591 bp, Oryza sativa
  ref <308>: DATABASE ACCESSION NUMBER: AK066382
  ref <309>: DATABASE ENTRY DATE: 2001-12-06
ggtttggaaggggatcgcaaatggggtgggcgcacgagacggtggccatggaggagttgctcggcttggtgcggggcttcgtcgacgtcctcgtcctcgccggcggccgcacctcgtctggcgccgccgccacctggcgctccggtgacgtcaagaaggccctccaatgggccctcttcttcgaggaggttttcaagaacctgcgtgacgatggtcagtacgatgagtctgcaagtgagctcgatgctgcactcgttcaactcgcttcaagcccgaatttccccaagggtattgaggatatccgatcaaaaacacttgcgatggcaagagagttggttgtgaagcattttctgaaaacaacgaatgcggagaatttaggtgctgtacttcaagcagttgttgagatggatatggatggcatttctgctagtggtgaatgcaatgtgtgccaagagtatgtgcaatcgattttagatatgaatttacctagtttgatgcgaaccaagaatgcccgtgatgttggacattccactagctctgatgaattttgtgaagaatccttgtttacgggtaattcacagattctacttaaagaactacagaagaagctggattcaggatcgtgtatttctttggctgagagagaactgaacacacttctaaaaagcatgaaaaaggacagctttgatagtgcaggaagtacattgtgcacctcagcaactgctcagaaaacacaaatcatcgacaagtttatcctgtggaagcaatggaaagcaaagtgtttgtcgtacttgcttgatgagcgtaccattcggatcatgtcaggaactaatatgatctttaatgctcccaaggagcagtggatgggattgtttgaaccattaaaagtttctgcagattctagtcaaagtggcatcattgaagtcatggagctatgcttgttgggattggttgcaaggcaatggaactcattaatagagagcatcatgtcacatacttttagttcctttcctatatcaaaacaatatgctgatctgcaccagttgcttcaaggaacaactcaggatgaatgccaagacaagcttcttggtttcaaggagatggatatttgtgagtatgcaaggcaatcattagagagcgaaccgtacatattatggtttctacctccagttcttactgctgcagcaatgccgccacggtcaagcttgtttaagatataccttgttgaaatagataagcaactcggtgaagctgcttccaaagaccgaaaatgcaattgcggaggagatggaatagaccagcatcaaaactgtgagatttctgaaaggattcaatgtctctacacattccatgttcaaagaactcaactgacaattcagtagtggcagtagccatgggccacagttcaagacagtgcaggagatttgcagtatgcactgatatttcagagtaatttattttccaaactggccgctgtagttatttccatgtatgatatacatttttgcgtgatggaaaatttagccagatgacacattgactgacagttcatgcagattgtcaaactggatattgaatagattttgcctct

SEQ ID NO: 15872 - DNA, 1816 bp, Oryza sativa
  ref <308>: DATABASE ACCESSION NUMBER: AK066383
  ref <309>: DATABASE ENTRY DATE: 2001-12-06
gagcccagcatcccgtcgactcgatgatataccagcaaaaggggcaagtgtgagcaggcggcggcggagccatgccgatgccgtcgcgggcgcggcgcaggtccaaatcccggtggcctctcggcgagccccctcccggcctcttccccgctagggacgacctcctccgcctgctcgccgtcgtctccatcgccgccgcagcagccgctgcctgcagccttctcaaccgccgccccaaacccttgtgcgacagcggcggcgccgcctatacccaccatgattcatgccaaccatgccctccccatggacgatgcgtagacggaaacctggagtgcgtccagggattcaacaaatatggcaacctgtgcatagaggatgggctggtcagccaaactgctaccaagattgtactgcccctttgcttgctctcttgttcctttccctctcattttgctatgcataccttccttttactgcttctccacatatctctatatagtcacagttgctagagcggaggatctgcgatcaatatgcccgtgctttatgtggccaacctgccaaaatcttgttccaagagctcgatatcttaaacatggctgatgagctgttatccaagggttttgttggcctaagtcaggatggagctaaggttgcaaaaattaaggttctggacagtgcgcgggccttctttgagaaaacattcagctccgacggagtcgaagagtttaaatgtccagacctggttgccgagctttataggcccctgacctgtcaaattcggcaatggatctcaagaaatatcatgtctgtgacagcctttggtgtcctgttttcagcactgctctggattctttggactatttacaagagacaagcattatcaaagagggccgaacaaatatatgctcaggtatgaaattcctctctctctctctctctctcactcacacacacacacacacacaattcttccagttctttatcccatgacgaagggttatttgctgctaatttgcataaaacgacgaagtctgattaaccgtatagtaaacgttgttcttgctgtaagctatagctgttattgttttttgttggcaaaatttgattggagttactgcagtactagcattcacttttctggcgcaattcactagtacgtcagcagttccaccatctctttcaccttttccaagcatgagggaggtggtggctgtggggaaaggtggatactttcctttgtccaaaaaacagtagtaaatcatttgtttgttgcattttaatttttccataacttctttggaccttcttgtatttgtcttttgcctgttctcatacaataggtgtgtgaggtccttgaagataatgccatagatgcaaagattggcaactctgaatgtgagccttgggtggtcacgtcttggctgcgagatcatctgctagtcccacaagagagaaggaatgctttcctttggaagaaggtggaagaactaatactggaagattctcgcatagatcaatacccgaaagtggtcaagggagagtcgaaagttgtttatgagtggcaagcgagcggctcgctcagtggaaagaaaaaggttaagaagatgcaaggtgtagcagcaggcaagtcaagagccgatggtgcagctggcggcgccataaaacttgctgaagaactggatgcaggctagctagagctgccatgcgttatgtatgtacaaatgtttctcaagctactaggagagtatatatcatgatgtatgcttggaatgtactaaattaattgagttaatggagtacgtggtgtatatgt

SEQ ID NO: 15873 - DNA, 2746 bp, Oryza sativa
  ref <308>: DATABASE ACCESSION NUMBER: AK066384
  ref <309>: DATABASE ENTRY DATE: 2001-12-06
gattccctcgcaaaaccctcgtctcctccacactctgctcttctcgcaaaccctaatcccacgcgcggccacctcccatggcgcgctcgacctccctcaccgaggcggaggcggggatcacctgcttcgcctcctccctcccgggcttccgcggcgtcctcaagcaccgctactccgacttcatcgtccacgaggtcgcccgcgacggctccgtcgcccgcctcacctccttcgatctccccgacgagtgcgtggatgtgagtgaggaggacaaggcggcgccgtccgccgacgcggaccactcgcaggccctcgagtcgttccgtgcgctctgtggcgatgcggattgcgacgcgttgaaggggctcctcgagaaggcgtccgcgggggctgaggctgatgtatcgccggttattctctcgccggacgccgataaggctcatcgatcggaggtgcataatttcttcaagaggagcttcaagtttttggtcaccgacacggtcgaacacaatgatggagttcagagatgcattagggtgcggctgggatcaggagctaggggagggcggggtggcggtgggagaagtggtggtgggaggggaaggaagaggaagaacatgggtggttctgattggagagatgacaggccatttgatagcagaggatcaactagctggccaaatcatgttgggaagttcctaaggtttcacctttgcaaagagaacaaggacacacaagaagcgttaggagtaattgggaaaatgttaggacttcagtcacgttcattcgggtttgcagggacaaaagataaacgtgctgttacaacacaacaggtgactgttttcaagatatcagccaacagattggctgcacttaataatcgactatttggaattaaagttggaaactttagttatgtgaaggagggacttgttcttggtcaactaatgggaaatcgatttacaattactctgaggggtgttgttgcagaatcagaagacataataaaggcttctgtggagggcttaggaaagaatggatttatcaactactatgggttgcagcgttttggaagtggttcagtacctactcaccttgttggagctgctttgcttagaggagagtggagaagttctgtaaatttgattcttgatccaagggaaggagatatccttgatttattttatccaatcagcagttgcatacttggatatatagctgtgccaacttttgttcaacataacttaatactccgaacagagagatgacataagggagatgcgtgaacattacaaggagcatggtgatattgatatggcactaaggaacttccctcgacatcttgtagccgagaaggctattcttcaatgtttgaagaaatgccctggtaactatctgcaagcattaaagagtataccaagaacattacgaatgatgtacgttcatagttaccaaagttacctctggaaccatgctgccagtgccagagttgaaaaatatggcatttcgcaggctgtagaaggtgacttagtttatagcaaagagccccctcctggagaagcaacttcagttgatacttcagaaccttgcgatgaccaaataaattcatctgatattgatctatgttctgagacacttccagaagaaacaatccagtctgtgaagatagttgattctgaagatttattgaagggtgtctacacatttgaagatgttgtccttcctttgcctggttcgcaagcattatttcctggaaacggaattgctgacatttatcatgaattggctaaaaaggatggcattagcttgacagagaatgcacatggtgtcaagtaagtttctttattttactgtaaagatcaaaggcacctctaaaagtcaatacttagtatatgtgctatgacaagctttatatctttttgttctgatatcctactatattctcattctgttgtatatattaccttggcttgcatatttcaatttgctactttataccctaacttctatgctatatgatacaaactccatttttaagggagttttcaattacaagcatgaaaggaggttatcggcgggtgttccagcggcctattgattttgagtgggaactcatgacttatacagatgacacagcatctttagcagaaactgatttggatgttctgtccagaaacaaacctacaaaagccaaggaagtaaatgagactatatctagcgcgatttcaaatgctcaatcacatgattccaaggtggcaggaccattggatagctctatgccaggtagtgaaactggcttagtagaggaaaagtctgtcggtagctcagatatgttagcaaggaaattggccataaaattagcatttactctaccagcatcctcctatgctacaatggctattagggagttgctgaagacttcaacctcggtcacgtatcagaaaacactcgattgttaattttgttattgacatcaattctttatggggaatcttccaagccgcatcttagaggagttgacatagttaagcaacatgagttgcccaaatgaatcggcattgagatataccatgctgctcggcctgctcccgttcggtgcatactgaattgctgatgcacgtttgtgctattgtgggggttaaaaacttgttttgccactagaatatgtggcatgccataatattgtatgaacttttgtaaccaaacagggatattaaagttgagaacccttgcgaggtttccttct

SEQ ID NO: 15874 - DNA, 3063 bp, Oryza sativa
  ref <308>: DATABASE ACCESSION NUMBER: AK066385
  ref <309>: DATABASE ENTRY DATE: 2001-12-06
gtgctatttagaaaggagtatgcagaacttgatacttgtccagtttgtcaagcatcaagatggaaagatcctgtgaataagaaggttccagaaaaagtattgcggcattttccgttgatacctaggcttcaacgaatatttgctaccaagaaaacagcagaggaagcacaatggcataagttgaatagggaacccaaagagaaggaaatgtcccatcctgcagatggagaggcatggaaagattttgacaaatgctggccagattttgctgaagatgcaaggaacattaggcttggcctggctacagacggtttcaatccgtttggcaatatgagatcatcttatagtatgtggcctatttttgtgattccatacaactttccaccttggtcatgtatgcaagaatcaaacttcatgatggctttgttgattcctggtcctagatcgcctgggaagaagcactttgatgtttttctccagcctcttatagaggagttacttagtctttggtctggtgttgatacagttgatgctctgacaggaaaagatttcaagcttcgtgctgccgtgttgtggtgcattcatgactatccagcacttagtactttgtctggtcggaccacacaaggtttctttgcttgtctccattgtgacaaaaatcctctatcatattccataaggaacaagctttgttatattggtcactgtcggttccttcctaggcgtcatcgtctgcgcacgaataatgaatatgcctctctacatgaaagcaaagagaagccaggtacattcacaactgaagagctgttagaagaattggccaaggtaaatgatgttagaccaggtcaaaaaaggaagcgttcagagggacatgtgccaatttggggtaggagggttagtttgtgggatttaccatattggccatctttgaagcttagacacaatctagatgtgatgcacattgaaaagaatatttgtgaaaacctccttggtacccttcttggcatacatgggaagtcaaaagacaatgttaatgcaaggcttgatcttgctgatttgaatattaaaccagaattgcagttgcagccaaatggagatgattatcacatgcctgaagctagatacacattgtctagggaaaaaaagattaaattctgtaaatttttgaaagaaacaaagttcccagatagctatgctgcaaatatcgaaagatgcataactgcagagggaaccagcttgcatgggcttaaaactcatgactgccacattctgttgcaaaggatattacctgctggtatgagaggtattttggatgatgatatatgtttagtgattgccgagcttgggaaattttttagggaattgtgcagccaaacactcaacaaagatatcttggttcgaatgaagacagaaataccagctatactatgcaagcttgaaaaactatttccacccgctttttttgatgtaatggttcaccttgctgtccatttgcctgacgaggcaatgcttcgagggccagtgcaatttgggtggatgtatcctgttgagcgacgattgtacactttgaagaggtcggttaggaataaggcacgaccggaaggctcgattgctgaggcttatgttgcagatgaagccctcacattctgctctaggtatatggaggatgtggagactaggtttaaccgagcaccgagaaatccaggattctcagatccatcggccttcaatattgatgtttttgggcacggtgttaatctgattggtgcatgtgactatggttactctgaagattttgatcaaatggtttggtatatcctatataattgcgatcaggcccaggattatataaagtatgttctaacctctctatcttgtactcttgcacatttgcattttgatttaattgctgaaatctgtttgttcacagaatgtttcaaggcgaattacaggaagcaggggtgcaagcagctgatattgatagaaggactaggcttggatttgctacttggttcaggaaccatatgtggaggttgaacaattcagatattgtagatgatgacctgtttgccttagcatgtggccctgacctgagagtaagatcttactcttcatgtgttgtcagtggtgtccggttctgtactgctgagcgtgacataaataagaagactcaaaactctggagtggcgtgtgctggaatacataatggtcgggtaattgattactttggaaagttgacagatattattgagttgcagtacaacagcaaggatgatgggaatacaagaacggtggttctttttagatgtgaatggtacaagctagatggcaagaagactgcactaaaagatgatggtttttttagaagcgtcaatactggaagcttttggtacaagaaagattgtttcatactagcgactcaagctaaacagattttctacctgccagataataagcatggcgaaaattggcagcttgtccaaatgtttaagcatcggcatttatacaatgttgatgaacaaaatgcacctagtgcatctccgtatcaacagacacagtgcattgaggaagatgggagaagaccagaggtagatgagaatttatctgacctgcctttgaaccgagatgatgaagctcgccaggttgttgatgcttctgaagttgctcgacttatgaagcaaaatcgacctgctgaagatggtgaatcgtctggtgatgagatagaggacgacacggctgtggaatattggagtgaaggtgaagttgccccagttgaggtagatagcgatgatgagtagttcctgttgtgacatgtgtatgtgatgcccctattggcattttatgaacttatgtttgtcaacttaagtcagtgcgacaagtattgtctttgtgagctgagatcttttgtgacatcctgtccaaattgtgtgaattatatattctgtcagcatgtgaaaggccatcatgcctatatacttctaccattgaactgtctatgtgcttgtcaacatgtgaaagatggcatacatgctcagcttagctcagttctgagaaatttaattt

SEQ ID NO: 15875 - DNA, 2481 bp, Oryza sativa
  ref <308>: DATABASE ACCESSION NUMBER: AK066386
  ref <309>: DATABASE ENTRY DATE: 2001-12-06
ggggttggtgcttggctagccacggtattattgcgtgaaagagggggaggtgaggacgtgaggtgaggtgaggtgaggcagagtgaccacagcgacggcagcgtagccatggcgaccaggccgggccctttgaccgaatggccgtggcataggctggggaacttcaagtacgtggtgatggcccccgtggtggcgcacggcgcgcgccgggtgatgcgcaacgggtggggcgacctcgacatcgccttctccctcatcctgccgtcgctgctgctgcggatgatccacaaccagatctggatcagcctctcccgctaccagaccgcccgcagcaagcaccgcatcgtcgaccgcggcatcgagttcggccaggtcgaccgcgagcgaggctgggatgaccagatcctgttcaatgggttggtgttctacgcggggtacctggcgatgccgagcgtgaggcggatgccggtgtggaggacggacggcgccgtggtgacggcgctggtgcacacgggccccgtcgagttcctctactactggttccaccgcgcgctgcaccaccacttcctctactcccgctaccactcccaccaccacgcctccatcgtcaccgagcccatcacctctgttattcatccttttgctgaacatgtggtctatttcatactgtttgcaatccccatactgtcaacaatttatttgggaaatgtttcggccatgggcattgtggggtacattgcttacattgacttcatgaacaacatgggacactgcaattttgagttggtgccagagtggattttccaaatctttccaccccttaagtatctgatctacaccccatcgttccattctcttcatcatacgcagttccgcacaaactactcgctattcatgccattttatgactacatatataacaccatggacaagtcatctgacgagctgtatgaaagctcactgaaaggaacggaagaaacacctgaccttgttcatctcacgcatatgaccaacttgcaatcagcctatcatctaaggataggaattgcatccatagcctccaaaccgtacagtgactctgcgtggtacatgtggacgttatggcccttggcatggctgtcaatggtacttgcatggatttatgggtcctcagcatttgtcgttgagagaattaaactaaacaagatgaagatgcaaacatgggcattaccaagatacaacttccaatatggccttacgtgggagagagaaccaatcaacgacttaattgaaaaggcaatattggatgctgatatgaaaggggttaaagtgattagtctaggactactgaatcaggcaaagcagctcaatgggaacggtgaactatttagacagaagtatccaaaattaggagttcgaattatcgacggaagtggcttagctactgcagtggtgctaaaaagtattccttcagatgcaaagaaagtttttcttcgtacaggcacttctaagatagctcgtgccattgccattgcactatgtgacagaggtgtccaggtgatcatgaatgaaaaggaggtataccacatgctcaagtcacaaataccagagaacagggcaagctatttgaaactctcgagcgacaacgtacctcagctttggatagtacacaatattgacgacaacgagcaaaagatggcgccaaaaggaacaatttttattcccatatcacagttcccccttaagaaacttcgcaaggactgcacttacatgagcaccccagcaatgaggatcccggaggaaatgaagaatatccactcctgcgagaattggcttccaagaagggtgatgagtgcttggcacattgctggaatacttcatgctctggaaggatggaacatgcacgagtgtggggatgagatgatggatattgagaaatcatggtcagctgccattcggcatggattccttcctctcactaaagcttgacacctctggaagcatggatggtgtattccatgctagtagatgatgctatgatttccagcaacggcataatccattcattatctagcttgggaaccagatggattattcacttattatcttactatgtttgtaatactgagcttgggtactgataagtcatgaggaggcacagtgcaaacgaacttaattccaatagctcagtattttataatctatagtctatgtcagttctgtaacattacgtttatctcttatttgaatcttgtgggggaataattaaaataataggcaatgttttcttgtttagacttcgcaaagtaaaacctgactgatcgcacggtcagtgctcttgagacgagacaaacaagaccaggtaaagctaagcttactcgctggctcgctgctactatcgttttagccttcccttaaagtttgattcgacactgtaaaattcgcccatgacgctctgcacaaaatctttgaaactagtggcaacacagcaaaatcagatgc

SEQ ID NO: 15876 - DNA, 2172 bp, Oryza sativa
  ref <308>: DATABASE ACCESSION NUMBER: AK066387
  ref <309>: DATABASE ENTRY DATE: 2001-12-06
gtttatttttgtgacggagagagtactattggaaagatcagctagttggaaaatgccatctagttgtaactaatatgttggacaggggaaagttacattgctaaggtctaaagtggaagaattaagggttttttaacttttagtcatggtgaatcttcactgacttgataattgacttagttgtcttatgttggaagccacaagttccggattgatggaattactgagtcccactgcaaaaatcaccaagttggaaaatgatcaaaagatggaatttgttttttccgtaattttctctgattgaaatgattgtttaggtgttatcatccattcatcctaatagtagactaggatagtacgacataactgttctctctacatgctttgttttgtcatcattttgttgtgctactgtgaccataattgttgttatatgtgaatgtttggtggcatgatcatcctgaaattataacttgtcaattgtcatacttgtggtgtccatctctgttctggtgcatgtgccaagcaagctattgctaatgatctgtcatgttggtgtccatatgctgttggtagataaatcagttgttgagtttgatggctcattttgtacggttgccttgggaccttcatttagtctgtgttgtgttgcctaaatcctaatgcacagtaggatgtgctattttatccagttttcagttctagacggaaaccctgaatgctctggagatctggtgagaagtacattttcattactctagtgttatctgttcctgtagttcatgattaattctgtgtcatgtggttttgctctggtagcgcctgcctaactctattaggaagggtcttgtacgctcattattgtccccctaagttaggaaggtcatgcaccaaaccaaacttgagagctgcaaatgaacatcaccacacaagggtaataaatgattctgttatatgctgtctctcctcattctttttgttcagttacatctatatgtagtgatgtcggataaacaaacacctgttactttctatgtactttaagagcgaggtggaggtgaagttatcagtgtgtttttttatgaattactccccaaatttcttcagtagtatgcaataaggcttccatgtgtttgtttgttcttattatttgacaaccttctgagatcacattttaacatggaaaagcccgatacaacctaattgttatgtgtgggtaaaatttgcaattagggcgcataaacactgtcaaatgctccttagaacaaaagaatgaaagacatgttcgatgcaaagatcacattgtttttaataactctttaataacaatattaataattttgtaaacatgttaactaatcagtatggtcaatttccttttacaactatttatttctaggacatttaatgttttagttcttatcattcccagaatctttacaagataaatgtcgagacatttttcagagggcatattagcctgctcaaactgatcaatagagaattaggcactttgttgtctgatttgaccattttaatgttaatattttaattaaatttgtacataccaaagttagttgtgcagcttgcctttcctgatatagctttgtttgttaatatattctctgttttcttagtcaataccgtgcatgattctaaatatttttttgcttgaccattgttgtaatatttctttctgtttgtgttccgcaggtggcaagaattttgtagagcgctggctttcttctcttccaaactgattatttatccattcttctatggcttcgttatctttagcatttttatgtctctcgtatttgtaaatatatcgatgaagacatgaaccccagaaaacacccaacaaaaaagaagattaaaagttgaggagcagtggaccgagattccaacgttaaggtactcttgcagtgtactaagagtcatgaaaacgaaagattactgccacgtgctgacaacctgaagttgaatcgacgaattgttaagattaccattgatctacttgcttcgggatgtttaatctacctgtatatgatggcagtttacctcatttgtgtgactgaaattcttctgtacatatatgaaggcagaaacatttgagatgaactccaatgagaatatgcatttcttctgtatatataataaacgattgtccgt

SEQ ID NO: 15877 - DNA, 1799 bp, Oryza sativa
  ref <308>: DATABASE ACCESSION NUMBER: AK066388
  ref <309>: DATABASE ENTRY DATE: 2001-12-06
ggtggctgagcaccgtacgacgcctcccccgcccgcctctccccgacctcgtcgccggcgatggcctccgcctccaccgccgtggccagcgccaccgccgggaccacccgttccttcgagaagctatctgccccatggatgataggccggggacacgtggcgctccccccgtcgccggggcgttatcccgcggtcacggtggccgcggcgtcgcgtcgcaccggcgaaggtgggaggaggcggaggagagccaggggtgctgatcaggaggatggcctctccctcagctccgaaattgaggcatcaagttccactccccccgttcgcactaccgacaaggagagcacgaaacctgcatcagaaaccggaatcacaaagaaaggatcagccattagaagagttactttggtggtccttgctgcggttttcttcggcgttagcatcgccctgagggatggggttgggaaggcatctgaatattttgctggatatttattggaacagagtttgtcagtagacaatctctttgtttttgttctggtcttcaagtattttaaagtgccacaggaataccagaaccgggtgctctcttatggtattgctggagcagtgatcttccgcacggtgatgatcaccctaggagcagctacgattcagaggtttgaagcagtgaacctattattggctttgatcctgctattcacttcatataagttatttgctgaagaagatgaagaatctgatctatctgacaatttcatagtgaaaacatgccaaagattcattcctgtcactgattactacgatggtgatcggtttttcacaactcaagaaggtttatggaaagccacacctttgctgttgactgtggcagtgatcgaactaagtgatattgctttcgctattgactcaataccagcagtttttggtgtcacaagggatccacttatagtgttatcatcaaatatttttgctatttctggtttgaggtcactctacgtactcatttctgaaagcatgtctgaattggactatttgcagcctgcaattggtatagttttgggcttcatagggacaaagatggtctttgacttttttggttatcatataccaactgaagcttcgcttgctattgttaccacgtgtctaagtggtggagtaatattgagtcttaggaaagcatcaactgaagaaaaggacaagtagccggcttgctggagaggaggtcgaatgaaaatactgcttcctgagagctgctccttttatctggatgcaggggttcatcaatgcatcatttactttgatcaccagatgtagagcagtagaggaggtccttgaggagttttcacaagacgaccactgggcttgtacgtatagtaatgctcgtgtggttttgaaggcaaatcacaaccagtggttttgatgtgtgacccagtatagaattatgaggttgatgactgccaaggcatgaagactggtgtctgacatccaaatttaaggccatgtacgccttggttcgtcttgaagcagaagggttagtggaagatccaaaacagcagcagcctactaggatgactgactggcatggtaatcataattcttccccttttttttgagcttgtaaaacaagctcacaagcatgacatgcacaagcaatgtcaaattttattgcaacaaaacatatggtgtatagctgaccattatattttggttcgtttagctactgatccttattatgtggttatattaaactgttgtgattcgtgggtctgagagcattatctgaaatcccttgcaac

SEQ ID NO: 15878 - DNA, 2714 bp, Oryza sativa
  ref <308>: DATABASE ACCESSION NUMBER: AK098957
  ref <309>: DATABASE ENTRY DATE: 2002-08-28
gcgtcgtcgccgccggccccctttcctctccggcgcaggcgaggggggagcagatcgggtaggcggaaagctgtcgtcattcccccgccgcatcgcggcgaacggcgcgggcgtggcagccttggggttcgcgggacgacgcgcccccgacgcgcgcctgctttgagattgatgccactcgtgggctcgtggctcgactgcatcggtggtgcctgcgcacacggcgcaccccgtgaaggcttcgcgccttcgatccgctgctgagtttgaagaattctgaagcagcttcaatagcaccatccatgactgattgactgatcccatgacttataacctgcaaaatggcagaattagtagagacttgggtgcacaagtaagctttctttgttcccttactgcctgctagttagtgatgatgtaggaaaagaatgctttggtacttatcttatgaagtagcaacttaatcaggaaaaatagcatttgaatggtccttctctatatgcacaaattgcacttttatatacatggtccgttcttgtcattactgaaaggtttataaaacaccccagtgatagtgctggcagccttgatatgtccacatggacggaaaaagaaaaaaaaattgcagtggtttagaacccaaagctaaaatatcgattaggtgtagagtcagtttcagacttgtgaacttgaaatgttaaccaatcttgtaaaaagtagatgatcatatagaggttttacatatgtcttttttaacctagaaagagatactttggcatatcttttcaaattttgtgaatactaatttacagttcatcattgaaatatttattgttacaaagaactaaggtctcaattcaaagtatcaagtcattcattgcattgcaatgatacggtactttgcatatgtcatgtatttgtgtaccttcggtttggcaagctaatcaagtctagcatgctcacagcacaaggtttgcttccgcttcatcatttgtgggtttccacataacaaactgataaagtttagttgttttttttccttatctagtttttcccattttcatgaaagagctgtttagcccatacatagagttggtgcagtgaattgtactatatgtacagttttcctagacttgcacagatcaaactctccattttggtgggagcaaaaataggatgcagctcatcaaacatgtagttcagtagatacagactgcccatatcaccacttccagaaaaaggaggcgcataccatattcttcaccgttagcgaacaatattatgctgccattgctacctgcaggatttcaaagaagggtcccgatctgatagctcctagggttcaattacttgctctttgatttggagttttctgccagatagaaatgtggctgggacacaaggataagcttccttggttgactaccccataccattctagcacatgtcaaaatggcgtcaacgtaaactgtcttcagtgtttggacataggaaaagaccaagtctagagagtaagaacatgacaaaaaggctgtgtcactacgttgcgttaaaggaaatttacctggaagtatcccagatcacggcatgctttggcgatatcgttgaccacccgggaccgcaccgtgggatcatcaagactgaggtggccaaggttgatcactggcattggcggcgggtggagctcctgtgatggcagctgctcttgagggatacccttcgacgtgtcagacattgttgatcagcgaagaagccacacgcagctcagctgcaggttggtgcaaaaaaaaaccgccgttcttctctgttgtctgtgcggaagcagaacgcatacatgtgcataatacacctgatggatcctcctcacctggacagggggctccaaaggagaagtcaagttaggcgacgcatttccatccattcatgcactttgcagcgtctcgagatggactacatggatcctgtatctggtccaggagaggagaagccgctgggcataggcagcgtacctacctacgtacgctgggagcgcgtggtgtgcgatgttgcaccgcatctgcatcatgcacaagtagcaatactatatgaatcttgagtatgatgatgaattgatgatgctgagctacaggccaagctgcgcgacgcgtgcaactgggcgctggattttcttaagacccaaggaaattaagacgagcaagcggataatatttgtggggaggcaagttggtttgatttggccatacatactgtgttttttggctgtccaggaggggctccccccgggtcatgaaacctaaaccgctcgaaggtttcggcacttaaatgtcgcagtggcagcatcccaaaaaaggccgtttttggcagctctcgtaggtctgcaattgtgaaaattctgtggacagccacccaggtttcggttttgtctcctgtctagtcttggtggtatcgcggtgcagctgttcctgcaaaagagatggacggtcaggatcaagcgtggacttctccgtttttgttctctctgtgtgcgtttgttccttttctgcctacgtgtttgtatgtttcgttgtttagttgtttagtttggttctctgctagagcagtgtgatgagatatgaaatccttgtgtagaagtctagaagatactggagtaccctctccgtcccacaatataagagattttgagtttttgattgcaacgtttgatcactcgtctt

SEQ ID NO: 15879 - DNA, 3960 bp, Oryza sativa
  ref <308>: DATABASE ACCESSION NUMBER: AK066389
  ref <309>: DATABASE ENTRY DATE: 2001-12-06
ggccgaaccctccagactccgccgtgccacgcacggcggcgccgcccctctaaacccaccaactccggcgccgcctcgcccccgcacttatatgtcgctctcctccacctccacctcctccctcctcctcctcctctccccacgcggcaaccctaggcgcctcctccccctcctcctccctctccgcctctcctcctcctcctccgccgccgccgctgccgctgcaatgcctccccgccgcgaccgccaccacggcaagcagccgcagcagcagtggaagcccaaggccacggaccccgcggccgcggcgccggctgtggtggcggcggcatcctcacccgcgtcgtcgacgtcctcttccgctgatttcgccgggggggtcgagaggatgaccatctccccgtccccgcagggaggggcgtcgcaggtgtgggtgcccagggggtacgcgacctcggcgtcgtcgtcctcctcctcctcgtcggcggcggcggctgagcagcgcatcgacgctgaaaagctctccagggtgttcaaggccgccccgaacttcgaggtggacaacaacacgttcatccagtcgcagatcagggccaccttctaccccaagttcgagaacgagaaatccgatcaggagactagaacccggatgattgagatggtgtcacatggcttagctaccttggaggttacgctcaaacattcagggtctcttttcatgtatgctggccaccatggtggtgcatatgccaagaacagctttggaaatatttacacagctgtgggcgtttttgttctgggacgattgtttcgtgaagcttgggggaaggaagcacctagaatgcaagaggaattcaatgtttttcttgagaaaaaatgcataagcatttcaatggaacttgtcactgctgtgttaggagaccatggtcaaaggccaaaggatgattatgctgtgattactgctgtgactgagttgggtcatggcaagccaaaattttattctactccagaggtaattgagttttgtcggaaatggcgtctacctacaaaccatgtctggctattttcgacaaggaaatctgcctcgtcattttttgctgcatatgacgctctatgtgaagaggggacagcaacatctgtttgcaaagccctagatgagatagctgatgtagctgtaccagggtcaaaggatcatgtaaaggtgcagggtgagatacttgaaggcctggttgcccgtattgttagccgtgaaagttcagtgcaaatagaagaagtcttgaggaactatcccctgcctccattagatggagttggctctgatttaggaccaagtctgcgagaaatatgtgctgctaatagatcagatgaaaagcagcaaattaaagcacttcttgaaaatgttggaccttcaatgtgtccagaccattctgattggtttggatgtagtggccttgatgatcatcagtctccaagtgctaacagatcggtcgtcactaagtttttgcaagcacatcctacagactacacaactaagaaactgcaggagatgattcgtgtgatgaagcagaggaatttccctgcagcttttaaatgttattggaactaccacaaaattgactctctatcgaatgacagcttgtattacaaaatggtcatccatgtgctcagtgattctgtttttagacgctatcagcaagagatgaggagaaatcaagggttgtggccactgtataggggtttctttgttgatgtaaacctgttcaaggttaataatatgaaatcttccataccttcggaagacattgacacctcactgaaaaatatcaatggtgccttggattcaaattcgtcagctaaggatggtctggctgatgaggattcaaatctgatggtgaagctaaaattcctgacatataagctacgcacttttttaattcgaaatggtctgtctacacttttcaaagacggtccttctgcttataaaacttactacctgaggcagatgaagaactggggaacatcagcaagtaaacagaaagaacttagcaaattgctggatgaatgggctgtctatattagaaggaagtatgggaataagccactttcatcctcaacatatcttagtgaagctgagcctttccttgaacagtatgctaagcgcagccctgaaaaccaggctttgataggggcagctggtgacttggttcagacagaaaatttcttggcgatacttgaggcaaagagagatgaagagggtgatcttcaggctgaacgtggtactgcaccacctagtcctacatcaacatccttggatgtagttccgaaagccgaaggcttgattgtcttctttcctggtatacctggctgtgcaaagtcagctctatgtaaggagatattaaccactcctggtggcctaggtgataatcgtcctcttcatagtttgatgggagatcttattaaaggaaggtactggcaaaaagttgcggatgaacgaaaaaagaaaccatttcgaataacccttgctgacaaaaatgcaccaaacgaagaagtgtggaggcagattgaggatatgtgtaggacaacaaaggctgctgctgttcctgttattcctgattctgaaggcacagattcaaatccattttctcttgatgctcttgctgtcttcatgtttcgtgtacttcaacgggacaatcatcctggtaatctggacaaggcatcaccaaatgctggctatgttctgttaatgttttacaacctctacgatggcaagagtcgaagagaatttgaaagtgaactatatgagcgttttggatccttggttaagatgccactattaaagccagatagagccccgctgcctgatgaagtgaaagctattttagatgaagggatcagcttgttcagactgcatcaaagcagacatggaagagcggagccatcaaaaggtgcatatgctaaagaatgggcacagtgggagaaaaggttgcgccaggttttgtttgcgaacaaagactatctcaactctatccaggttccatttgactttgcagtgaaagaagtattggagcagttgaagtctgttgcgaaaggtgatcttaaaacgcctgataccgcgaagcggaagtttggcaatattgtcttcgctgctgttacgttacccccagcagatatattgggtgctctcccaaagctagcagaggacaccgacgccaacaagttcctcaacaacacaaaactcgcggataacctgaccaaggctcatgtcacccttgcccacaaaagagcccatggcgtagccgcggtctcaagctacggtgtctaccagaaccatcaagtccctgtcatcttcaacgccttcctcttctccgacaagatggccgccctcgaggtggagctcgggacggtgaacggcgagaagatcgcgtcccggaacgactggccgcacgccaccctgtggaccgccccaggcgttgcgccgaaggaggcaaacacgctgccgcagctagtcacggaagggaaggcgaagcgggtggccatagaccctcccatcaccatatcaggagtgctggacttctactgaccgaccaccctcttttttctttattttctggtggcctagaggttgaacattactaacaagtggtaacggcgatagctttgtagatgcatcgagttggagggctcttgttttttcggggattacaggacaggtcgaggtattgttttttatgtttgaatttggtgaaaaatgaaatataggagtatatgctgcagtataaataaaattatttaactgctgtctacgggcatatccgagctagcttaattactgagtagacatggataggcaagggcacaagatctaatctcagtagttgatgattgatcatgcgtgactcagcatttaaagtatcgagatgttctttcgctacctgccatcttaaacacggtttctgatgc

SEQ ID NO: 15880 - DNA, 1231 bp, Oryza sativa
  ref <308>: DATABASE ACCESSION NUMBER: AK066390
  ref <309>: DATABASE ENTRY DATE: 2001-12-06
tgatgtggatgcaataggcacccctcctccaagatcagatcatgctgctgcttgccatgctgatcgctatcttttaatttttggtggagggtctcatgcaacatgtttcaatgacttgcatgtcctcgatttgcaaacaatggagtggtcaagacccaaacaacagggtctggctccaagcccacgagctggccatgcaggtgcaaccgttggggaaaactggtacatagttggtggtggcaataacaaaagtggtgtctctgaaacacttgtgcttaatatgtcaactttaacatggtcagttgttagctctgtagaaggtcgtgttccccttgccagtgagggcatgactttagtgcatagcaattacaatggagatgattatctcatttcttttggaggatacaatggacgatacagcaatgaggtctttgctcttaaacttaccctcaaatcagatttgcagtcaaaaacaaaagagcatgcatcagatggtacatccagcgttctggaacccgaggttgaactttctcatgatgggaagatccgtgagattgccatggacagtgctgattcagacctgaagaaggatgacgcaaacgaacttttagtagctcttaaagctgagaaagaggaactagaagcagcacttaacagggagcaagtgcaaactatacagcttaaagaagagattgctgaagcagaggctagaaatgcagagctgacgaaggaacttcaaactgtccgtggccaacttgctgctgaacagtcaagatgtttcaaacttgaggtggatgttgcggagctacggcagaagctccagagtatggatgcattggaaagggaggttgagctgcttcgaagacagaaggctgcctctgagcaagcagcgttggaggcaaagcaaaggcaaagttccagtggcatgtggggctggctggtgggaaccccacctgataagtccgagtcttgatcacctatctatctttacccgacaatctcatacggatcgcgcagattcatatacgtgtaacatgtataaactttttgaatgtcttctacacttttccttttccttttttctttttatcgttttctggcattcgtgttcatttggcgacaaaacaataaggcgttttggcaagcgttatctgatattctcatagaaaattgttagctcatccttgtatcgcattcaattcttattaggtcgtaaaaaagcttgtatacg

SEQ ID NO: 15881 - DNA, 1213 bp, Oryza sativa
  ref <308>: DATABASE ACCESSION NUMBER: AK066391
  ref <309>: DATABASE ENTRY DATE: 2001-12-06
gaccgaggcgtgcgccagccactgagaaggagaagaggtcctccggatcaaagcggcaccgacgacgccggcgaggccactactaccatatcatagtacatactagtacaagactggagggctagtggggtgggggtacaatccaatccaatccaatcaaatcacatcgatcgacgccgcaacccagcagcagcagcggaaccctagccaagccaccatgagcaagctctgccagtcggcgtgcaaggccgccaagtctctcctctccgccaccgccgccgcctcctccccgcgcacctccctcctagccgaggggaggaacgcggcgctggccaccctcaccaacctggggaggaagaccctccccacagcttacgcctactcctaccaccacaactcctccgccgccgccgccggatggctcgctgccatccccgccgctgtttacatgctacaggatcaggaggcgcatgctgcagagatggagcgcacctttatcgccatcaagcctgacggcgtccaaaggggcctgatttctgagatactgtcccgatttgaaagaaaaggattcaagcttgttgccatcaagctggtggttccatccaaagaatttgctcagaagcactatcatgatttgaaagacagacctttcttcaatggattgtgtgacttccttagctctggccctgtgcttgccatggtttgggaaggagagggtgttatcaagtacgggagaaaactgattggtgctacagacccacagaagtctgaaccaggaaccatcaggggtgaccttgctgttgttgttggcaggaacatcatccatggaagcgatggcccagagactgcaaaggctgagattggtctctggtttgagcccagggagctggtctcttacaccagcaacgaagagaagtggatctacggggtcaactaaccggcgaatcatctcccctgtttgttttgtttttttttcattttctctcactttacctaattacatcaccatggaagagtgtaataaagttgcgatcgtgacatttggggttatgcccatgtgatctggcgcaaataagaggcctcaagaagaattgtctaccttcgattgtagagcgtgcactgagtaatcagaccatcaccttcactcaaatggtcgaacggatggtgatgccacttgttttgttattgttatataatggtactacatgttgtc

SEQ ID NO: 15882 - DNA, 2300 bp, Oryza sativa
  ref <308>: DATABASE ACCESSION NUMBER: AK066392
  ref <309>: DATABASE ENTRY DATE: 2001-12-06
taccacaccacaccaccccatctcccatctcaccatccccctttcccaccctcccgtgcgaacacacccgcggcgcggagcccagatcgggatcgcgacggatcggcggcggcggcggcgatgggaggcgaggcgggggagcggcggctggggagggcgatgagcttcgggatcccggacgtggcgctggggctggtgatggggttcgtggaggacccctgggaccgggacgccatctcgctcgtgtgccgccactggtgcagggtcgacgcgctcagccgcaagcacgtcaccgtcgccatggcgtactccaccacgcccgaccggctgttcaggcggttcccctgcctcgagtcgctcaagctcaaggccaagccccgggcggccatgttcaacctcatccccgaggactggggcggctccgcctcgccgtggatccgccagctctcggcctcgttccacttcctcaaggcgctccacctccgcaggatgatcgtgtccgacgacgacctcgacgtcctcgtccgcgccaaggcgcacatgctctcctcgttcaagcttgaccgctgctctggcttctcaacatcctccctcgccctcgtcgcccgcacctgcaagaaacttgaaacgttattcctggaggatagcataattgctgagaaagaaaatgacgaatggattcgggagcttgctaccaacaatagtgtccttgagacactgaatttctttttgacagatctcagggcatccccagcatatcttaccctccttgtgcgcaattgtcgaaggctgaaagttttgaagattagtgagtgcttcatgcttgacctggttgatttgttccgtacagcagaaatattacaagactttgccggtggttcctttgatgatcagggtcaagttgaagagagtagaaattatgaaaactactatttccctccttcattgctccgcttgagtttgctctacatgggaacaaaagagatgcaagtgctatttccatatggtgctgcactcaagaagttggatcttcaattcacattcctttccacagaggatcactgtcagctggtccagcgctgcccaaatctggaaatcttagaggtgagggatgtcataggggatcgtgggttagaagttgttgcacaaacctgcaagaaattacagagacttcgagtagagagaggagatgatgatcaaggaggtcttgaggatgaacatggtatggttacacaggtggggttgatggctgtagctcaaggctgccctcatttagaatactgggcagtgcatgtcactgacattacaaatgctgctctagaagccatcggtacatacagcagcagtcttaacgatttccggcttgtcctgcttgatagagaagcaaatataacagaatcaccccttgacaatggggtgcgtgctttactgagaggctgcaccaagctccggaggttcgcattttatgtaagacctggggctctatcagatgttggccttgggtacattggtgaatttagtaagacaatccgttacatgttacttgggaatgttggggagtctgaccaaggactgcttcaactctcaacaggatgcccaagcttgcagaaattggagctgaggggttgtttcttcagtgaacgtgcattggctgttgctgttttacaacttaaatcactgagatacctatgggtgcaaggatacaaggcatctcccaatggcactgatctaatggcaatggtgcgacccttctggaacattgagattattgccccgaatcaagatgaagtttgcccggacggtcaggcacagattcttgcatattactcacttgcaggaatgagatcagattaccctcactcagtaattcccctctatccttcggtttgagtgtatatgtctgataccaggttgcgaaactcacactctagtataggccgatattgttccaaattctacagtttgctgctcttattctgtttagcaatgagcacagaacaaatgacaaataaaagcaggatagctgttagttcgaggaacatattataacatcttgggactaagaattttattgcatatctgaggggtatcacttctgcgaaagctcagctcaattggccagcacggatatgtaaacttctccattttgattaggatcggacacacaattttgtaataatgttccttgttcaatgtttagtagtattatttgactctttagctttgtgtcacattgtctcttggaagatcgccgcactgtgttctaataagtcattcgctgtacaatatttttatcatcc

SEQ ID NO: 15883 - DNA, 897 bp, Oryza sativa
  ref <308>: DATABASE ACCESSION NUMBER: AK066393
  ref <309>: DATABASE ENTRY DATE: 2001-12-06
gatgatcaccgcctccctcctccccctccccgcgacttcctcctcctccggccgccgctccctcccgccgccgaccaccaccttcccgagacctcctcctcccctccgccgccaccgccacctctcctcctcctcctcctccgcgtcgtccacggagagcgacggcggcggcgggagcacgaacgggtcgctgccggggctcccccccgtggtcgtcgaggaggaggaggaggagttctgcccggtggagtgcgtgacggagttcaagacggaggaggagctggcccgcgtcctggagcgcgccaaggcgacgggggcgctggtggtggtggacttcttccgcccgtcctgcggcagctgcaagtacatcgagcaaggcttcatgaagctctgcaagggctccggcgaccacggctcctccgtcgtcttcctcaagcacaacgtcatcgacgagtacgacgagcagtcagaggtggcagaccggcttcgcatcaaggtggtgccgctgttccatttctacaagaacggggtgctgctggaggcgttcgcgacgcgggacaaggagaggatcatcgccgccatccagaagtacaccgctccatcgtcgccgcctgctgaatcagaggagccatcacaggagggatgattccacacagggttgagttgcgtgtcatgatctgaactcaaagtattagcgatctcactacaacgaagaaattggcattctatataggccagtgtatcattaaattgttcagcacaaagaggatgccgctatagttatagacttatagttaacactgctgcatcttttgtgctacagcacaattgtaccattcctacggggtgtacatttcccccttaataataataataaagaaaagaaaaacttagccg

SEQ ID NO: 15884 - DNA, 1656 bp, Oryza sativa
  ref <308>: DATABASE ACCESSION NUMBER: AK098958
  ref <309>: DATABASE ENTRY DATE: 2002-08-28
gttctggccaaattcgcgcacctcctccacctcctcccccatctcccccagatctcgccgcgatggccaccgccgcggccgccgcgcgcgccctcctcctcctcatcgccgtcgccggagcgctcctccgtcccgcggcggcggagatcaagcaggagtccttcaaggacgactcccgcgcgtccatcctcttcgagaagttcgggttctcccgccgtgggttcgtgtccatcgccatcaccggcgcgaggacctcctcgaagctcgccaaggcggagccggatcagttcgggttcttcctcctctccgacgaggcgctcttcgaggccatctacgagcagccgccgcccacggatctgaaccccaaccccgagcccaacccgggatgcgtcctctccagcccctacgtcaagccgctcttcagcttcgccgacctcgacggcaacggcaactacaaaaagaccttcccggtcacccaacccgacgagtacagcctcttcttcgccaactgcgcgccggagacggccgtcaccatggaggtccgcaccgacatgtacaacaccaacctggatggctccaaggactacctctccgtcggccaggcccccgtcccggcgatctacgccttcttcacggtctgctacctcgtgttcttggccgtctggctctacgtcaccctctaccgcaaccgcctctcggcgcaccgcatccaccacctcatgtccggcctgctcgcggcgcgcatgctctactgtatctccgcggccgaggaccagcactacatccgcatcgcagggacaccacacgggtgggatgtgatgttctacctgttccagctggtgaagggtgtgatcttgtttgctgtgattgctctgattgggaccggttggtcattcctgaagcccttccttcaggacaaggagaagaaggtcctcatggttgtgatcccattgcaggttgcagctaacattgctgcagctgtggtcggtgagactggtccattcttgcagggatgggtaacatggaaccagatcttcttgtttgttgatgtcgcctgctgctgtgctgtgctcttcccggttgtgtggtcgatgcggtcgctgcgggagtcatccaagacagacggcaaggcggcccgaacccttgccaagctcacccttttccgccagttctatgttgttgtgattggatacctatacttcactaggatcattgtgtatgctctgaagacaatcaccaactacaagtacagatgggtgagtgttgccgcagaggaggtggccactgtggcattctacctgttcatgttctacatgttcaggccagcagagaggaaccaatatttcgctcttgatgaggatgaggaggaagctgcagagctggcactccgggaggaggagtttgagctctagagtgttgtgatccagtgagaggatacatgatgggaaatacagcctgacctgttcaatttctcctccattgatgtcggtcatactatacagatgcaggatttagcctatatttatctatgtgttatggatatattcactcttttcacttctttcttctagcatcaaatgttgttgagaagtccaaagataattgggctgcttgtgttgcaaattaggggcatttattcaatgttgccattttgcc

SEQ ID NO: 15885 - DNA, 1109 bp, Oryza sativa
  ref <308>: DATABASE ACCESSION NUMBER: AK066394
  ref <309>: DATABASE ENTRY DATE: 2001-12-06
gggccgccaccacgccttccgtcctgcgctcttgccgctgccgctgttgacccggttgctgccgccgtatttgcgccgccgccatggccatacccggaggccgcagccgtcgtcatccatcacaaccggcgttttctttccgttttccttcttcccgagagaagggtaccgagagggtgtacaggaggaagaaggaaaggaaaagcagagcaacgttgaggaatttcagcgatttcgcaaattagggaaatttgtcgcaagctatgccgcctcggatagccaatcgaggccgtgggagaggcggtggtagaggtcgtggtaggggccaccataatgaagaagttgagaataatcatgataatgaagacgttgggaacaattcgattgctgaatccactattcctaatcgtggaggttgttggcggttgttaaatgccgattctataccgccaacatctgcataagttcggataataaaacatccaacatagtgataggtgcttaatctcacatattccacaagtgttggtgtatatttgtatgcagatgataaaccctgaagttgggaggaaaatcagacaaagtgaggagaattatgtatccatgcaaggaggggttatgaacttcatcgaaacatcagcaaggaggggttatgaacttcatcgaaacatcagtgaatcaactcaaaactccgagaaatggataaaggaggtccaggggagaagatgggccaagggctagaccaggagggcctagcctaggttcggccgaacccccctgatcaccgttgatcctggggtttggcgtggacgctccagatcactccccaatgacggttgcggggcagttcagacattaccccttcgccaaccgtcatacctaactctatataaaggcttcactccctcatttcacacacacactttcaagcttgacctgaattataagaggctctattgtactatattgtatattagaataggaagagagtagagtaggagtcagaagaattccggagttgtcggtaatcttctcctatttcttttattttgtttattactctgaattcaatataatattcttcttgagtaatttagatttgtcttgtg

SEQ ID NO: 15886 - DNA, 1700 bp, Oryza sativa
  ref <308>: DATABASE ACCESSION NUMBER: AK066395
  ref <309>: DATABASE ENTRY DATE: 2001-12-06
gtttgttgttgttgctgctggttgccgcacaaccgaaaggggggattatttggccctctttctctttcctttcgcaggaagatttggtgattcttcttctgagggctcctctaaggatttgggaggatggggaagaaggggaagtggtttggagctgtcaagaaggtgttcagccctgaatccaaggagaagaaggaggagagactgaggagaaaattagcagctagtaacccgaacccgccagatctaaccccttcggcttctctggaagtcaatgtttcggtgccaccccctccacctcctccacctgttcaacagattgaagaggttaaggtccctgaagttgagcaggagcaaagcaaacatgtcactgtggaggctgtacctgaggctgtccccgtacccgcacagacatcgtcattgccacctggtgtatcaagggaagagcaagctacaatcaagatccagaccgccttccgaggttacctggcaaggagggcattacgagctctgcgggggcttgtcagattgaagtcactggttgagggtaactcggttaagcgtcaagctgcaagcactctgcgttgcatgcagactctagcacgggtgcagtcgcagatacgttcaaggaggctgaaaatgtcagaggagaaccaggccctccagcgccagcttctgctgaaacaggagctggagagtttgaggatgggggagcagtgggatgacagcactcagtctaaggaacaaattgaggcgagtcttataagcaggcaagaggctgcagtaagaagggagagggcgctcgcatatgcattttcacatcagtggaagagcacttcaaggtcagtcaacccaatgtttgtagaccctaacaacccacaatggggatggagctggttggaacgctggatggcagcaaagccttgggaggggcgtgctgggaccgacaaggagagcaaccttgaccgtgcatcagcgaagagtgcaagcttgaatcttggagagggtgagatcacaaaagccttcaactccctccgctaaagtgtcaccgatctttgcaaagaagaaatccgcgacaccgaagaatgggctctcacaggttgatgacgacgcgaagagtgtgttcagtgtccagtctgaacgaccgaggaggcacagtatagccacgtcaaccgtgcgtgacgacgagagcctcgcaagctccccatctgtgccaagctacatggctcccacaaaatctgcaagagctaagttgcgcctccaaggatctgcagtgaccgatggtgcagagacaccaccggagaaagtagcctctgttggttcagtgaagaagaagctgtccttccaagctggaatggcgccgccttctccgatgaggcggcattcgggccctcccaaggtggaggtggtgaaggacattgctgagccaccacagccagaggccttggtgatcaatggtggaagcaagtgactcatatgacaagtaccaggagggagcaatggattctgcagatatatttcatccaatgaacaaaggtttaagattatatatcagctgtatgagttgccggcattgtttttccagttataaccacattatttgctctagcagattcgcaagtaccgtgccagtcgattccatttgttgtttctgtaaaactatatcgatttgtcacttgaaacctttggtgtttgtatgt

SEQ ID NO: 15887 - DNA, 1392 bp, Oryza sativa
  ref <308>: DATABASE ACCESSION NUMBER: AK066396
  ref <309>: DATABASE ENTRY DATE: 2001-12-06
tgctcgcaaaactcacccaaaagagcagcgtcgcctctcctcctcctccctaacccctacgcttccagaaccttctcgaagctcccgctccccccccccttccgctccaatggcgaaggaaccgatgcgcgtgctcgtcaccggcgccgcaggacaaattggatatgctcttgtccccatgattgctaggggtgtgatgttgggtgctgaccagcctgttattctacacatgcttgacattccaccagctactgaatctcttaatggccttaagatggagctggttgatgctgcatttcctcttttgaagggaattgtcgcaacaactgatgttgtggaggcctgcactggtgtgaatgttgcggttatggttggtgggttccccaggaaggagggaatggaaaggaaggatgttatgtcaaaaaatgtctccatctacaaatcccaagcttctgctcttgaggctcatgcagcccctaactgcaaggttctggtagttgccaatccagcaaacaccaacgctctcatcttaaaagaattcgctccatccatccctgagaagaacattacttgcctcacccgtcttgaccacaacagggcacttggccagatctctgaaaaacttaatgtccaagttactgatgtgaagaatgcgatcatctggggcaaccactcatccacccagtaccctgatgttaaccacgccactgtgaagactcccagtggagagaagcctgtcagggaactcgttgctgatgatgagtggttaaatacggaattcatctctaccgtccagcagcgtggtgccgccatcatcaaggcgaggaagcaatccagtgccctatctgctgccagctctgcatgcgatcacattcgtgactgggttcttggcactcctgagggaacatttgtctccatgggtgtgtactctgatggttcgtatggtgtgcctgctggtctgatctactcgttcccagtaacatgcagtggtggcgaatggacgattgttcagggtctcccgatcgacgagttctcaaggaagaagatggacgcgactgcccaggagctgtcggaggagaagacgctcgcttactcatgcctcaactaaaactaagcaatacccagagggacagatagtgagcgattgcccgctcccgtgtttttgaataaaagagacttttaagttccatcacatagaaactgtttatctcagaccgctgcacatcgcgagatgtggagcgcagatgccgttgctggttttactccagtgtgtattgaggctttgtactagctcccttttttttgcctggtgattcgcaggacatttgctgaaaacattgaacccatttgacatctgatggaatcatggaccagtagcaagtacattttgcg

SEQ ID NO: 15888 - DNA, 1494 bp, Oryza sativa
  ref <308>: DATABASE ACCESSION NUMBER: AK066397
  ref <309>: DATABASE ENTRY DATE: 2001-12-06
gacagatcaacgagggagaacttattctccctccactcacactcctcgcctcgcctcgcctcacttgtacccttcgattctctcccgtttcgtcgccctccagagctcgtggatctctcacttcggggcgggcgcgcgctagcacaatgttcaccggatgtggtctcttcgcctgcgtgcgccggtgcgatggcggcgacgtcaggaagcgcggggaggcaggtgcaatgagctcgcgggtggcggccgatccggccggcgtggaggaggaagggagctgcaagaacgtcgccgccgcgtcggcgaggcagctcgcgtgggcggacgtggagtccgtcacgggggggttctcgtcccgggtgatcgggcacggcgggttcagcacggtgtacctcgcgtcgctctcgtcctcccgcctcggcgccgtcaaggtccactgcagcagcgagcgcctgcaccgcgccttccgccaggagctcgaggtgctcctctccctccgccacccgcacatcgtccgcctgctcggctactgcgacgaacgagatgaaggtgtgctggtgttcgagtacgcgccgaatggtgacctccacgaacggctccactgcagcgaggtcgcgggcggcgtggcgtcggtgctgccctgggcgcggcgcgtggcgattgcgttccaggtggccatggcgctggagtatctccacgagagccgccacccggcggtcatccacggggacatcaaggcgtccaacgtcctcctcgacgccaacatgaacgccaagctctgcgacttcggcttcgcccacgtcggcttctcggccacggtggggtgcaggccgtcggcgcgcgccgtcatgggctccccgggatacgtagacccacacctcatccgctccggcgtggccacgaagaagagcgacgtgtacagcttcggggtgctgctgctcgagctcgtgacggggaaggaggccgtctgccgcgacaccgggcggcgtctcactgccgccgtaggtcccatgctcagcgaagggaaggtggccgacgttgtcgaccggaggctcggaggcgagcacgacggcgcagaggcggctgtcatggcggagctcgccatgcagtgcatcggcgacagccccgggctgaggccgtccatggccgacgtggtgcgcgcgctccaggagaagacctccgcgttggcttcggccgttggatcgagattggaccgcaagatgatgttttaacttttctgggtgtagactgtgaatagtaccagtattttagggtaggtaggagaagaatgtgtgtactgtgtagtttgagaaggtagattagtttaagcctttggatcagatagaaaattttgtgatgtcatggcatcttgtagcaccagtgaacgtatattagtagttcagtaattaaattctttccttgtagatcgcgtgtattaggtagtagtactttagatggttggtggtggacaagcaatttggtttcattttgggt

SEQ ID NO: 15889 - DNA, 1525 bp, Oryza sativa
  ref <308>: DATABASE ACCESSION NUMBER: AK066398
  ref <309>: DATABASE ENTRY DATE: 2001-12-06
gaattcgctcgcttaagccgccggcaaatcaacccaaccccaaggatgcaaagaattttgggtgggaaatcaatggggacattaacttcaactggaaaaggctgctggaaaataagactcaagaaattgttagactaaatggagtataccagaggattcttggcaattctggtgtgacaatgattgaaggggcaggcagtttggttgatgctcatacagttgaagtcacaaagccagatggttcaaagcaaagatatacagcaaagcacatattgatagcaactggtagccgagctcaacgtgtcaacattcctgggaaggagttagctattacttcagatgaggccttaagtttggaggagctaccaaaacgtgctgtaatccttggtggcggatatattgctgttgaatttgcttctatatggaaagggatgggtgcgcacgtagacttgttttatcgaaaagagcttcctctaagaggtttcgatgatgagatgaggacggttgttgcaagtaaccttgagggaaggggaatcagattacatccagggacaaatctatctgaggtgagttaagctgacatcctaaagtgcattttgattcccatgtgttctgttttcacgataggttttgatctgtttcttttttatgtaaaccagttgagtaaaacagccgatggcataaaagttgtcactgacaaaggagaggagatcattgcagatgttgttctgtttgctacaggtatttaggatagttcaatgctgaaagttatgttctctgtcactttaataatttctttgaatacatctctcttgatgactgttctgtgctggatgaaaaaaaatcatgtatcttctgatatttcacatggtcaagcaccatatgcatgtttgaaattgatcaatgtcatcctcacaacatttttttttatctcttgttgttgggaattgagatgctcaatatgagacattctacttttcacactatatttggaatgtggcatttatcctgattttcttttctttgaaggaaactttaatattgttgctatgcctggtatttaattgcgtgcaggtcgcacaccaaactcccagaggttgaacttggaagctgctggtgttgaagttgataatattggagctataaaggttgattttcttgccttattaattgaacccttacctgttaggctgttagcttgctgaagacatatttgttcatctgaaatttacttctcgtatttccttggagaaaacttacgcgtgaacctatgtgagaccatcttaggcatttaattggccattatctttgtatgatattctttgagactacaagtaatttgtgttgtttattcaatgttctatttttaggttgatgattattctcgtacatcagtcccaaatatatgggctgtgggtgatgtaacgaaccggataaatttaacacctgttgcactgatggaggctacctgcttttctcatcccaccactatcggtagtgggcttgagtgaacagcaggctttgg

SEQ ID NO: 15890 - DNA, 3210 bp, Oryza sativa
  ref <308>: DATABASE ACCESSION NUMBER: AK066399
  ref <309>: DATABASE ENTRY DATE: 2001-12-06
ttccggtacagccaagtcctaaacacctttgtaccttttggcatctcaattctttggttcttcacaagctacacatggagaatcagcctgtgctcttcagtgctgtttttatcctctatgttagctttcttgggcccttctgcgccagctccggcgaagagagctttgtctactccggctttgccagcaccggcgcagccaacctcaccctcgatggctcagccatggtcaccaccacagggctccttcagctgacagacagcatgcccaatatccaaggccacgcattctacccaactccgctccggttcaagaagcaatcgaatggcatagtccaatccttctccgtggccttcatgttcggcatcatctccccgtactccgatgcgagcaccgacggcatggccttcgtcgtcgccccaaacaagggcttccccgatgccaaggcggcgcagttcttgggcctcctcaacatcagcagcgacaacagcacaagcaaccacatgttcgccgtggaaatcgacaccgcgcagaacaccgagttggacgatatcgatggctaccacgtcggcatcgacatcaacagcctccactccaagaaatcccaacacatcggcttctacaatgaccagcatggtgggctcttgaagaacctgaccctcacgggcagcaactgcaagccggtccaagtgtgggtggactacgatggagagaccacacagatcaatgtcactttggctcccatcaaagtgaccaaacctacacggccactgctctcagtccccttcaacctatccacagtgctcactgaccaagcatacattggcttctcggcagcaacaggtccgctcacctcacattactacgtgcttggatggagcttcgctatgaatgctcctgctccgcctattgaaatctccaggttgccgaggctcccttgccctggagataataggttgcagaagatcttgcagatcctattgccaattgtcgctgtaggattgatcttcattgtagtcatgatacttgtgaggaggcagcagagatatgcggaattaagggaagattgggaggtcgagttcgggccacaccggttctcatacaaggatctgttcaatgccacagaaggtttcaagagtaagcacatactcggcgtgggagggttcggaaaagtgtacaaaggagtgcttcggacatccaaacttgaggttgctgtgaaaaaggtatcacatggttcaaaccaagggatgaaagagtttatctctgaggttgttagcattggtcaccttcggcaccgcaaccttgtgcagctacttggttattgtcgacgaaagggcgaactcctactagtgtatgactatatgccaaatggtagccttgacaagtatctatatggtgaagacaacaaacctgttttaaattgggctcagaggatgcaaatcatcaaagacgtggcttctggcttattctacctccatgagaagtgggacaaggttgtcatccaccgtgacatcaaagcaagcaacgtgctcctggatagtgaaatgaatgcccggttaggcgactttggtcttgcaagattatatgaacatggcaccaacccacagaccacgcacctggttggaaccatgggattcatagccccagagctggcacgcacaggaaaggcatcccctctcaccgacgtgttcgccttcggcacgttccttcttgaggtcacctgtggccggtggccgatcagcaacagtgcgcaccacggccgaaagatgttggttgactgggttctccagcactggcaccagggttcgctgccagagacagtggacccgaagctgcacggcatctacaacgtcgatgaggcatgcctggtgttgacacttgggctgatgtgctcacacccaatacccggagcaaggcctatcatgcggcaggtcatgcaataccttgatggagatgcaccgctgccggagtttacaccggcaaccctgaactccagcttgctggcaataatgcacaatgaaggggtcgacccatacgtcgcacagtacccgtggtcagggaatagcttgggcacaatgacaccagacatcttgtctggaagatgagacctgcacataatgcatttgttagaactttcaagtgcttgcctgcttaggcaaatgacaggcaattataaaatgtcctttgttgtagtatcattaggtttaccttacttgtagaagtgcagtgtattttgattaactgtaaatctgtgcaagttactgtgattggattgattctatggtgaatatagatggaggtttgtgaactgcaaagctatgtggatcagtcatcagtgggtagcatgtaaagtcgtgacttccattgtcagcaaaaactgaaatatttacttgagttgttacctgtcactgcaattgatgtctgtctggaaaaaagaagccaattaaaacattgaagcaggctcagcccagatcgaccgacactgcttctctctacacatccatcatggacccaggtagttgcagatcagcgattcctcaagacagattcaaagaccaagggcccagaagtttgccgaatcgacaatgcagtcttacacagcttcaagccttcaaagacagattcaagattcctcaaggaatatagctacaccaatccctgaaagttggaaggaaaaaagaacaggctgaaaatttaacaccaacttctgtcaatctaatatcagaagttcagaacaaaggtggaattcagagacttcattttatttcagaatgtccatatgtcatcctgacaccagcatgaaacaccaagcttgcagacttccaccagaacaaatggcattctcaacaagaggggaaaacacagcccaagaaggatagcttcgacagatcactagttggtctgtgtgcaaagaaaatgatgtcactttctgtttgtccagagaagacaaggcagaccatgcaaagtcatcaatgcactgggaatttgtcagacaacatacctttgctacttacatcactgggttgaaacttgattcccagtcaaggatgccgcctccaagttcagaaaaatatagcttctgtattaatattcagactgttgagatatcccattggccaatgttttgttcataccacttgttagctgctatactatgaccaaaggagtgggttgactattagtaggcaccaatgaaaaattacgtgattg

SEQ ID NO: 15891 - DNA, 1416 bp, Oryza sativa
  ref <308>: DATABASE ACCESSION NUMBER: AK066400
  ref <309>: DATABASE ENTRY DATE: 2001-12-06
gagagctccgtatcaccggcctctttcccttcccttcccctccgatccaatccccccttctcctcctcgcggcgctcgctgagcatggcggcggagggggaggccaagaaggacagcgccagcaaccctcccgggggaggaggcggcggaggtggaggggaggaggaggaggatagcagcctggctgtcggggaggcggcggtcggggtgggcgaggctggtggaggaggaggaggaggggagaaggcggatcgagaggaggaggaggggaaggaggatgtggaggagggcggcgtgtgtaaggatctggtgctcgtcgaggacgccgtccccgtcgaggatccggaggaagccgcagcaactgcagcacttcaggaagaaatgaaagcgctcgttgaatccgtcccagttggtgctggggcggcattcaccgcgatgcaactacaggagcttgagcagcaatctcgtgtctaccagtatatggctgcccgtgtgcctgtgcctactcatctcgtcttcccaatatggaagagtgttactggtgcatcttccgaaggcgcccagaagtacccgacattgatggggttggcaacactctgcttggactttggaaagaacccagaaccagaacctgggaggtgccggcgaactgatggaaagaagtggcggtgctggagaaatgcaattgcaaatgagaaatattgcgaacgccatatgcaccgtggccgcaagcgtcctgtacagcttgttgtcgaggatgacgagcctgattctacctcagggtcgaaaccagcatctggcaaggccaccgaaggtggcaagaagactgatgacaagagctcaagtagcaagaagcttgcagtggcagcaccagctgctgtggagtctacatgattgatgcagcatttaggagctgcataaagagcataactgtgctggcaattagagttcgcttcttattgtaatcctgaaaagactgtagtctggtctagctataacctcatcaagcaagaaaagtgtctgtggaaagaagccacaaaaactttcatttagctgtcactgaaattttcagtttaggtgtatagtttgatttagctttgccgtgccctctgccttcaggcagatgagcggcattattggataaatcctctctgactgacaatatcgcattgtgactcaagaagccgatggaaggatctgcgagactagatacgaagctatttgttgtgtatcattttatatggcctgcacaattgtgtgattttgtcagttgcataacatgtggaagatccataattttatgcactatggagattcaattaccttcctgaatgtctgagcttcgacatgttattggttattgtaacttaaaagcaacctgagattcaatgtgaaagggttttagattccagcttc

SEQ ID NO: 15892 - DNA, 3439 bp, Oryza sativa
  ref <308>: DATABASE ACCESSION NUMBER: AK066401
  ref <309>: DATABASE ENTRY DATE: 2001-12-06
gacgggacaatcagtcgctactcgctggagcgaaccaagagcgccgacctgcaaatctccaaaaccccggtgtactgtcgcctcaaaccccgatctccccctccggccgccgtccgccgccgcggcactccggccggcgggatgagcccctccgggcggctccccgcccccttcgtcttccccctcgtcctgctgctgttcgctctggtgccgtcaccggaggcggccgagtccacgccggggacgcggacgcgcaagatcggcggcgccgcctcggtgttctcgctcttcaacctcaagccccagaacaagttctggtcggagtccgtcatccgcacggaattcgatgacttggagggctcaacatcgcgggactccagcaagaaggcgctgctcaacttcactagagctggtaatattgccaactatatgagccttgcagaggttgattctatatatctttcagtacctgtaaacttcatctttataggatttgatggaaaaggaggtcacgagtttaaactgggacctgaagaactggaacgctggtttacaaaaatagatcacatatttgagcaaacaagaatacccccagttggcgaagttcttactccgttctacaagaccagtgttaagaaactaaagcaatatgaccttcctttaatcagccacataaatcacaatttttccgtacatgcagtacacatgggtgaagatgtcatgtctgtttttcaacatgctataaaagttctatcccgtagagaagatatcacagattcaagagaaggggcagaagcactttggcaggtggacagtgaccaaatggaacatttattttcaacacttgttgatcaccttcaaatacaagaggcatacaacatcttcatacttaatcccaaaaccattggcaagagtacccagtatggttatcggcttctctgagtctgagatcaacttactcagggagaataagaccctgcaagctcggattcttcaatctaaaagtgacaagagactctatctggatattgaaaagggagtcaacagaagacccttgtatgagagtcatcctttatcatcattttcgtggacatatctgacaatatggatatgggggattggtcaaagaagtgcaaggaagccttaagcaattttgagctgttgaaggaaggaaagagcaaagatgatattatttatgacaaagctgtccaggtattacatggcaaaaaggatgagttgcatgatatatttgagagtgcactcaagtccagtgatttgaagggtctgcatgctgaatgccttacagatatgtggattggcagagacaggtttgctttcattgatctgagtgcagggccatttgcctggggccctgctgttggtggggacggtgttcgtactgaacttagtctacccaatgttgcaaagactgttggggctgttgcagaagttatagaagaagaggctgaagctaaattacaagatacaatcagagagagattctcatcttttggcgagaattaccatgcagtagatatcctattggcagagattgatgtatacgaactttttgccttcaagcattgtgttggaagaagggtacagcttgccctttgcaaagaacttgatgagagaatgcatgatctgaaaagtgaactggagggttacaatactggagattcggatgatattaataagaagaaagctcttgatgcattgaataggatggaaaagtggaacttatttaaagatgttccagaggaacatcatagttacactgtggctcgcgattcattcctcgcacaccttggttccgtgttatggggttctatgagtcatgtaattgctccttctgtttctcatagggctcaccattactatgataagttgtcgtttcaactgtactttgtgacacaagagaaagtcaggaacatgaagcagtttcctgttaatgtaaaatcagtaacagagggccttagttctgtgttactacaattccagaagccaatgttcagtcaacgcatgttgtcattatcagaggatcctgccttgatgatggcattttcaatggcacgtcgtgcagctgcagtcccacttctgttggttaatggtacctataagtcaactgtccatacatatcttgattctgccattctccaacatcagctacagaggttaagcgagcacaactcgctcaaaggaggacactcaaatcacaggtcaacattggagattccaatattctggttcatacatagtgaacccctattattggataaacattatcaagccaaatctctttcaaacatggttgtagtagttcaatcagaagttgattcttgggaaagccacttgcagtgcaatgggaggtcaatcttatgggatttgaggagaccagtaaaagctgccattgctgcaactgccgagtatgtatctggtttacttccttcacatctggcttatagcccagctcatgaaactgcaacagaggactggacttggtctgtgggctgtaatcccttatctattacttcaaaaggctggcaactttcggagtttcaacgtgatgttattgctcgtaactacatcattactgcagtggaggaatctatacaaatcatcaattcagcaattcaacaattgattacagaaaggacaagtgaacgaggctttaaacttttcaaggctcaggagagagtgctggttgaaaagtataattctgttgttagcttgtggagaagggtttctgctatgtccaaaggattacgatatggtgatgctgtaaagcttacttcaatgctcgaggaggcttctcatggatttgctaatgctgttaactcagccatttcaagtctacaccctgtgcaatgtactcgtgaaagaaaagtcgacgtgcagctagacttgacaacgattcctgctttcttggctgtttttctgctgctctggtttcttctacgaccaaggcggccaaagcccaagatcaactaaaccagctaattttcagtgtggctgttgtatgctaataccgaggacgtgaatattgtgaatatgcacacatgtcatgggggacagctgctgctggagcgcagtaagtcctagattcaaaggggaaatgacaaggccgtaaacgacttgtgccaaacggtgtcactgtttagagaaaatagaactgaaattttgtttccgaaactggtgcaaggtttgaagttgccacatcctgagcagacttgtgtagtgcattgttggacttgttctggatggacgttgatatgaatctagttgagtaagcactgtagagttgtagactgagccgcttactgtgtagagaactcaatactgtttttgttttccagagaacagcgggagaacatccctaccaatcttgtcaattgactcaattctattttggtttggttcttgagacggaacatttcgg

SEQ ID NO: 15893 - DNA, 1287 bp, Oryza sativa
  ref <308>: DATABASE ACCESSION NUMBER: AK066402
  ref <309>: DATABASE ENTRY DATE: 2001-12-06
gctaccctccatagcgagcagtggtggtctgcactctgcaggcaggcaggcacccaggcctgcagctcgatggcgccgccgccgccgtcgccgccgcgatctctcacctccgtctccctccggactcctctgagccctctcctcttcctacggccagcttcttgcaatccatcggcggtctccggctcctgcagcagcggagcatgccgcggcgtgcgctgctcggcggcgaacaagccttctccttccaccgctccgggcaccgagctcgacctccatggcaaagataaggagtgaggtgctgtccccgttccgctccgtgcggatgttcttctacctcgcgttcatggccagcgccgggctcggggccctcatcgcgctcacgcagctcatcccggcgctgtccagcccggcgagggcggccgccgcgggggagacgctcaagggcctgggcatcgacgtcgcggcggtctccgtcttcgcgttcctctactggcgcgagagcaaggccaaggacgcgcaggtggcgaagctcacgcgggaggagaacctgtccaggctcaggatccgcgccggcgagggccgcccgcccgtcccgctcggcgagctgaggggcaccgcgcggctcgtcatcgtcgccggccccgcggcgttcgtcaccgagtcgttccgccggagcaagccgttcttgaaggacctcatggagcgcggcgtgcttgtcgtgcccttctcgacggacggcaacgcgccggacctgcagttcgacgaggccgacgaggaggaggaggaggcggcggcggcggctgggaagatgaagcggaggctctggcagctcactccggtttacacttctgaatgggccaaatggctagatgagcagaagaagctagccaacgtgtcacctgattcccccgtatctctcgctccggctggacggccgcgtccgtggcagcggcgtcgggtacccgccgtggcaagcgttcgtggcgcagctgccgccggtgaaggggatgtggtccggcctccttgatgggatggacgggagggtgctttgaatatttgactgatacagaccgtgaaaacattagttgattggagaaaaaaaggacggccgggttcgatctatagcttatactagaacaagaacaggaagagtttgatgattgctttaacttctgtggggttgattttgcttcctgcatcccagcgacatcgcccaagtgaatgtgatatgccatgtgcccatgtacatgttgttttgcagcctacgtgacttgattattaacg

SEQ ID NO: 15894 - DNA, 1118 bp, Oryza sativa
  ref <308>: DATABASE ACCESSION NUMBER: AK066403
  ref <309>: DATABASE ENTRY DATE: 2001-12-06
gagccaaggaggcgatggccacttctctcgcgccgtccacacaatgagtccggcagcaactatggccgtccttctccgaccatccacgctcctcccctcctcccaatccacgacgacctcccgactcagattccccgtcgctaccccgcttcctcgctgccgccatggcggcgccggcaagaagagccgcctcctggtcgcaagaagaagggggaggagagaccgggtcgcctgccttcccacgaaggaggaggaggaggaggaggtcggcgtggcgggagacggtggggaggaggatggggacgaggacgggtacctggcgagggagggcgagtggggggtgcggcggatggggcgggtcggcgaggagatgcggcgggtggcgctcgtccaggccgaggccttccacatccccgtcgccctcttcaacgacttcttcttcgattttttcaaagcggaggtgctgtcggcgctcatctacagggtgaggaattcgccgcctgacagatacgcgtgtttagtggcagaagaagtggatgcaaccagccagatatctgaggcgccattcgagaaaattgttggtgtggtggactgcacagttcagaatgaagctgacatacttaagaacctccaaggcgtcgacgagtacctctatgtgtcaggaattgcggtgttgccatccttcaggaggaggaaggtagggactgcgctgctgaaagcctgcgaggcgctggcgctccagtggaggcacagattcatggcgctgagggcttacaaggacgacgatggagctcgaggcctttactccaaggcggggtacagggtggtggcaaaggatcctggatgggtcacctgggtgggaaggagacggcgtgttctgatgataaaggagctgcctatccatgaacatcatttagaacagcaatgatatgtttctttgctttagccatgcatcgatccctgtaaatgtatcacttttgctgtgagtatcactagtgcatatgtatgcttgtttctttgtggtaatttgattcaagtttggtgtagcataaatcaatagtataggtgaatgaatggctattagcaatgacgatctttttgccagtgtcacaagtctc

SEQ ID NO: 15895 - DNA, 1820 bp, Oryza sativa
  ref <308>: DATABASE ACCESSION NUMBER: AK066404
  ref <309>: DATABASE ENTRY DATE: 2001-12-06
ggtgatcctatcattcctcacctgcattcattcagagaattctctgaagactgttggaatctgaatacaggtagctagctagagagagttatggaaaagacaaggaaggccacctcccctaagagctcaatgactagtagcacagggcccaagagcccagtaaggaatggaggttctcctcctcataagaagagcacttcggagttccgaggacggaaaaatgaatcacaaatcttgcgaaagggtggtcaagactcgataactctggatgaaagcaaacgccgttctccaacttcacaaacatcgcccaagagatcatcaccaaaacacgagcaaccactgagctacttcaggcttcacactgaggagagagcaataaagcgagctggtttcaactatcaggttgcaagcaagataaataccaatgaaattattcgcagattcgaggagaagttatcaaaggtgatagaggagcgcgagatcaagatgatgaggaaggagatggttcacaaggcccaactcatgccagcgtttgacaagccatttcacccacaaaggcaaattattacatcaacttatcattaatccagatatcattgaagtgattatttaagatatcaattggttcaccaaatcttagtacagaagtgtaggcctcactcctgtgtgtataacagaatatataatgcaaatattaattattattactgacaacatatatatatatatatatacagccgggtgataagcgtagtaaaaactcttttaaaaaagtacgcagtaaaaggattggagaaggatgaaacaaaacttgatgatgagttgctagctggacttttggaagatgcattacaaaacttggaatgatgaataaactgtgcatgaatgcctcttttgggatgcattgtacccgtagttgatatatagatttaggtagtacagattcatatatcaataattaggtacagcctaacaaattatttaatgatatttaaggaaaggaatatggacatgaattaaattaatactaataaacagtgaggatggttggttttaatgaactagtaggttgtttattaagtctagctaaagccatccttaaattacaaaagcatttgctaattaaacaagctggccgtttaaaactaaattggaacccatgcatgtgcatgctaataaagcataatccaacaacctaataaaaacttagaacatactgtaacttcaatcatatatgattctaaaaaataattataacaccaattaataattatatccatttgtataacaaattaattatgtgatattgacaggtcgacgaggcccctgaccgttccaaaggagcccagcttcctgaggctgaaatgctgcattggaggagagtttcatcgccatttttgctacaatgccaaggccatcaaataatattaatacacactaatagaggggaattattgcacatatataccatcaccctctccatgaacaaactattttttgccggtcgtgttcatcagttaatccatctctattaagtacagtgtcgtttgtctcacatgtaccaaaaccgttgtttttaatttcttttgcctttctgcacgaatcttcacgtaggtatagtagcatagagaacgaaatggctccacatatgtaaatcctttttattttttcctttcgctttcacttctttgttgcctttgctttttgttctctctcttttttcccctttcttcactgaagactaggagagatatatgtgcgtcatccatgtatatgtccctgatctggtggtaacaatgataataaagctttgcattgtg

SEQ ID NO: 15896 - DNA, 1214 bp, Oryza sativa
  ref <308>: DATABASE ACCESSION NUMBER: AK066405
  ref <309>: DATABASE ENTRY DATE: 2001-12-06
ggggggaaaagcaatggcggaagtaagaactattgggtctctcccagtgcctaatgtgcaggcacttgcaggaacttgcaacggttcagacgaacagattcctgaaaggtacatcaggacagaggctacttgtgaggaggtcatcagcaactaccatggtgacatggcgattccaatcattgatctcaataagttgctttctccacaatcatcagaagaagagtgtgtgaagctgagatctgcctgccagtattggggattctttcagctcatcaaccatggagtgccagaggaagtgattgaaaacttcaggagcaacattattgagttcttcagcctgccactggatgccaagaaggagtactcacagctgcccaacagccttgaaggctatggacagacctttgttttctctgaggaccagaaactagactggggagacatgttgtaccttcaagtccatcctaccgattcaagggacttgagattttggccagtcaccctgcatctttcaggcaatcccttgatcaatactcatcggagactaaaagcctgtcgctctgcttgtttgagttcctggctaaggccgtgggtgctgagccagagtcgctgttaggcatctttgaagagcagcctcgaggaatgaggatgaactactacccaccatgccggcaatctgacaaaggtaattggcctgtcgccgcacaccgatgtggttggcctgacgctgctgctccaggtgaacgatgttcagggtctgcagatcaagagggatggcaagtggttctccgtggatgctctgagtggcgcattcatcgtcaacataggggacacacttgagatcctgagtaacggaaaattcaaaagtgttgagcacagggccatgatacatccaaataaggagcggatttcaacggcactattccactatccgcgcgatgatctgctgctgagccctctgcctgagtttgtgaaagatggtaaagtgaattacagatcaatcagttacaatgatttcatgatgcagttttttaatcaaaagcgtgatggaaggaatcggcggagagattaaagttggaacagtagccatcgactatgatgcctgagatactctctgaaatgagcatgcttctgggttgtgtcctacatatatatttcttactgtatgtactatctggagatcacaaataatgaaataaccatatcttatgatg

SEQ ID NO: 15897 - DNA, 1949 bp, Oryza sativa
  ref <308>: DATABASE ACCESSION NUMBER: AK066406
  ref <309>: DATABASE ENTRY DATE: 2001-12-06
tcgggattgcattagttgcaattggttcttcttcagagaggctaattagtgtgacaaatcgatcccgattgctggtacacgagctgccatggaaggctgtatgccgagcgatgcaaactacgcgccgctcaccccggtgagcttcttggagcgcgccgccgtcgtgtacggtgaccgcacggccgtcgtctctggcggcagggagtactcgtggcgcgagacgcgggaacggtgcctcgctggggcgtccgcgctcgcgcgcctcggcgtcggccgccgggacgtggtcgccgtcatcgcagcgaacattccggcgatgtacgagctgcacttcagcgtgccgatggccggcggcgtgctctgcacgctgaacacccggcacgacgcggccatggtgtccgtccttctcagacattcggaggccaaggttttcctcgtcgaatcgcagttcctcgccgtcgcccacgacgccctgaggctgctcgccgatgctaaagccaaatttccccttgtcatcgcgatctccgacaccggcgacagcagcagcagcgacggtggcgggctagagtacgaggcgcttctgagggacgcgccgcggggcttcgagatcaggtggccggccgacgagcgcgacccgatatcgctcaactacacgtcggggacgacgtcgaggccgaagggcgtcatctacagccaccgcggcgcgtacctgaactcgctggccgcgctgctctgcaacgacatgacgtccatgccggtgtacctctggaccgtgcccatgttccactgcaacgggtggtgcatggcgtgggccacggcggcgcagggcgggacgaacatctgcgtcaggaacgtcgtgcccaaggtcatcttcgagcagatcgtgcgccacggcgtgaccaacatgggcggcgcgcccacggtgctcaacatgatcgtgaacgcgccggcgtcggagcggaggccgctgccgaggagggtgctcatctcgacgggcggcgcgccgccgcctccgcaggtgctggccaagatggaggagctcggtttcaacgtccagcacgggtacggcctcaccgagacgtacgggccggcgacgcggtgcgtgtggagacccgagtgggacgcgctgccgctcgccgagcgcgcgcggatcaaggcgctccagggggtgcagcaccagatgttgcaggacgtcgacatcaaggacccggtgaccatggcgagcgtgccgtccgacgggcgcgccgtcggcgaggtcatgctccgcggcaacacggtcatgagcgggtactacaaggacgcggcggccacggaggaggccatgcgcggcgggtggctgcgcacgggcgacctcggcgtgcgccaccctgacgggtatatccagctcaaggatcgcgccaaggacatcatcatatcgggcggcgagaacatcagctcgatcgaggtggagtcggtgctgttcggccaccacgcggtgctcgacgcggcggtggtggcgaggccggacgaccactggggcgagacggcgtgcgcgttcgtcacgctgaaggacggggcaagcgcgacggcgcacgagatcatcgcgttctgccgtgcgcggctgccgcgttacatggcgccgaggacggtggtgttcggcgacctgcccaagacgtcgacggggaagacgcagaagttcttgctccgggagaaggccagggccatgggaagcctgcctatgcaaagcaaatccaagttgtagtcttgtactattgtactagctgcgattggttttgctgccaagatgacagcgccctgcacgactactccgatattttctgatgatacagtatttgggaagaccaacacggatgttgcataaattccgtgttaaaactgagtcaagtgcagcatcatgtaggatgcacttaaaagtaatcataaaaaagaatataccctcttattcgggg

SEQ ID NO: 15898 - DNA, 3835 bp, Oryza sativa
  ref <308>: DATABASE ACCESSION NUMBER: AK066407
  ref <309>: DATABASE ENTRY DATE: 2001-12-06
gcaccacgaggcggaggagcccggagcggagagaggagaagggatcgcgcggcggagccaatcccccgcggccaccacccgcgccgccgccaccgcgccgggatttcagcgtcctgctgccacccgcttccgcctccgctctccccagttctgcaggaagaagaggcactgctcttgtcatgatcctctggttatgctaactcaaataatttaggacctcattatcttgtccaaattcctggtttcggggcaagatgagtagaagagtacagaacgaaaaggattctaggagaatcactagtgatgggacggctgctcgcacaaggcctttgagcattcaggatatcatgtcgcgtcgtgaaaagaaaaccgcttcagaagctaagaaaaccaaggaagggctcgaagagaacagtaatggtaaatccaatcatctggaatcaggaagagggtccaaaagcagaaaggatgtcagagaaatgcccttggagggctccaaaaaggataatagtgataaaccaggggagggttccaagaaggatgaaatgagacatacgccaagggaagagcgtagaaaggacaacatgagagatatgcaaagagaggtctccaagaaagacaacctgaaagataggccaaaagacatctccaagatagataacttgaaagttaaagtgaaggtcccatcgaaagatgatcaaagagatgcaccaaagaagagctccaagaaagagcggtcctccacaagagatgatagtcatttagttgacaaagacaaaggcaatcataattctcataagcttagcacatacacgagtggtcgagttggcaaaagcagaggtggaaaccatggtgagattacagcaagagacggtgatgcaacaatacaggaatcccaaaaaagacctgggaaaagatggattgatgaaccagttggtaatgatagaatcaaggagaggagtgagaggcgaactgatggaaagagaaatagccgtggctttgatgatgagaagagttctcaggttgatcgacccacactgaagaaacaagatgctgtgcgattacaagatcccagacattttgatagaaaaggcgggaggaaagagaatgcaaaactgcaccatgaagagcccaggtcaaaaaggagaaggtcgacaagcagggatcattatcaagaaagacatgacaggtctgtctcaccatcctcaagagaacaaaggcatagctatcgtggacatggccatgattattatcctccatatcactccatggacaaatcaagaaggaagcattttgaaactgacagacatagaacatcttggaatgatggatacagtagtggatcttaccggagatatgaaagtcggcttggtggatattcaccaaggaaaaggaaaacagcaccaaaagatgaacagacaactatcaagactgcttctctggttattcggtctccagaaaagaaatcagccacatgggatcagcttcctgtggcaacagatctatctaattttgttaccactttgcagtcaacggttggtctaaaggattccactgttccagtcaattttaccacatcgaagcaggacccaaacactacaattggaactatattgacagggagtaatttggctgttgattctgtccagctgacacaagcaacccgaccactcaggagattgcacattgaaaatctaccaagtttagccacagaagacatgctgattggctgcttgaatgagttcttgctgtcatctagtgcgagccatatccagaggtccaaacaaccatgcctcagttgtgtgataaacaaggacaaacgtcaggcctttgttgaatttcttacaccagaggatgctacagcagctctttcttttgacggacggtcttttggtggatcttctttgaaaattagacgccccaaagaatatgttgaaatggcaggtattttaattgggtatgtcataattcacgttcaggatggtgaagcaaaggattttttaagcaggattcaaggtgtaatgtcaatattatgtgactgctgcttcttccagaattattggttgctgattacactgctggcagagtccttatggtgctcagttcatggaaaaattaggaagacagcttgcacaacatggttcaacatgttgctcctaagaagccttctgaagagattaaattgatatccgatgttgttgcagattcaccacacaagattttcatcgctgggatttctggagtgatttcatctgagatgctcatggaaattgttagttcatttggtccgttggctgcttaccgctttctttttaatgaataccttggtggggcatgtgcatttcttgagtacattgatcactccattacatcgaaggcatgtgctggcctcaatgggatgaagcttggtggaggcatcctaactgctgttaatgtgttccctaactctaccgagcaggcttttaatgaagcttccccattttatggaattcctgacagtgccaaatcactacttgaagaaccaacaaaagtcctgcagctaaaaaatgtgtttgaccaagaagagtatttgctactctcaaaatctgagctggaggaaatattggaagatgtacgtgtggagtgtgcaaggtttggagctgtgaaatccataaatgtcgtaaagtaccctgctagcagtgacaacactacaggggataccataaccgagtgtgaagatggatccaccaagattgagcccaaagaatatggtggcaatgtcagctgcactgagactggagtggaatgttctgtgttgaatcagagtacagatgttcctgatccttctatttgtgaggtccaggatcccgtagagcttgacacagattctattcccaagggtcgggaccacaaaaatcttgacacacgtggcgagtgtgatgcacctacagcaggagacgagaatactgatcaaggagtggaagctgatcagacagattctacggatgctcaagatgatgctcgtggaactatagagagagggcatgcagatgcagatccggcgtccttggaaacttcttgttccacagcacctggagatggagcggacaaatctggtagggagaacgagcaacaaggtggtgctggtgtgagtgaaagcaacacagagaaggcacctgcagttgatgctagagacaacgctttggcttcaaacaccagtgcgctcgaagctggctgtatacttgtagagttcttgcgcaaagaggctgcatgcattgcagctcattcactacatggacggcgttttggcagcaggattgtctctgcaggatatgctccacatgatctttacttacagaagtatccgaggtgatttccagtgctgagattcagatgtactctttttggggggaaagattggagtgtactgatggaagctaaagctttcgttgtcccagtgagttttcatcatggggaaaagattctgatgaactagcctcgtagttttggtcttttggatgcataggctgacaatctcgatgagttttcatcagaattgatgtatttctttatagaagggtaatacaggggtcagtagtcatagactcgatagttgttttttggggcgaaaacaatatggtacacgtgatcattatctgaagttgcagcttgtatttcttttgcaaccagggaaatatgaacattcccttgttcgattagatcaatattgttcaaggtactctctctcaggtagacagaaacagcagatgtagcccaggtgttggggtgttggattgtgtattggcagtaacgtatggtgtctttttggatttgagcaattttacggttcttgaag

SEQ ID NO: 15899 - DNA, 2146 bp, Oryza sativa
  ref <308>: DATABASE ACCESSION NUMBER: AK066408
  ref <309>: DATABASE ENTRY DATE: 2001-12-06
gactaaacatccctccattactcgcaaccccaactcctcttcgcgtctcccaactccgaattcctcctcctcatcgcgtgattccgttttgcgccgcctcgccttttggattgcgaactcgatttccaatcaaatgatcatctgccgcggttgcggctcgtggaggaattcgtgattgctctcccaccatgaatttgtgtcaatctgaatggaacagtcttaaactctgaaaaacatatttctacgcattattccgattgatttcttgttccatatacattccgatatgggtgggcactgggcagtgcaatcggttgccactgagtactaactcaagtatcgcgtaaaagaaagaggaagtctcctgtctcgtggtctcctccgctccttgcgccgccgccaagacgagtcgcagcgatctccatctggcgagcagagcagggaaggggatcctgggaatatgcctttgctttctcctccggttcttgatttcctacctgaagatattatctctctgatcaagactagttcgagcagacagattgattcagagattgcttcatggctgtgaccttgttcaatcttgaagcaaactaaattcgcaacacatgtgcgattatgatgagctcacaagttgcttctgtttctgacggattaccacaggcacagggtccagctgcaccgaatgactcgccgcgcaagcggttctccggcgtcgcgccgccggcggcgctcatcttcttcgtgctggtgttcgccggcggtgcaatcgtcacgcttgatcacaaggagaatttgtcaattcttcagttacggccgagagaaatggtcgtaagcgagacggagacgagggctccgacgagcgaggtgcaagagacggagacgagggctccgaccagcgaggtgcaagaggcaggcaccggcgccgccgccggcggcgtccagcgagcggaactcgccggcagcagcatctgcgagaatcagtgcaggccttcaggcagcgagccattgccgaagggcatcgtgcaggacaagtccaacttcgagatggagccgctcggcggcaaccccgaacggcgcgccgccgtcgcccggccggcgaagagcctcctcgccatccccgtcggcataaagcagaaggccgtcgtcgacaagctcgtctccaagttccccggtgacaggttcacggtgatgttgttccactacgacggcgagatggacgggtggagggaactcgggtggtcggaccgggcgattcacgtggcggcgaaggaccagacgaaatggtggttcgggaagaggttcttacacccggacatggtggccgagtatgagtacatcttcctctgggacgaggacatcgaggtggacggcttcgaccccatccgctacctccgcgtcgtccgccgcgaacgcctcgagatctcccagcccgcgctcgaccaccgctcccagatccaccaccgcctcacactccgcgcccgcaaaggccaagttcacaggagattctacaagacgaggggaggggggagatgcgacgacaacagcacggggccgccatgcacggggtgggtggagatgatggtgccggtgttctcgcgggcggcatggcggtgcgcgtggcacatgatccagaacgacctcatctacgcgtggggcctcgacttcaagctcgggtactgcgccggcggcgaccggaggctcgccgtcggcatcgtcgacagcgagtacgtcctccaccgcggcatccccacgctcggcgacggcggcggcaagccggcggcgaagcggtcgtcgacggcgacgaaggcggcgaccgaccggctcgccgtgaggcagcggtcgtacaccgagctgcagatattcaaccggcggtggaaggccgcggcggagggggacgtgtgctggaccgacccctacccgtagcccgccggcgacggcgaccgagctcgtcgccggcgatggcggtgggaccgggcgtacggctagttacttgagtagctgagatatgatagatacagagcttctcttcttgatgtacagatttgtttctctcatcgtcagaataagcaaatgtcagaatcaaagacgatgtaattacaatagttttttaaaaaagaaatatatcgatcaatcaaattttgcc

SEQ ID NO: 15900 - DNA, 1900 bp, Oryza sativa
  ref <308>: DATABASE ACCESSION NUMBER: AK066409
  ref <309>: DATABASE ENTRY DATE: 2001-12-06
gagggtaacccacagcttagctagcaagcagcagcaagccaacatagtagctagcacgtacaaatgatcgccatgactcctcttggactactgctagtgcttctcgtcctctgtagctccattcttgttgcccatggaggagacgctgcagccggcgcctatatggtcatagcaaccagcaccatgaaaccgaaaactttctgctccggccacaaggttgctccaggggacgtgccgtcgccgaacagcacttgggcaccgttgcatcacctgtatgggccatgctcgccggcgccgtcgtcggccaacagcaccgccgccgacgtcgccgcttccatggccgacatggtcgacgacgaccaacgccgcgcggactacatccaaaagaggctcaccggcgccaccgacgacaagcagccgatggccttttcgagcagaacctcgcaatacgagaagaacggccagtacgccactaatggtggcttaggcagtgtgcctcacctcaaaagtttatcaacgacggcgacgacgaattcggcgccggatggcacgtcggcggtgacccagacggtgataatcgactccggcagcgacgtttcatgggtgcaatgcaagccatgccccttgccgatgtgccaccggcaacgggaccccctgttcgacccggccatgtcgaccacgtacgccgccgtcccctgcacctccgccgcctgcgcgcagctcggcccctaccgccgcggctgctccgccaacgcgcagtgccagttcggcatcaactacggcgacgggtcgacggcgaccgggacgtacagcttcgacgacctcacgctgggcccctacgacgtcatcaggggcttccgcttcggctgtgcgcatgccgatagggggagtgcgttcgactacgacgtcgccgggtcactggcgctcggcggcggctcgcagtcgctggtgcagcagacggcgacgcggtacggcagggtcttctcctactgcctcccgccgacggcgagctccctcggcttcctcgttctcggcgtgccgccggaacgcgcccagctcatcccgagcttcgtctccacgccactgctgagcagcagcatggcgcccacgttctacagggtgctcctccgcgccatcatcgtggcggggcgcccactcgccgtgccaccggccgtgttttccgccagctcggtcatcgactcctccacgatcatctcgcgcctgccgccgacggcgtaccaggcgctgcgcgcggcgttcaggagcgccatgaccatgtaccgggcggcgccgccggtgtccatcctcgacacctgctacgacttcaccggcgtccgcagcatcaccctgcccagcatcgccctcgtcttcgacggcggcgccaccgtcaacctcgacgccgccgggatcctgttaggcagctgcctcgccttcgcgcccacagccagcgaccgcatgcccggcttcatcggcaacgtgcagcagaagacgctggaggtggtgtacgacgttcccgccaaggccatgcgattcaggaccgccgcctgctaagtgctaattcaaatttgcttgcttgccaaactagcgtattgttagcttattattcgaatataagctagctagttgatgaaataattagtcaaagtgattgttgtttatgttttgatgccatgtttatcctacatggcgtactagtagagcatctatctctatggaaagggattaaagtagctagcttaattgcagcattgtctgctaaagtttaggctagctactaaagctcttttatttatcttgtctgcaataatttgttatcttgatgtgatttcggtcgtgtgagattgtaatatcgagttatgcatctccatcttgcatgtcaagtgatgtactactttttccg

SEQ ID NO: 15901 - DNA, 1582 bp, Oryza sativa
  ref <308>: DATABASE ACCESSION NUMBER: AK066410
  ref <309>: DATABASE ENTRY DATE: 2001-12-06
ggggagagagccggagaggggagtcgaacggcgtcggctgtagtcgccggcggcgggcggcaacgagggaagaacgagcgccgtctgtgctcccgctagcggcgacgaggagaggaagaagacgccgggggcagttgattctttgatctacgatttagcattactgaggcaaaattttaccttgcgaattggtcttcatggcatgggaactcactgaggtcccaggcaacccaactccctccctccgtggctctacagttgaagtgattgctgccaagattgagcccaagttagccaacagtctcattcggcaattgagtcaagcatgcccattggagaatcttcggcatgtaaaacgggtgcgtcggtgctgtgaatatggtgaaaaatctgagttatcaatcatcttatgccttgcaactgggcctgaacattgtagcgaaatgtttcctcaagatgtaaaaaagattgtaggtacctacgaattgaatactttcattgcaaaagttgcgaggtttcctgctacttcaaaagaggagtgggaggaacaatgcaaactttggccaacatcttatcatcccccacacgacttggatggtgtatctggattcaaagagtgtgaattgccatcaatatttaattgcatgagaactgcactgcggttatctgaggtgggcaatgctgctgttgttgttaatccatcaaccatgcagattattgcaaaggctacagaccaaacgctccaacatgatagtttaaaaagtaacaaatgtgctgaattgaattcagacagccccttctcatcacttgaagtaactgagaagaaagggagcaggttgttcctgtcaaactccaatgtttctaaatgcaacagcctgaatatggaagcctcatgtttaaacccttggggatggatgaaaccaaggccgtctgagcagaagtcattgccctgtgaaggtggttttccatggcaccctctgagacatgctgccatagttgcgattgaaaatgctgcggagagggataaagtgatgttcccttcaattatatcatcaaccaaaccaaattcagatggaaatatggagtattattctgttaatgaatcagcaaaacgactaaaggtggatagaaatgacgacaaaaaaattgcacatgaagcaatctgcgatgacttgtcagaaaccagaccatacctttgtacaggatttgacatttacctagtctgggaaccttgctcaatgtgtgcgatggcacttgtacatcaaagattcaaacgtatcttctatgctttcccaaatccaattactggagcactgggcagtgtctacagattgcacggggagaaaagtttaaatcatcgttactctgtatttagggtaaaagtgcccgagtcatattcgaatagttcgggcgattgttctgacaaatgctgatacagcttggcgtgctctgcatgaagggtgcgccgttttccagttttgatttttgtgaacagcttggcatgttgtatcattatattatgtaattcaacctcaactgcatagtttgtactagctattttcctagcttttgttactgtctt

SEQ ID NO: 15902 - DNA, 2122 bp, Oryza sativa
  ref <308>: DATABASE ACCESSION NUMBER: AK066411
  ref <309>: DATABASE ENTRY DATE: 2001-12-06
gggttcgtcgtctcgtctttgcgattcgtccgcttttgcagattggcccctcgggttcgcgcgtatttacgaccacgcccccctccgcctcttcttcctcgcctccgcgggctccttctccttctggaagctgctgctgctgctctcgctagggttagggtttcggcgatggaggcggcggtggcggtggaggtggagaggtgaggagaggaggtcgcgggcgcacgagtgcggtttggttgattggaaggggaggagaggggggatggacccggacttctcgcgggcgagccgaggcccgagcttcgcgttcgccttcaactccgtcaacttctccgaccgggtgctgcggatcgagatcgtcgccggggacgacgcggcgggggccaagggcgccgcgggggaagggtgctcctcgctcgccgactgggcgcaccagcggaagcgacgccgggaggagctccgccgcgagaaagaatcaggaaaatacacggatctggaaacctgtaaagttgaagcagaagaatgtgatacctatgaggaaaataatgaggaacctgtagctatgatagaagaatctccaccagatattggacaagatggtgaggatggagacagctgcgattcatcctggagtatggagtgtacccaagtcttgagagtaaagtctatttacatcagttctgcaattctagctgcggaaagccctttcttttataagcttttctcaaatggcatgaaagaatctgatcagaggcatgctactcttagaataactgcttcagaggaaaatgccctcatggagcttttgagctttatgtatagtggaaagttgacaacaaatcagccaacccttctgctggatatcttgatgattgctgataaattcgaggttgtttcttgcatgaggcattgcagtcaattactaagaagcttgcctatgactacagaatctgcactgctctatctagaccttccttcgagcatttcaatggctgctgcagttcagccactgactgacactgccaaggcattccttgccaacaagtacaaagatttgaccaagcttcaagatgaagcgatgaatattcctctggctggtattgaagccatcctatggagtaatgatctgcaggtggcatcagaggacgccatctatgattttgtgatcaagtgggcacgttctcaatacccaaaactggaggagaggcgagagatcttgggtactcgtttgttgccactggttcggttttgtcatatgacctgcagaaagctgcggaaggtccttgcatgcaatgatctggatcatgaacaggcaactaaatgtgtcaccgaggcacttctatacaaagctgatgcaccacatcgacagcgtacccttgctgcagatgttttgacttgtaggaaatatgctgagcgagcttacaaatatcgtccacttaaggtggtggaatttgatcgaccatatccacagtgtatagcatacttggatctgaagcgtgaggagtgcagtcggcttttcccatctggacggatatactcacaagcgttccatctcgcagggcagggcttctttctctcagcacactgtaacatggatcagcaaagtgcattccattgctttggtctgttcctagggatgcaagagaaaggctcgactagtgttactgtagattacgagtttgccgcaagaacaaggccatcaggcgagtttgtcagcaagtacaagggctactataccttcaccggtggaaaggcggttggataccggaatctatttgcaattccatggtcatcgttcatggctgatgacagcctcttcttcatcgagggggtactacacttgagagctgaattaaccataaaacaaccctagatagtggacggcgtttaactaacagcgtctctgttcttgctgtgtccaaattagtgtgaaaaatgttgtgtgattcggacttactgttgttttctacttgagcaacctaaatagacagtttggaaacggcaagtaaaatcccttttgtttttacatcaaaagaggatcatgacatgtaacgcattgttatcgaactgtgaaaagtgattcttctaatcaaagttatgctgaatggtccacatcgtc

SEQ ID NO: 15903 - DNA, 3466 bp, Oryza sativa
  ref <308>: DATABASE ACCESSION NUMBER: AK066412
  ref <309>: DATABASE ENTRY DATE: 2001-12-06
ggggtcgccatggcggggctcgtcggcgtgctccgccagctcggggatctcgcggagtttgcagctgaaatatttcacgacctgcatgaagatgtgatggccactgcttctagagggcatggtttaatgcttcggttgcgacagttagaggcagaatttcctgcagttgagaaggccattatatcccagtctgaccattcaaattacccacatgatgacggtgttgagtggcacacaaatcttcagattgatcaaaatatgattactcaaggagatatgccccgtttcattttggattcatatgaagaatgccgtggcccaccacgtttattcacattggataagtttgatgttgctggtgctggggcctccttgaaacgatactcagacccatctttcttcaagacagaacattcctcggacatgatagaaacggatgctgtgatagaaaagaagccccgcaaaattaagaaaaaagctttgcgttggaggaaaggagaaacactcgaatcattgcttatcgcaaactctgaatcccacactacctcaaaggatcgatcatctagaaaagttccaccaaggacaacaaagttgaaatacaggtatcctcgggagtctgatcataagaacattagcagaatatgcagagagcatctgcaagaaataatctcatcacaacaaaagatcttctccaactattcttcgaggtactaccatccaaagtttagattaactgagtcaagtgaaacggcatcctcatttggagaaatagataatttcagtgctcgtgctcaatcttctgctaaacttgaactgactaaggttgttccaataaacgagtttgataccaaggggatcgcacctacacacattaatggttcagattgcctggaggccctggaggcagatgataggcaattacaggctacacagcatgaacctgacaaagtggaagacgtctgtaagagatctcttgtggaacaaaatgccatgctctccaactctgataggatgcagtcagtgcaggaagagaatcttctatcagctatggtccctgctgatcaaaatgatgatcgctgcagacctgatgacactggtagtgatcaggagaacttcgtggacgctcttaataacatggaatcagagggtgaagcacatgctgagatgaaaataaaaaaggaccctggtgccaagatggaattggatgaattgaactttcaccgcgatgaaggtgaaaatgaacggcacacagagttttcagaactaggtcatgtaatagactcatcaccatggttgaatgattcatacaatggtggagaaccaaaccatgcaatatcttctaatacaaatttcagtggtgttgattgcaccaatgatgaagagccttctaatgatgttgacctaatggaaatggatgtcagctcatcatccagtgtattctctgacgacaatgatgtttttaggaccaatggtaatatgaatggttttcaacaataccaggaggcatctttgtccaatgatcatcatgctgtgattgcccatagttctgataaacagtcatcccagaaatctagtggcttggatggttcctctatcgaaagcaatgattttattgaaaaaccatttcactcattggaggatgataaaaactttgcaccagatggtacttctgtgatattgggcagacctaatgatgtatcacagtgtgaagaagaaattgaagttggaaatgctgatgattcattgctgcaacctaccatttccaatcaagaagtacataggtccaataaccaacttgaaggtgtggctatgcacgcaagcatttcatctggaaaagttgcatctttccctgatatggatcctggtatgtgcacaaaggacttggagttggacaatgttttagttcctaaagaaactgttgcaaatacacccccaacaggtttaggtactgatcatatccacgagcatgtggacgagcttgattcgggagttgcaccaatcaattcaagcattcagagtgattcgacatatgaatcagatgatgatgacatggctgaagatttgaactctctaccagaagatgatctatataagcatgacgtagaggacctatataagcatgttttagaggatgatggaataattgcgctaggaaaagggccttgttccactagggccaacatgcatcaagaggaccctatggaagtctctgatgtgcgtggggacttctctaatggtcaagagctcccagtactcactgaaactgcatctcctcaaggagaattagtaggaggaggagagctcccattactcactgaaactgcatctcctcaaggaggagaagaagatcttgcagatgaggtggttgtgatctcttctcgtgatctgaatgatgagaagaagccatcgttggctgaggtcccactagcttgcggtgatgcctctctgcttgacagtagtgcttcctgtttggaacatgacgagtctactgaaacaggagaaattgcaaaaagtgatgaagttctggtcaatgttgaggttgcagaagaatccatcactggcaggtttactgatgacatgacaccttttcaagaggatcttcctgatggtgccaaatatagtgaggatgcagaatttttggctaatcctagggtggacaactctaggcacgatgtgcaattacagtctagttccccttgcagggaagagttggaaacagtgaaagctccatgtgaaaatctttgtgcattagatgaatcaagagagcatatattcgagaaaagtgtgttgcagataaacaatcttccccagcatattgaaacaaaaaatacaggtgaagcatgtagtgacattgatgatattcaacatctttcagcattgcattgtccgaaaaatcctgtttgtcaagaggaattaccagacgagaccaatcttagtgctgacgttcagtatcattgtgatgtggagaagggtggtgcagtaatcttgaatagtaaaatggtggaagaacaaccagaaaatattgatttggtgagggagcctcgtgctcaagattcttttggtacaaacccattcatggatcctgggtacaaagcgaatcatgctctagctgatccgtgtcctagctatcaaccatgtttctctgaggaagaacagtattttatttcagaactattaatccctcatggtaatatgggaatcgaagacctgaatccggttccggttgctgattccctctgggaacctgcaactccacctgatgaggtgccattgccatcagaagttatgactgaggaggacttcagatcgttctgccatgagtaccacgagatggatctgacagcaacgcctgaaagtattgatgataaaccagcctcagattctaatgtcgtctcaagtagtttggtgaccagtgagtcggagttcctctattgtgtctctgcagtacggacaggagtggaccagg

SEQ ID NO: 15904 - DNA, 1803 bp, Oryza sativa
  ref <308>: DATABASE ACCESSION NUMBER: AK066413
  ref <309>: DATABASE ENTRY DATE: 2001-12-06
ggttcccctttcgtgattgcccggtcgcggcctcgccgctaaccctaaccgatcgaattcctccgaaaaaatccagccatggcgccggcggcgcaggagccttgggccattctggccgcaatccctaacgtggtggggtacaaggaggcgaagcgcatcttcccgccgggcaccgacatctccgtcgcccgcaaggaggtcccgcgagcctccgtcctgaccgtgccgcgccacatctccctcccggcctgcctcggactctacccctatgtcgtcgccgccgaccgctctggccttctcctcctcggcacgcatcctgtcacctccgcctccgccatggtctcctaccacatctgtgatgcgcacaccggtgaggtagtctccctccgcgactgcaaaccaatgcgccccatgaccttctacggcgccgccaacgtcggtctcatcatcaaggacgacggctgtatggtcgctgagctccagccgggatgcaagggcacaagcaccggtggtgccactctgctcagctacaaggtgggggagtgctgcaagtggcgcgagagggagcttacctgctcgcccccactcccgctggactggtacccggagggcgtcgtctcccacggcgggatgctctggtgggtggacctctcctacggcctcctcgcgtgcgatcccttcgccgaggagccgaacctgatccacgtcccgctcccacaagttcccgacgagcttcctgttgatgaccaggttaaccgcggtgcccaccgctgcgtgaaggtgagcggaggaaggctgatgtacgtgcagatacacggcaatcctgttgtgccggtggtcagcacatggttgctcgacgaatcgacctgctcgcccggggagtgggagtggaacccccagctcagcgcgcccttggccgagctctggattgaccagagctatgtggacaccatgctgccgttgaccattcctgcccttgcgctcccccaccccacagatcctaacagggtatatttcttcctcaaatcttgcatcttcgcagccgacctacggttgaggaagctggtgtcattcaatagttttgagatgctcgacccaccgtgtgaactttggatgaagcgctcctcccacttggtccacgcatggcagtatgatccttcaagcagtcgttctgactttgtattggcatgcttgaggcaagacaaggcaattgcttctaagagcagcttctctggtataattcctgtcactcgtagaactgctaaaagtttgaagagagtttgggattctgtaaccaggcagcagcaaaagcaggagcagcagctgcagaagcaagctatgtaaggtgcagaatctctgaagaaagcagaatcagccagcctcattaagtatgaaggaagggtagagtatattattttgtgcatgatttgccagcctcattaaccaggatttatgaaaacgatctgatacagcatgagcttacttgtgagttcttgttctgtgccttttcttaggcctatttataagggagacgcttcatgtacagcttgagtacaaacgtgaatcttgactgttggatgcatttatgaggattttaaccattccgatcttgagttgtcccaaataagactttcaatagacagtcttcaatgttaaatagaaacatgttaattagttctacaaccataccatgcatgcatgtgtacgtgacagtcttcaatgcttggacagtactatggctgaatatttgtaactgatgtaacggttaggatgtatcaaaataagatagcttgaaaaaagtcg

SEQ ID NO: 15905 - DNA, 3105 bp, Oryza sativa
  ref <308>: DATABASE ACCESSION NUMBER: AK066414
  ref <309>: DATABASE ENTRY DATE: 2001-12-06
gactatagccaaagcaattcacactcgcacgggctcgagacggcagcacagctccactccactccactctcccccaccacaccacactgcactgaggcataccgacgaacacctttggagccatggctccctgcctcctcctcgtcctcttcctcctcccggcgctcgccaccggccaccagcacccgtccaccctcggctcctccgccctctccgagtggcgctccgccaaggcctcctactacgccgccgacccggaagacgccatcggtggcgcgtgcgggttcggggatctggggaagcacgggtacgggatggcgacggtggggctgagcacggcgctgttcgagcgcggcgcggcgtgcggcggctgctacgaggtgaagtgcgtggatgacctcaagtactgcctccccggaacctccatcgtcgtcacggccaccaacttctgcgccccgaacttcggtctccccgccgacgccggcggcgtctgcaacccgcccaaccaccatttcctcctccccatccagtccttcgagaagattgcgctctggaaggccggcgtgatgcccatccagtaccgccggtacgttcgattcttggctgcatcctttgattgctgctatctttagtctactttgcactggattctagactagatctgaggtttatgtttcccattttcttaatccactttgtgtggaaatgtgaaagtgcttagaattgcgtcggttggtagaatgtgggatcccagaaaagctgaattataagtggccgttgtggaggaaaggaaatgggccgtcttccaatacggtcaacttctgttagagcacccgcaatggtaaagtaaggtgctctctataaaacatgtacatctcagcaatagactagattaatagtaaaccacctcaatagtatgtctacatgggtatctatagctctctaatgcattgcctcgtttttctctatagactatctccaggttagtagatagctttgctctctctcttcatttaatctcttcaatgtaggaaaatatgctgacatagatatcttgtagagagcctatagataaccattgcgggtgcccttagggttcagttggatagtttcatggtcctttatgctgtagtgtgtttaggtgtctaggttaggagaaaaaagggcagtacttttaaagccttcagccatttgatgcaccattttcgtaagtactgttagagttctaactgtttcagttgatttgcttctggctcagcagcacaagaaactggtttccaaaaaaaaaaagcagcacaagaaacttggtgtatgcttcagttaaaaattcatatagtttggaataatattttgctggttggaattaaaacgatgcaacttacatgcaccattgatcagaaaactagcagtaacttactattgtcatctaaatgtcgctcgtgagaattcatttattccattactctactagtttaaggttgctagctagaatccggaggctgtgagctatggacctgcaggtaacagcaactcacaccgaatttatgcaaacagccttcctcatatctgagttagtttacgaggttttcccaggctaatcctaataatcaagactcaaaagtacacagttctgggtaatttccagcagtttttttaatctgtatcggtaggcactaaggaatgttagtctgctccattacatagaccgttttccatcacgcttaattcctttctggggtacattagatgttcctttaagctctcaatgaccactaagttagtcccacaggttgaattgctgcattatttgtggactgtagctgtccttaatttgctttctgtactagcaatttataccggttggtatgtctttcaagtccttcaataatttgatctgttatcaaaactaaaatagtgttaaacagatcagttcatagtcaggcattatcttttcctgcactagatttttcttcacatcttagtgctctagatctaaataggttacaatcttccagttgacgtctgtaaattagtgtacgtcatttctagtaatattcaagaattaattttacgaaccccctaatgtgatgctgaattaggttgcctgtattactttctcaaatattctgaggtatagttgagtaatgcaatatccattatgtgcgtttaagttggcatcaaatgtgcgtctaagttggcatcaattagatgttcaacttcaagatggtttcctgaatatcatactgtcatatttatgtgcctatcatacttcctcaagatcgatgttccaggacattttgtagagaacatcaacctgcagcgcttttaaattatttcaggcttcaccatatgttacagggctcagttgttggcaggatttccatgagagtgacaatctgtttgaacggattgtttcactgagcagtgaaccatcacaaggacagctgtacaaggctatcagtaacatgatagcctgtagatagaaagcaaaattattgtagattgtaaattggtcagcaaaaattgtcaattgtcactaatcttggcgtgtttaatttgtatgcagcgtcaactgtcttcgtgatggtggtgtgcgattcgcagtcgctggtcgaagcttcttcctgacagtcctaattagcaatgtcggtggtgctggcgatgtccgatcagtgaagatcaaaggaacggagtccggttggctctcgatgggccgcaactgggggcagatatggcacatcaactctgatttcaggggacagcctctctccttcgagctcacctcaagtgatggaaaaacattgaccaactacaacgtggtccctaaggagtgggacttcggcaaaacatacactggcaagcagttcctgctctagagaggaaagggtaccaatagcagcttacagttacaaatttttttctgatcctatgagttggattgtactattgtatattcctctgaggaacgataatagtatcattagagaaagaaatgtttagtgcagagcctccaatagtagtccaacatagaaaaggtgctcataaatgtggcatgtaccatttggaactctgataattgcactacagaggcttgatgtaccattc

SEQ ID NO: 15906 - DNA, 767 bp, Oryza sativa
  ref <308>: DATABASE ACCESSION NUMBER: AK066415
  ref <309>: DATABASE ENTRY DATE: 2001-12-06
ggagggttcatagttcatacctgcaacaacaactgcgcgtaacacataccacacgcccaagtacgccctccccctctaaactgagatttgaggcccaaactaatgttattagcaagtagctgatgctagccgctccttgctataaatacatgtgctttgctagttagcttttgcacagatcaacaccggcaaccgactaactctgtctgaaggaagctaagattattaatcagtgagtagctagccatggctgaggagaagaagcaccaccacctgttccaccacaagaaggacggggaggaggagagctccggcgtggtggactacgacaaggagaagaagcaccacaagcacctcgagcagctcggcggcctcggcgccatcgccgccggcgcctacgctctccacgagaagcaccaggcgaagaaggacacggagaacgcgcacgggcacaaggtgaaggaggaggtggcggcggtggccgcgctgggcgccgcggggttcgccttccacgagcaccacgagaagaaggacgccaagaagcacgccgccgaccaatactagatcgatcccgatcgaatgaacgcaagaacgaacggtttatatgcttaattactttctccccataattacatgtatgcatgtggttgatggcttaatttgcttcttcttgttcgtcgtcatacgtcgtcgcttttacttcgtgttcatgtacattaattctgtatccgcactgagtattaaataagtgcgtttgtgctgcacac

SEQ ID NO: 15907 - DNA, 1601 bp, Oryza sativa
  ref <308>: DATABASE ACCESSION NUMBER: AK066416
  ref <309>: DATABASE ENTRY DATE: 2001-12-06
gatttctctttctcccacctccaccggcgacgccaccgccgccgcctcctcctcctccgcctctctacggcagcctcgccgccgcgccgcgcagcgcagcgcagagcaacatggaagcgacgggcgccgccgtatccgccttctccaccgcgtcctcgtcgagtcccgcggcgcctagacacggccgtctcctggcgagccccgcggcgtggcgcagcgcacggacgctgccaccacgggccgtcgcctcctcccgcgcgacggtcctcgtctcgagccctcctccgccgccgctgccgccgacacccgctcctgctgcggtcgcgccctccaaggtcgaccggtccgggcggttctgtagcccccgcgccgctcgcgagctcgcgctgatgatttcctacgcggcttgccttgagggcgccgacgtggtgcggctcttcgaccgcagaatcagcgcgagaagagaacctggctatgttttcgataaggcgtgcgtggtgaactacaaccatatgagcttcggtgggggacctctggaggtcgggacagaggaggaggctgagaagctcatgagtcagaacgagaaggattcagcaaatgaagcagaagttctttcagctcctccaaagctggtgtacaacaactttgtgttacgactggctcgagaaattttagtggctgttgccagtggatgggacaagcatgttgatatcatcaacaaaataactccccagaattggaaggacgaacctgttgcaaggatccttgaactttgtattcttcatattgccatggcagagatgacatcaaaaggaacacctcacaaaattgtcattaacgaggctgtggatttggcaaaacggttctgtgatggtggtgctcctcgggtaatcaatggatgccttcggacatttgtgaaggatcacatgaacattgacaccagtcagccagctccagctgagtcaaaagcgtgaagtttttgcaaatatgaaaatatgaatcatcacaaatatgattcaaagaatagaagcacggagaaaatcctgctctctttgtctgatctcctttggttgtttaaagattgattggtgaagttgaaaggaggcaaacatgctggacttgtggagaactagaagtatcttcaatatttagctggtggttagactagatatgttgagccatatactgatgatgcactcttcttgaagaactaaatgacactacttctaacagcttttgccatgctgattcctgtgcttaatgggacaagagaacctgtatcatagtgtatgtgtaaagttgcaaggtaagggttgcatgtctcaatttcacaataacgtgcttgagctgctgagtaagttgggagttgggagtttgcagctgatactatggaagatgcattttctccaagatttggatatgatatattgtgtaattctacctgcacacgagttctgttcaaatataaatttggtacacctctaatagtatttgtattgtatatggctgcaaacttttcctacgaaattctttgtaagtagcatgggttgtaacctgcttaacgatccaatgattgctgctttaattaataagtttgttgc

SEQ ID NO: 15908 - DNA, 2500 bp, Oryza sativa
  ref <308>: DATABASE ACCESSION NUMBER: AK066417
  ref <309>: DATABASE ENTRY DATE: 2001-12-06
ggttagttcgagcgcacacacacaatcacacattgcacgcgcagacgcagccactgcttcttcttcctcctcttctcccaggaaagagctcacctgacctgaccacctgaggttgtagttgctggtttgcttgctagcttcgtcgtctcctcctacctgagctcagcaatggagccgcccttcttcctcctcctgctgctgctcgtggtctcctcctcctccccttccgccgccctcctctccgccaagggcgtctacaacgaagtgcaagctctgattgtgatcaagaacctgctcaaggacccccatggcgtgctcaagagctgggaccagaactccgtcgacccctgcagctgggccatgatcacctgctccccggatttcctcgtcactggcctggaagctccaagccagcatctctctggcctgctctcaccaagcatcggcaacctgaccaatcttgagactgttctcctgcagaacaacaacataaccgggccaatcccagcagagattggcaggctggagaacctcaagacgcttgatctctccagcaacagcttctatggcgaaatccccagctctgtgggccacctcgagagcctccagtacttgaggctcaacaacaacaccctgtctggtccattcccttctgcatcagctaacctgtcacaccttgttttcctagatttgtcatataacaacctgagtggcccgattccagaatcattggcaagaacttacaacatagtggggaatcccctcatctgcgacgccaacagggagcaggattgctacgggacggcgccgatgccgatgagctacagcctgaacggctcgcggggcggcgcgctgccgccggcggcgagggacagggggcacaagttcgccgtcgcgttcggctccaccgccggctgcatgggcctcctcctcctcgccgccggtttcctcttctggtggcgccaccgccgcaaccggcagatcctctttgacgtcgacgagcagcagattgagaacgtgaacctggggaacgtgaagaggttcagcttcagggagctgcaggcggcgacggaggggttcagcgggaagaacatcctggggaaaggagggttcgggaacgtgtacagggggcagctccccgacgggacgctgatggcggtgaagcggctcaaggacggcaacgcggccggcggcgaggcccagttccagacggaggtggagatgatcagcctcgccctccaccgcaacctcctccgcctctacgggcttctgcatgaccgccaccgagcgcctcctagtctaccccttcatgtccaacggcagcgtcgcctcccgcctcaaagcgaagccggcgttggagtgggggacgaggaggaggatcgcggtgggggcggcgaggggcctggtgtacctgcacgagcagtgcgaccccaagatcatccaccgcgacgtcaaggccgccaacgtgctgctggacgaggcgtgcgaggccgtcgtcggcgacttcgggctggccaagctgctggaccaccgggagtcgcacgtcaccacggcggtgcggggcaccgtcggccacatcgcgccggagtacctgtccacggggcagtcgtcggaccggaccgacgtcttcggcttcggcatcctgctgctggagctcgtcaccggccagacggcgctcgagttcggcaagtcgtccaaccacaagggcgccatgctggactgggtgaagaagatgcagtcggagaagaaggtggaggtgctggtggacaaggggttaggcggagggtacgaccgggtggaggtggaggagatggtgcaggtggctctcctctgcacccagtacctccccgcccaccgcccccgcatgtccgacgtcgtccgcatgctcgagggcgacggcctcgccgaccgctgggagaaggcctccggccactccaccgccgccgccgactccctctcccactcccaccgcacctcagacccggcgccgcccgccgccgacttcgccgccgccttcggccgctgcttctccgacctcaccgacgactcctccctcctcgtccaggccgtcgagctctccggccccagataacaccaccatgatcgagtagctgtggtgtgtggctcttcttgtacagcatgcttgcatggagctctctgtctttctgtctgaatattaatgtagctagctaggttgggaaatacttccctgtttcatattataaaactttttagcattacccatacattcatatatatatgttaataaatctagatatatatgtatgcctagatttattaacatctatatgaatgaatgtgggcaatgctagaaagttttataacctgaaatggaggtagtaataattatattttactaaggtaattactaattagtgatgcgtatatatttatatcattttagatgaactgtacaaacacaagaggagaggacaaggacttgtacttttccgtgtctccatatatacttgatgttaat

SEQ ID NO: 15909 - DNA, 3349 bp, Oryza sativa
  ref <308>: DATABASE ACCESSION NUMBER: AK066418
  ref <309>: DATABASE ENTRY DATE: 2001-12-06
gattttccactctcgccaccaccactccgcgacaagctcgtgctcccccccaaatcccaaatctcccaggggcctcctcgatcgatcccatcccccccctcacttcgccggcggcggctgcggcggcgtaagcggcgacgaccggtggtgtggcgtgttctacctagggtttcggtggggggaggagggatggcagcggcctcgccgcaagtggcaaggagttgggaggagtaggcggagctaagagatttttttgctctctcgcttcttctctgtgtgtgtgttgcgtggtggggaggaagatctcgagcggttggaaaccctagtggggagggagggagtgggcgggggggatggacgtggactcgaggatgacgacggagtcggactccgactcggacgccgcggcgcaggggggaggaggaggagggttcgggagcgagacctcctcggcgtcgccctcggcgcccgggacgccggcggctatgggggcaggagggggagctgctcctatcgctgctgctgctatcgctgccgccgcgtcggcggcggtggtggcgggcccgaggcccgcgccggggtacacggtggtgaacgcggcgatggagaagaaggaggacgggcccgggtgccggtgcggccacacgctcaccgcggtgccggccgtcggggaggagggcgcgccggggtacgtggggccgcggctgatcctcttcggcggtgccaccgcgctcgaggggaactccgccacgccgccatcctcggccgggagcgccggaatccgtcttgctggtgctactgcggatgtgcactgctacgatgtttcatcgaataagtggagcaggcttactccagttggtgaacctccttcaccaagagcggcacatgtagcgactgctgttggcaccatggtggtcattcagggtgggataggtcctgctggtttatctgcagaagaccttcatgttctggatcttacacaacaacgaccgcgatggcacagagtggtggttcaagggcctggccctggtcctcgatatggacatgtgatggctttggttgggcagcgtttcttgttgacaatcggtggaaatgatgggaagaggcccctggctgatgtgtgggcccttgatacagcagctaagccatatgagtggaggaaacttgaaccagaaggtgaaggaccacccccatgcatgtatgcaactgcaagtgcccgttctgatggacttctattactctgtggtgggagggatgctaatagtgtgcccctagcaagtgcatatggccttgcaaaacacagggatggacgctgggagtgggcaatcgcccctggtgtctctccatcacccagatatcaacatgcagctgttttcgtcaatgcacgacttcatgtctcaggaggggcccttggaggcggtcgcatggttgaagactcctcaagtgttgcagtgttggatactgctgctggagtgtggtgtgatacaaaatcagtagttactactccaaggacaggaagatatagtgcagatgctgcaggcggtgatgcttctgtagagcttacacgacggtgcaggcatgcagctgctgcagttggtgatatgatatatgtttatggaggtctacggggaggtgtgctgctagatgaccttcttgttgccgaagatcttgctgctgctgaaacaacaaatgcagcaaatcaggcagctgcaattgctgcagcctctgacatacaagctggaagagaacctggtaggtatgcctacaatgatgaacaaacagggcagccagctacaataacatctcctgatggagctgtggttcttggaactccagttgctgctcccgttaatggggacatgtatactgatattagccctgagaacgctgtgatccagggacaaaggagaatgagcaaaggtgttgattatttggttgaagcatctgctgcagaggctgaggcaatcagtgctactttagctgctgtaaaagctcggcaagttaatggtgaggcagagcattcacctgacagggagcagtctccagatgccacaccaagtgtgaagcaaaatgcaagcctgataaaaccagactatgctctttcaaataattcaacaccacctcctggggttcggttacaccatagagcagttgtggtagcagcagaaaccggaggtgccttaggtggcatggttaggcagctctcaattgaccagtttgaaaatgaaggaagaagggtcatctatggcactcctgagagtgcaactgcagcaaggaagttgctagatcggcaaatgtctattaatagtgtacctaaaaaggtaattgcatccctcttgaaacctcgtggttggaagccccctgtgcgaaggcagttctttttggactgcaatgagattgcagacctatgtgatagtgcggaaagaatattttcaagtgaaccaagtgtcctacagcttaaagctccaattaagatatttggtgatttgcacggtcaatttggtgacctaatgcgcttgtttgatgagtacggtgctccttcgacagctggagacattgcttacattgattacctcttcttgggagattacgtggatcgtggtcagcatagtttggagacaatcactcttctccttgcacttaaggttgaatatcctcttaatgtacatttgattcgagggaatcatgaggccgctgatatcaatgctttgtttgggttccgaatagagtgcatagagcgaatgggtgagcgtgatgggatctggacctggcatcgcatgaataggctatttaattggcttcctttggctgccctaatagagaagaaaataatatgtatgcatggtggtattggccggtctatcaatcatgttgaacaaattgagaatcttcaaagaccaattaccatggaagcaggctcggttgttctaatggatcttctgtggtctgatccaactgaaaatgatagtgttgaaggacttagaccaaatgcccgtggcccaggccttgttacctttgggccggatcgtgttatggagttctgcaacaacaatgacttacagttaattgtgcgagcacatgagtgtgtgatggatggttttgagcgttttgctcaaggtcacctaatcactctcttctcagcaacaaattactgtggtacggcaaacaatgcgggtgcaatcttggttctaggaagagatcttgtagtagttccgaaactcatccatcctttgccgcctgccattacatctcccgagacctctccagagcatcatcttgaggacacatggatgcaggaactaaatgccaacaggccgccaactccaacaaggggccgccctcaagcagc

SEQ ID NO: 15910 - DNA, 820 bp, Oryza sativa
  ref <308>: DATABASE ACCESSION NUMBER: AK066419
  ref <309>: DATABASE ENTRY DATE: 2001-12-06
gctctctctctcggtgtttccccttcggccttctcgtccgccccttctctcctccaccatccgcctcaccggcgtacggctccgacgagatggccgccccgctccggcggagcctcccctccctggggcgcacgctcctctcgccgtcccccgcgcccgcgcggatgctctccgcggcggcgtccgacgccctcgtcgagatcaagccaggcgagatcggcatggtctccggcatccccgaggagcacctccgccgcaaggttgtaatatattcacccgctaggactgcatctcagcagggttcaggcaaagtcgggaggtggaaaatcaactttgtgtcaacccaaaagtgggagaacccattaatgggatggacatctactggagatccatatgctaatgttggtgaagcagggcttacgtttgacagagcagattcagcaaaggcatttgctgaaaagcatggatgggattatgtggttaggaaacgccatacacctcttttgaaggccaaatcttatgcagagaacttcaagtggaggggtcccccgaaggcagagcaagcctgagcactaatcttgcatgctacattgctagcaggacatgcacaagatggtgtttacccccatatgtgttgtttttggtttctccaatctgttgtgcgagtgtgggcttagaccgttcctcaaccaactctcaattataataagcgtgcactgtgatcaaatagaatgatttcctgtgtactaaaattgtttaccattatccttccacatcatttcataaagatcctttacctgtttgcttaggttgttaaagc

SEQ ID NO: 15911 - DNA, 1824 bp, Oryza sativa
  ref <308>: DATABASE ACCESSION NUMBER: AK066420
  ref <309>: DATABASE ENTRY DATE: 2001-12-06
gctctctctctccctcgccgcgccgccgccgaacacacccccccaccccccctccccacacgcctccgcctcctcgcaccgaaccgcctcggcgcgagcgcgagggagagagctcctcttctcctccacggcggctgcgcggcgtcgtcccgctccaccgggccgtcgtctggatctgatctaggagcggtcgcttcttcctcttccggaagccctttttatcagtcatgtacggacgcatgccaaagaagagtaacaataccaagtattatgaggtgcttggtgtatctaagacagcaacccaggatgagctgaagaaagcgtaccgtaaagctgccattaaaaaccaccctgataagggtggagaccctgagaagtttaaagaattggctcaagcttacgaggttcttaatgatcctgaaaagagggaaatctatgaccaatatggcgaggatgcactcaaagaaggaatgggaggaggcagcagcagtgatttccatagtcccttcgatttatttgagcaaatttttcagaatcgtggtggctttgggggtagaggacacagacaaaagcgtggcgaagatgtggtacatactatgaaggtttctttagaagacctgtataatggtactaccaaaaaactgtctttgtcacggaatgctctgtgcacaaagtgcaagggtaaaggatccaagagtggggcagcagcaacttgccatggttgtcatggtgcaggaatgagaacaataacaagacaaattgggcttggcatggtccaacagatgaacactgtttgccctgaatgcagaggatcaggtgagatgataagtgacaaggataaatgcccgagttgtaagggaaacaaagtagtccagcagaagaaggtcttggaggttcatgttgagaagggaatgcaacatggccaaaagattgtattccagggtgaagctgatgaagctcctgatacagtgacaggagacatagtttttgtcttgcaacttaaagaccacccaaaatttaagaggaagtttgatgacctctttactgagcacacaatctccctgaccgaggctctgtgtggcttccagtttgttctaacccatcttgatggtcggcaactcctaatcaaatctaatccaggggaggttataaaacctggtcaacacaaggccatcaatgatgaaggcatgccccagcatggccgccctttcatgaaaggtcgtctttttgttgaattcaacgtggagtttcctgagcctggtgcactcactcctggccaatgccgatcgcttgagaagattttgccaccacgacccaggaatcaattgtcagacatggagctagatcaatgtgaggagaccaccatgcatgatgtcaacatagaagaggagatgaggcgcaggcagcagcacaggcggcaggaagcatatgatgaagacgacgacgaggatgctggagctggaccaagggtacagtgtgcccagcagtaagaacaattcgatgccattcggactagacgatttagcgtctcttatcatccaaagaccgcggtagctactgagttcattctattcttttttttaatgtacccccacctaaagtagctgatgcatgttatgatttctcttttgtgggaaatgttatgctaccatttttgttgtcttaagattaaggagcttgctattagtcataatgatgttgcggcctcactacaattattacagcctgccgtattatataccaaaatgagctaatcctcgacaataattcttacagacagcggaccgaatcagttgtattatactattatgcctgtggttctgt

SEQ ID NO: 15912 - DNA, 4018 bp, Oryza sativa
  ref <308>: DATABASE ACCESSION NUMBER: AK066421
  ref <309>: DATABASE ENTRY DATE: 2001-12-06
gcttgggagaccttgttgaaggaaatcatgcaaaaataggacgcagtgttgcatttcctggccatcctctgggttctgggttgacagctactgctgccaaggagttaggtttgcgtcctgggattcctgttggaacttcactaattgatgctcatgctggtggtgttggagtcatggaaagtgtgccagatgcagaatctaaagctgacacgtctgatgaatctgatgaacaagctatatgccaccgcatggtcttggtttgtgggacatctacatgccatatggctgtctcaaagaacaaactgtttatccctggtgtctgggggccattttggtctgcaatggttcctgagttttggctcacggaaggtggccaaagtgcaactggtgctctacttgattacattgttgaaaaccatgttgctgctcctcttcttgctaatcatgctgcttctcaaagaatatccatatatgagctactgaacaagatactattttctatggcacatgagcaaaatatttcttttatttcttccctgactcaagacatccatgtcctcccagattttcatggaaataggtctcctttggctgatccaaaatccaaaggaatcatatgtggcttcacacttgatacaagtgagaagcacttggcgcttctttatctagcaacaattcaaggcattgcttatggtactcgtcatattgtggagcattgcaatgctcatgggcacaagatcgatactcttcttgcttgtggcggacttgcgaagaattccttgtatatccaagagcacgcagatataactggatgtccaataatacttcctagagagaatgagtctgtgcttttaggagctgctgtcctgggtgctgttgctgcaaagaagtttccaggtgttcgcgacgcaatgaaggcactgaatgcggccgggaaggttgtatatccatcttcagatcctagggtaaagaaataccatgatgcaaaatatcagatattcagatccctgtatgagcaacaactctcccatcgctcagctatggcacaggcattgcagtaggggcttatgaccagttgaccacttccagtgaccactgagctgcccattcatttatcttgtgaaaacaccgtattatgttgccatgttctcttgggtcattgacatctcatatgccgaattccatgttacgtgatcaaactgatgatacaatgtataaacagtagaaggcaataagatccttcagaaatgtgatgttggttagaaaagcacaataatgaatattataagttcaggggggaaaaaatccaatacatggaaatggcttgcatgttccctttgcatgcaacatgttttgtttatcatacagttgaaggtacaagttacaacacgtcagcaccagcatttacggcagaagggcgatgaatgactttagtcctgtttatcatcacctttttttcaggtcaccactcaccagttgcccggtaggcactcttgtttgctcctgaactccatgagtttgtgataattgaagattcattgattcatctactcatagaacataacttgattaatcacactccatatcagatgagcttgcagacagctgtccaccattgagcaagcttgataggcttctacagaactgcaagttgacatcatatgcattgcatttccgttcagtaaattgtgcatcgtactatcttgaggtggagccaaattgatctgaaacaaaaacataacactaacaaacctctttgtatgatctcagatccccagttgatttggacacctcgacgacgcagtgagctggtgttaccttgatcacctgcaatttctcacttttcaggtaagcttcaatccctgagcaacagaaaaaggacacactacacatgatggaagtgatttcagaaaggatatctcacctcggccgacagagtaagatcaagattgcttcttggtagtaatttgctgtcctgaatctccacctgtgacataatgagaattggactaaaaatttcacctggaatttgataatttcattggagaaactgaaaccatatgttggtgaggtgaattaccagagagctgttcattctcttcactgccatgctcacatccttggctgcaaccttgatcttgtcgaaggtttcctgtactgggtgtggcgaggcgagctttgttttctgcaaaacatcggtcaatcaatcaaggatcttagtttactgccgtgtattggtgtaggtaatttgtgaaagtaatctattctaaagcttagtgcacctgctcctggaagagacctgacaagtcaagatcactgcatctcgctatcaattggaaggcattaatgaatcggtcagtttctgccgtcatctcttcagtttcctttacctagatacaagggcaatcttagcaactaccaacaggaaagactggttgagaggtaagaactactagaatggagtaagttccaaactgtatcaaattacctctgtgttgtgactgctatcactgtctgtgctggcctcttcaataacatcacaatcatcatcattctcaatccttgctgatggattgcagtgatcttggagccacttatcatcaaaaatatcgcttatctttgctctctaaagaacatttaaggtatggtgttatcagcaaaataaaggtcggcaaccatccaatgcttacatagtgctacataagtatttatcatagcttactgttataggagatggatccagtatcctgattataatcttcttctgagggacactgagccattgtggaaaaacaaactgagctcgagatatctttcaagagaaatattttcagttaggacatctgaaatcagtaacagacagtagagtaaaaggcggtatcgtattcggatgtttacccttctgtacaagtttgttaagctgcagtcttgaaatggtagataaccagcaagaagttcaaacaggatcacaccacaagaccagacgtctgcagctgccccatcataactcttgtgctgaatcacctgtcaaacaatctgaatcataagttggcaatgcaaatgactaaaacttctgcaagaaacttgtcctacctcaggagctacatagcatggtgagccacaagatgtggatagaaactgtcctggctggatcaaagaaatttaaacacagattttcagagttgaatatgaatcattcggtgatgctgataatgtttgctagcttttaccttttttagcacgctgaggccaaaatcagataccttgagattgccttgattatctaccaacaagttctcaggctgtttacatcatcagaaagtgctataaatcagcaaattatagcttatgatgaagggatcgagatgattaaaacagggatagcaattaatgaaatgagagcagcaatatcttgatttcttgaccttgagatctctgtggtagacacctctcctatggcagtagtctacagcatcaatcaattggtagaaatacttcttcgcttccttctcatccaacctcttgaggtaactcttaaacccagaagaaaagaaagatcaggaattgcaagaaaaattagctgagttaatcagactagaattacatgctggttaattgattatgcatgatgtcttactagcttgtcagatagctgccctcctgagacatactccattaccaggcatatcttcgtcttcgtcgcgatcacctgcacaggaagaaaaggtataatataatcctccattcctcctgaaaccctgatgctgatacggctgaaaccctgatgctgatacgggtaattagtaaccaagcttaatcacctcatatatcttgacaatgttggggtggttgaggagcttcatggccgtgatctctcttttgaccttcaccaaaatccagatcatgcaaactaattaacgatcgatcaagaacaaacttatggttgtatattttatggtagaagcaagggatgtaaatcatcatttccattacctaaaaaagaagaacctatctatct

SEQ ID NO: 15913 - DNA, 1205 bp, Oryza sativa
  ref <308>: DATABASE ACCESSION NUMBER: AK066422
  ref <309>: DATABASE ENTRY DATE: 2001-12-06
gattgaacgcacgctacactgcaagaaaggcaagtataggggtggcaggtagtttatattcactggaaaccgagaacttcactcctcccagcactccacactaggaggatgctcactgtctgaatgactgactggctgctgctgctgctcattccttctcctactctgcctgcctcctctgctgtgtccttgggagaattcttcagggacagtatccctgcagaggtgagatcatgggacagtcgaagaagaagttccgcggagtcaggcagcgccactggggctcctgggtctccgagatcaggcaccctctccttaagaggagggtgtggctgggtacctttgagacggcggaggaggcggcgcgggcgtacgacgaggccgccatcctgatgagcggccgcaacgccaagaccaacttcccagtcgcgaggaacgccacgggggagctcacaccggcggctgcggtggcagggcgggatggccgtgtcggcggcggcagcggcagctcgtcctcaatgacggccaacggcggcgggaacagcctgactccagctgggtcatgaccgtcgagctcaacaaggacacggccgtgtcgtcggctgcgacggtggcagcagcaacagcagtgtcgtccagcgaccagccgactccgagtgacagcacagtcacaacgacgtccacgtccaccacgggctcgccgtcgccaccacctccggcaatggacgacgaggagaggatcgcgctgcagatgatcgaggagctgctgggcaggagcggcccgggctcgccgtcacatgggctgctgcacggtggtgaaggtagcctcgtcatctgaattccggaagaacaggaaagaaattgaaaatgcaaggttaaaacagcatgatcaggtcaccatctaagatcaaggatctggtagggtggttggtgcacaggcagttaagattgctacatatgataggtatatctctattactactacatatccagcttaattaggaaacaattataagatcgattactactgtgtgaagtgaagctgtgtatttattaaagacttacttgtatgtacaagacgtccccgtcattatagtcatactggtgaaagctctgctatgtatcaacgtcatcagagatcagactacatatatataagtggtgtcaacttctaataaaagtaaataaaaacattgtaattgtgt

SEQ ID NO: 15914 - DNA, 2999 bp, Oryza sativa
  ref <308>: DATABASE ACCESSION NUMBER: AK066423
  ref <309>: DATABASE ENTRY DATE: 2001-12-06
gatttctgatttctcctttctcccctcgagtctgatcctcccactaccaacgtccaccggcaccgcaacttgctgtcctctcctgccggctggtccagctccatctctcttcttgctctgcctcccccttcaatttaattgattcctccatccagatttcgagatcgagatgaaggcagtgatgatgcaccaccatcacgcggcacgccctgcgcgctgtccaaggcctatctcttcctcctcctcctcagccctgttgggtagcagaccaaccagagtctcctccccatcaaacctgccaaagttgctcataaaccggcgacacatcacccctcttgccaccaatgctccccatgctgttgctgaagatgatggcgccatctcttttgctaatgcaacgccaacggagcctcccattgacttgcgtcccgggggtgtcagaaatgagctaattcttctagctctaccagcagttcttggccaagctattgatccattggcgcaattgatggagactgcatatattggtagattaggtattatggcgcttgcccttcataaagtagctcttgggagtgctgaattatagccatccttactgcatgaaagcaagctgtcccttcttttgccattcatccttctttttcatatattctgaaggggctctggagctagcatcagctggtattggtgtgtcggtttttaatatcgtgtctaagattttcaacattccactgttgagcattgcaacctcatttgtggcagaagacatttccaagaatgctagcaagcattcaagttcaggcaaattggagctgtcatctgtatcttctgcattggtcttagctgctggaatcggtacaattgaagcattggcattgttcctaggatcaggattgtttcttaaactaatgggcgtgtcacctgcctcaccaatgcataaacctgcaaaacttttcctttcattgagagctttgggagcacctgcaaatgtgattatgttagcagttcagggaatatttcgtggattcaaggatactaagactcctgtattttttataggtttgggaaatctttcagctgtagtgcttcttcctttacttatttacgtctttcggcttggcataactggagctgcaatttctacagttgcatcacagtacattattacaattttgcttctccagtctctaagtaaaagagctgttctacttcctccaaggctggaccagttagagtttagcggatatctaaaatctggtgtctttttcgttcttctatctccccctctctcattatattcaattgttgtgcatgctaaatcagagttcttacactttcattgatctcagtgtccgttcattttgttcattctacaatgtgcggttaactgaagttcagattttctctcccagggggctttgagttctttgggttaatttgtcaaaatttccaattctggatccactatgcatttaacaatgatacctttatcgataacaagttaattgtaaagtttggtttttgaaataactttatatgcaagaaaaaggaaagactatcgtagagtagatggtgtaggtacggttactgctagtatattttacagatatgttgatcagcttgtcattgatagagctttcattcatgggccatgcccattctgtccactaatgaatgggctgttcagggaacttctattctccatattgtttcgtggtaccatttatatgtagtaaaatgtgctcaattctaggatttgcaaatatttgctgtcatattattggaaagataatgcatgtctatgatatgcatcctgagaacctccatgttataatttcatacttcttatcttgtttttccttttattgcacttaccaccatctataattccatcatctgtttttgaaatgcttaggtggcatgctgttaggaagaaccctctcgattttattaacgatgaccatagggacatcaatggctgctcgacaaggcccaacagctatggcagctcatcagatatgcttacaagtatggcttgcggtatctttgcttgcagatgctttagctgtttctgcccaggcaatgatagcaagctcctatgcaatattggactacaagagggtccagaagatagcaatgtttgctttgcaggtcatgtgtcatttctctgttttctattgtgaagctttgtttttcatgtattcatagatgcaatcgccctttcttgttaacatagaaaaatggagattttcttgcagataggagtagtcagtggattagctttatccgctggcctgtatacctcattcagtaatatagcaagattatttaccagtgaccctgtggtcctaatggttgtcaaatcttgttcattgtttgtatgtgccagtcaaccaattaatgctctggcattcatatttgatggtctgcattatggtgtctcagattttgattatgtcgctcaagctacgattgctgttgggataatgtcatcattagttttgttatatgctccatctgtttttggacttgctggagtttgggctggtttgacaacacttatgggattgcgcatggcttcgggcattctcaggcttctatggaaatcaggaccttggtcatttttgcatgaggaacccaaaacagagctagctggttgaagatggagcggcaactaagcagtcaatactacggattaaatgaacgagcgggtgattctgtaggtatttatgttcaagtcggtctgctaggagatgccatttttacttgctaccaacattgttcaattgctagtgttattactatgtgtagccgttttatttattctaaaggctcccttgtttcttgtggtggttttcgtttactgtgtaagccagtttgctgctgcgtaaacagcttgataagtttagaaggatagagaatttgcctttctttaacctgagaccacttcgaattatttttggagcaatgtatactaatactgtattattcagttc

SEQ ID NO: 15915 - DNA, 1504 bp, Oryza sativa
  ref <308>: DATABASE ACCESSION NUMBER: AK066424
  ref <309>: DATABASE ENTRY DATE: 2001-12-06
gtagaatcgtagataattcctgcactcagttttgagaaaactggaggtctcagaaatttagcagcttgcttctttctttgttgcatctaagaattgatgacctcagccttcaacgttacttgaaattcaaggtcataccgatatgcacgcttcgaggatggaacaaactacaggtgttagtggccatgagcacataattgatattccaagggacagtggtccatctacttcgacttcccatagtgttgctagagaaaaccatggagaaccaaatcctgttgatagatctgcaaccagagcgctagtacctgctttgcaggcaccatcagcagttggtgcacctatgttcgccggcacagaagccctttgaattctggactctggatttcaatagaagttcttgtcaatgtgagccaaattgtagctgctattgttgtgctttctctttcaagaaaggaacatccgcaagctccattatttgagtgggtcataggttatacagttggttgttttgctacactaccccatctttattggcgctatatacaccgcaatattgtcaatggtgaaaatgagccagcacatacacttcaaggctcctctcagaacaattcaactgagccttctgctagtgcatcagagcgtcgaaggaatgctgcacgaaatgcagtgctcgctaatccaaggattaatgctctttttgaccacttcaagatggccttggattgtttctttgctgtgtggtttgtcgtaggaaatgtgtggatatttggcgggcgttcttctgctgccgatgctccaaacttgtacaggttatgtattgtgttccttacctttagttgtattgggtatgccatgcctttcatcctctgtgcaatgatatgctgctgcctgccctgcatcatatctgttatgggatttagagaagatacaaacaatacaagaggggctacctcagaatccatcaattctcttccaacatacaaattcaaaaccaagaaacgccgtcatagttcaggaaatgaagctgaaggccaagatggtgggatagtagctgcagggactgacaaggagcggtcactatctgctgaggatgctgtttgttgcatctgtcttgcaaagtatgcacacaatgatgagcttcgtgaacttccctgcacacattgtttccacaaggaatgtgttgataaatggctgaagattaatgcactttgcccattgtgcaaatctgagatagcgagctcatctggaacatctgatactcgtcgctctgaccacacagatattcctgtgcaggagattgaaatgcattagggtgatctgctttctgaggtaatacggcagaatacagttacttgtggtgaccgtgtgcttgtataaagttcaagctttgatatgtggattgtaatgatgcatggggttatttttgttgctgttattttggagaagacagttctcactgtcaacatacacgaggaaatatacaatatctactcgttccatc

SEQ ID NO: 15916 - DNA, 1243 bp, Oryza sativa
  ref <308>: DATABASE ACCESSION NUMBER: AK066425
  ref <309>: DATABASE ENTRY DATE: 2001-12-06
gggtccaactcggctcatcctgctgctccgcccttctcaagatcaccaagcagccgcagtagctcggcgagccggcagccgacgggtccaatggcgcaggatgattcggttgtttctgctcagtggctgcatgagcacttagggcagcctgatgttaaggtgctggatgcttcctggtacatgcctgtagagaagagggatccatggcaagaataccaggtggcccatatccctggtgcgctgttcttcgacatagatggcatagttgacctgacaactgatttgccacacatgctgccatcacaagaggcttttgcagccgcagtttctgcgctcgatataaaaaaccatgataaagttattgtttatgatggaaagggatttttcagtgcacctcgtgtatggtggatgttcagagtttatggacacaataaaatttgggtgttagatggaggtttacctcagtggcgaacttctggatttgttcttgagagtagcacccctggtgatgcagttcagaaaactaaagctgctaacagtgttgttgaaaggatttataatggtcaactggcaagtgatgtaacatttcagactgaatttcagcctcatatattctggacactagaaaaggttaaacataacatggatgcacagtctcaccaagtcgttgatgcccgatcaaagggcagatttgatggtgtagcaccagaaccacgggaaggagtaagaagtggacatatcccagggacaaaatgtgttccattccttgagatgtttgatgatgcaccaatgcttctccctgcagatgagatccgtaaaaagtttgagcaagcagggatatcccttgatcgccccattgtagtcacttgtggatctggtgtaactgcctgcatacttgctttgggactctatagaattgggaagcaagatattccagtttatgatggatcttggacagaatgggaagctctaccggatcatgattatccaaaagttacctccaatggttcttaaaatcatcagctccgaaatgatggattcatctgctgcatttttcaccattcagtttagattgtcagctggactgtgttctctttgacatgcttagcgtttgaatcaaaaggaagcggaaatgtgcactcttggcaattttgatgaggccatattcaatattaaacttagatcgatgatgtactgaatgttatcgttaaacaataataagcataccaattgattttatacc

SEQ ID NO: 15917 - DNA, 977 bp, Oryza sativa
  ref <308>: DATABASE ACCESSION NUMBER: AK066426
  ref <309>: DATABASE ENTRY DATE: 2001-12-06
gctcggctcctccgctccttgcgccatctcgcggctgaacaggggaggcggcgagcagagcaggggagaggaggggatcctgcagggagggagaagttatctggcaatttcagggtgttttgagttaaaggaagttaaaggaaatttgatagtgatagtgttgcaatttgggttttatcaaatcagctatggactcagtggtgttggagtgtggcgacatctccgcttcccaggaagaactccttgcccactcctcattcctcaatggtggtgatgatggtgaggtcttcagcacacctcccacaactcaagaggacgccatcaccatgtgcaccctccccttcacccagtcccagtccccagcaccagcgccattgccatcaccagcagccgtgtcgcaccacccctggatgcagctcctcagaggacaaccgagacgatgagatgagcgatattgtcaagcagcggcgcaggcctagggtttgcacaagaaaggtgaggtggggtgccaagatcaggaccccaaccccaagcccagatcgcaccacctctgaagtggagaacaaggatggtgatcctctgtacaaggcagttctcatgattcccacaagggatagcactcctgccattcctatggacctgatcgcgcttgctcgccagcgaggcctcttctagcagatggaccttgctatcagttgtttttaaactattgaactgaactctggaggtcaggtcactatctccttcccagtttacctttgctttggagggctcaacttgtcaaatcccaaccgaaggcactgtttaactaatttagtgaggtggttagtatatctggtttttaccactgtggtgttcagaagttgtagttgcctggacaagcaggtttactcgggttattcaatgatgaatcatggaaacttgccgaatgccatcaaacatctttggtgatatatataagttcactgcattggagg

SEQ ID NO: 15918 - DNA, 1672 bp, Oryza sativa
  ref <308>: DATABASE ACCESSION NUMBER: AK066427
  ref <309>: DATABASE ENTRY DATE: 2001-12-06
gattctcttctcacgccggcgccgcggcgtctcgtctcctcccaccgcaacctttcttcttttgcttagctttcacttacactacccctcgccgcgcctcgccgcgcgacgcggccctttcccgccaccaacccctcgccgcgcccgcctcgcctccggagaccgccggaggatggaaacctcgcccgcgctgcgccccgcccacatccccagatccacggccgtccgcccgccgtgcgccacccctttctcccgcgcccactggcacgccacctgcgccgccatccgccgagtcccgcgggtgaacggcgacagcaacagtagcatcaagcccgccctcgccgaccacgccgcgccgccgctcgacctggatctgctccccgtctccaacctccctcgcccgctcaccatcaccgacctctcccccgcgcccatgcacggcagccagctgcgcgtcgcctaccagggtgtcccgggggcatacagcgaggcggcggcggcgaaggcctacccctcctgcgacgccatcccctgcgaccagttcgaggtggccttccaggccgtcgagctctggatcgccgaccgcgccgtcctccccgtcgagaactccctcggcggcagcatccaccgcaactacgacctcctcctccgccaccgcctccacatcgtcggcgaggtccagctccccgtccaccactgcctcctcgcgctcccgggcgtccgcagggacctcctcacccgcgtcatctcccacccgcaggcgctcgcccagtgcgagctcaccctcaacgccatgggcctcaacgtcgcccgcgaggccttcgacgacaccgcggccgccgccgagcacgtcgccgccgcggggctccgcgacaccgccgccatcgcgtcctcccgcgccgccgagctgtacgggctccaggtgctcgcggacggcatccaggacgacgccgggaacgtgacgcggttcgtgatgctggcgcgggagcccatcatcccgcgaacggaccggccattcaagacgagcatcgtgttcgcgcacgacagggagggcacgtcggtgctcttcaaggtgctgtcggccttcgcgttccgggacatcagcctcaccaagatcgagagccgcccacaccgccaccgccccatccggctcgtcgacgacgccaacgtgggcacggccaagcacttcgagtacatgttctacatcgacttccaggcgtccatggcggaggtcagggcgcagaacgcgctgtcggagatacaggagttcacctccttcctccgggtgctcggcagctaccccatggacatgacgccatgggagtattcctcctcatcgtcaccatcaccggcgcccggcggcgacaccagcagataatgctgatcgatcgacaagactgatgctcaaattctgttagtgactaattgcttctttctcttctttttttttctgtcaaattagagaaaggggaggaagactctcttcctcatgtttactttcggttgcggatgatactctgattaattagtcaaagttatgctcggtgaggatcggagtagatgagatgccatagcggagaggggagacagcgatcccatctcattaccagaaatgaatttttgtactctgaacattagaaaaaagggaatgaattaggataactgatggtcc

SEQ ID NO: 15919 - DNA, 1507 bp, Oryza sativa
  ref <308>: DATABASE ACCESSION NUMBER: AK066428
  ref <309>: DATABASE ENTRY DATE: 2001-12-06
ggcgcgcagatggaaacgcaacgctgttgctagcccagagaaagaaagacgaggaaaggaggagcaggcggcggcgtccagggtccagcagcatagcattgagcttgagcatggtttccccttcgcttcggatccccgcggccgcgcgcgtcttcgatcccgccatcaacacccgctgccctccgccccacgccgtcgtcatgcgcatgcgcagtcgcagccgccgttccatcgctgcctccgcttcgccgccgggggacccctccatccgcgaccccatctcactgccaaggccgctcaccagcgcggatctgatggaggccagcggagacggtttgaaggtcgcataccagggatgcccgggtgcctacagtgaggccgccgccaagaaggcgtacccgagttgccacaccgtgccctgcgaatacttcgagaccgcctttcaggctgtcgaaaattgggtggctgaccgcgcggtcctgccacttgagaattccttgggtggtagcatccatcgaaactatgaccttctacttcgccataggctgcacattgttggtgaggtgcgccttgcagttcgccattgcttgttagcaaatcgtggtgtgaagatccaaaatttgagaagtgccatgagccatcctcaagctcttgcacagtgtgaacaaacactgacaaagttaggcatcgagcatagagaagctgttgacgatacagcaggtgcagcaaagcttattgcagaacaaaagctccaggacactggagcagttgctagttcattggcagctcaactttatggactggatattcttgcagaaaatattcaggatgacaccgataatgtaacacgctttatgatgctggctcgggaacccattattcctcgtactgataagccattcaagactagcatagtcttttctttggaagaagggcctgggcaactatttaaggcgctggcagtgtttgcactgagaaaaattaacctcaccaagatggaaagccgtccacacaagaaaaagcctctacgtatagctgatgataattgttctgcaccattgaagcatttcgactacctcttctatgtagatcttgaggcgtcaatggctgatccaaatgctcaaaatgctctggcaaacttaaaggagttcgcaacctttctaagagttcttgggagctatcctaccgatgtcagtgaagcatgaattgtcaagtacctgttttgaatatacttggaccagcgttatcatgaatgagcttacgattggttctatcgccaacttggaagcaccgatagcagaagtggtactaacttggagggtaacgatatgacatattgatagagagaatggcacaaaggtgcacgatgttttgttcttgtttttaagttctcattgttgtgttagtgacgatttccttttgaaaggggcctttatgcaatatcccacttacccaaaagaacagtgatgagatatcaaagctaaggccaaagaattggttgtttgtc

SEQ ID NO: 15920 - DNA, 2324 bp, Oryza sativa
  ref <308>: DATABASE ACCESSION NUMBER: AK066429
  ref <309>: DATABASE ENTRY DATE: 2001-12-06
ggtcttcagagagaattcctttgcaattttggtcctcgtgctgctgaccctaagttttccagtgatcgtgaagttgagatatcgttttggattgatctggttcagaaacagttgctacgggctcttgatcgtgaaaagatatggtcaagattgacaacaagtgaaagtattgaggttttggaaaaggatttagcaatttttgggtttttcattgctttaggcagaagtacgcaaacatatttgtcttccaatcatcttaccaatctggatgattcaatcaatgatattgtaaggtatcttattggtgggagtgtgttatattatccacagttgtcttcgattagttcttatcagctgtatgtggaggtagtttgcgaagagctcgagtggcttccattttacagtggtgatgtgccagctgcaacaattgaaggtagagaggatgtgcataaaggagaaataatatcaagagtgctaaatgtgtgctcttattggatgactagttttataaagtacagctcatggcttgagaacccttcaaatgtaaaggcagccagatttctgtccaaggggcattccatgttgagtgattgcatgaaggaactggacttaacaaagtatgatatgccaaaagaccaaacctttccagaagccaaagaacacttggttgctaggacagagctagcctcttttgacaagtcacttgaaagtgttgaggaagctttggttaagttagaagatttgctccaagaattgcatctctccagttccaactctggtaaggaggatctaagggctgcatgttctgatcttgaaatgattagaaggctgaagaaagaggctgagtttcttgaggcttcctttcgagcaaaaacagaatttcttgaggctgatgctagtagcagaccattatctcctgctgtcgaggaaggccgtggaaagacagctagcaatgctaatgagagctcaacaccacaaaaaccagcaaacagagtggagaacaaacgtcgtccaatttgggacctctttggtaggccttctggaaggagagttcagcttgtccaacaaacttcagatcaaaatgtttctgtcgctaatgtggataacaaagacacacaatcaaatgatatcctccggtttgaacagttaagacgtgagctgattgagttagagaaaagagttcaaaagagcgcagataatgctcaaaaggaggagacatatgtcgcaaatgaaacattggattcttccgtgtcatcatctcctgtatcaatgccttctggtccagctagcaagaaagaaaatgttattaccaaatcagtagagaaggttaaggaaaccacgacgactgttgtgcaagggacacagctcttagcaattgacacaggagctgctatgggtttgttaagaagagctcttattggggatgaactaactcataaggaaaagcaggctcttcaaagaaccctgacagatttagcctctgttgttcctataggaatactcatgcttctgccagtaactgctgttgggcatgctgctattttggctttcatccagagatatgtgccttccatgatcccatccacctatgctccagagaggttagatctcctcaggcaacttgaaaaagtgaaggaaatgggagttgctgaaggtagtagtgaagaaatggtagaggctgtaagttcgagaggtgaccaagtgaaataggcaaaccatgtacagacggaaacaagtatacttcttgttttggaacaagacagaagatggtttcatttcgcttatagaagattctttcagtgacatgctgatagaagtgaacataaaggaaaaaactggagttttaccaaacattgcaactgtgttcgttgaaggaagatcattcagaagttgcactttggaagattgttttcatacttcatagtgtacaagggcgccgtgtgcccattcaacatagaagaaggttatccaaagttcctcttggataatgtctgtagggtagatatttggctgatgatttgtatatctagctgagattggtgtatcaactctccaaatgtaaagagacaggcctgagtggtggcttatcggtccgtgatcctaggtcatgcagtgatgcacgactctgctgtcagcttatgggcaattcagcagcaaaagattgatgctggtggcgcactgctacatccaatagcacgtaaagacttttgtgctcttgtagtctactctactgtccggtctacattgcctggtcgtcttcccctttcatttacgtatcattatcttggattatctccattataaaaatataacatctttcacct

SEQ ID NO: 15921 - DNA, 2694 bp, Oryza sativa
  ref <308>: DATABASE ACCESSION NUMBER: AK066430
  ref <309>: DATABASE ENTRY DATE: 2001-12-06
ggctttgcctggccgccatggctcacctaccgcttttgctcctctccttcctcgtcctcatcggcgtccatgcctccgtttcccatggctcgccgcctcttccatccacttacgacccttccatttgctccaagtcatcagagtgcggaggcgtcaatatctcctatcctttctatctttccaacgccaccgattattacactcgattttcttgcggctacaccgatttgaagatctcttgcagccgggaccgggacgggaggaacgagactcccaccatcctactcggtggagacaactacaccgtcctggacatcatctacgacagtcacaccatcgtgctcgcggacaccgatgcgctccgcggcggcagctgccccagagtgcgccacaacatcaccttcgcccaggccgatgagtggcttcagtacaccggcccccgtgacaacctcaccttcttcttcggctgcaaactcaaccttccaccaccaatcgatccagggctggttagtcttgcagacaagcaccaaatcaactgcaaagacttcagcaactggcctgacagtggagattcgttcgtgttcacctccgccgagctcgaggcaccagtagagtccgaattggccaggcgctgcagacaggtcatcgtcgtgccggtaaatggggatattcttaactcgagtaaccagagtgcgctgccaagtggtggatacggtcaagtgcttaataaggggttcgacctggcatggaactcaagaaaagatgaacaatgctaccagtgcgagcaatcccaggggcactgctcctacggccagaacagggtgttcctagattgcttgtgctccgacgggaaggtgggcaaccaggattgcagaaacagcggtgccagcaactcgtctacattaaggtattcaagcttaaaggggagaatgaaactttatataatagcaggcatctcaagcgtccttttgctatgtttactttcctttccgtgtttgttcagtctgaagaagtataggcacagaaggatttcaaagggaacaccaaggattgagtccttcctacaaaggaatggaaccttacatccaaagagatacacttacacagaagtaaaaaggatgacaaaatcttttgctgaaaagctaggtcacggtggatttggtgctgtttacagaggcaacctatctgatggccgccaggtagcagtcaagatgttaaaggactccaagggtgacggcgaagaattcatcaatgaggttgctagtattagtagaacttctcacgtcaacgtggtgactctgttaggattttgcttgcatcgatccaaaagggctctgatctatgagtatatgccaaatggttcacttgaaagatatgctttccgcaataactccaaaggcgaactttcattaacttgggagaaattatttgatgtagcagttggaattgcccgagggcttgagtatcttcaccgtggatgcagtacccgcattgtgcatttcgatattaaaccccacaacattctactagatcaagaattctgccctaagatctcagattttggaatggctaagctttgtgctaacaaagagagtatcgtctccattgctggtgcaagaggaacaataggctatattgccccggaggtctattcaaagcagtttggagcaataagtagcaagtctgatgtctatagctatggaatgatgatccttgagatggttggggcaagggagaggaacatagaagccaatagtgaatctagtagccactatttcccacaatggatttacgaacatctagatgaatattgcatcagctcttctgagattgatggtgagaccacagagcttgtaagaaagatggtagtggttgcactatggtgcatacaagtagttccaactaaccgcccaacaatgactagagtcgttgaaatgctagaaggtagcacgagcggtctggaattgccaccaaaagtgctattgagctggtaagcatccacaaatttcgattgaataagcattattgctcacttcttccagtgttgtacaactgcaaatactatttagcggttacaaaatgtaagaagagatttggaatgtgaaaccaaattcactacaatgtcgaccctcttttgcccagttatactctagattgactgtacattacaaattcatcggttggctatggtttcaaacagttccaatttctataaaatgttgtataaattagaaaccgcaactaaaattcccatctgcgctgcaatgcagaactacggatacttgaactttaaactggatatcgcagtttcagagtcagagctcacctgaagtcagaggagtagttcagacttcagatctcagaagttcaccatccgccatcgcccgaaccgattccggagtcaaggcccggcgactgcagtggctcaggatgcggcgagcacaaagaaggctagcgcggctggctgcatacggagggtcgagggggatgggctggtatagcacggcgagttgcgggaggaggatgcggcggcgtgacgaagggcgatgcaatgcgtagcatacatgtcagttggattctggtgttggatttattctctgttcatctctagtgggccttgagctggtcccccatgttgtcattgagtttgaattccattctccactcaatataggctgtgtttagttacatgcc

SEQ ID NO: 15922 - DNA, 1175 bp, Oryza sativa
  ref <308>: DATABASE ACCESSION NUMBER: AK066431
  ref <309>: DATABASE ENTRY DATE: 2001-12-06
gaatgttttggtcattgggaaagtttgaccccctcttttctctccgattctgcgaggcgacatcggcggcgagaggcgggctagggtttcgagcaccgccaccgcgcgccatggccgaggccaaccagtaccagatcctggtgcggctcctcgacggccgcacacgctgcctccgcttctcgacgacgaccgtctccggcgcggcgctcctcgacgccgtctcggcgctctcccgcgtccccgccgcgtccctccgcctcgtcaccggccgcctcgacgtctcgccgtcctccgtcctcgcctcctccgccgacggccgattcccctccgcatccgcgctccttcgcctccgcggaggcaagggcgggtttggctcgctcctccgtggcgccgcctccaaggccggccagaagaagaccagcaacttcgacgcctgccgcgatatcaacggccgccgcctgcgccacgttaacgccgagcgccgcctcgaggagtggaaggccgaggccgcagatcgccagctcgagaagctcgcggaggatttcatcaagaagaaggctaaggaagcgggtcgcggtggtgtgaaggcggccgaggtggacaaatacctcgaggagtaccgcaaggatgccgagagttgcgttaatgcggttgaggagtctgtgcgcgcctctcttgggaagaggaagaccgtgcccaagccacgcggtggggaagatgccaagaagcttaagatttggctgggcaagaagaaggtacaagaggatgagagtgatagcgatagtgacagtgaaatggatgatgatgagggtgcagatacaaaatccataattcttgatgatgggaattcctcgcatggatccaaaagtgaggacgagaaggttgatctgggttcaattactgaatcaccttcagaaggagagacctcaggtgagaagtctggacgctctgaatcagaggagaatggaaacggtgttcaggagtccagggaacctacaattaggtcagaaggtgaatgcggtgattttatatcagatggtgtggtggagcatgagattggagtggtggatgagcacacacctgagaatggtgttagtgctctttcagaagaagtgttgaaaccagatgtaaaagcagaggataacactgcttctgcttcagccacatcacatctt

SEQ ID NO: 15923 - DNA, 1718 bp, Oryza sativa
  ref <308>: DATABASE ACCESSION NUMBER: AK066432
  ref <309>: DATABASE ENTRY DATE: 2001-12-06
ggcttgagctgacctgaccccgagccgagccgtacaccaccggaggaggaggaggaagccggcgaggtgacgctgcgagatcgggaggtagggttcggggggaggttttgggtttggtggatggtcacggcggcggcggagttcgtcgatgggcaggtcgttcagggactcgctgaaggtgctcgaggccgacatccagcacgccaactcgcttgctgctgaatttagaagggaatatgatggcgcctgtcttcagatgagaatgtcatactgtccagctgcacacttcttcctttttcttgtgcagtggacagattgcaaccttgctggtgcacttgggctgttgaggattctcatttataaggtttatgctgatgggactaccaccatgtctgctcatgaaaggaaagcaagcattagggaattctatgctgtcatatttccttctttgatgcaactacatgaagggatcaatgaagtggaagacaagaaacaaaaggcaatctgtatagaaagatatagaagacgagatgaagatcagaaaatggtgatttcagagattgatgataacatcgaggaggaatgtggcatatgtatggagataaatggcaaagtagttcttccaacttgtagccatgctatgtgcattaaatgctaccgtgactggagatcaagatcccagtcttgtccattctgccgcgatagtctcaagagagtgaactcggccgacctatggatatatacagataacagggacatagtggacatagcgacggtccgaaaggaaaatcttaggcggctcttcatgtacatagacaagttgcccacggtcatccctgaaactgtttttgacgtttacgattcccacgtaaaatgaccttgcactcatgcacaaattctttactggtgtgttactactagtgctgtagaaattgtggagcccttggtgttcatgctgccccgcttgtagaagctgtaagcagctaagctcgccgaggaggctcgctatacaaaggtatatatgtaaattgtcttggctgtatggtgtgtacctttgtgaggagttaggagaatctgatgccagtcagtctgtaagtaaggaagaaccagcaaccattgactttgtttcttttaattgtaagcatttcactttcacccatgaaacagtgaagaatgccatcctgacagcttgattgctcctgtacgatgctgttgctcgttgtgaatggggagttttcagttcctggaagaagaatcaagaaatggagggccactgatttgatcgtgcacagaagtgagacaagagtctgaactggtacagtatccccaataataatttcctgatctgctgcacgtgcatcctctatctctgtaatgtcttgcacgttctgaaaatggagaaactccactgcatttggagctctgcagttggatacttctgagcctgtttggcacaactttaccttttttgtaactggagtccagccaaacagtgtaaatagtttcagccccatctggagttaggtgaagcattctcacaaaatgaactagagaggtggagctgggtttatgctgctacacaactcaactctagatttaacacctggagcttaatttaaaagttggagcatgtcctctgtcaggatgaaaactcatcaagtttatcttcgttcttgtccaaatatttctgtcatttgtacatctctgaatttgttttt

SEQ ID NO: 15924 - DNA, 1580 bp, Oryza sativa
  ref <308>: DATABASE ACCESSION NUMBER: AK066433
  ref <309>: DATABASE ENTRY DATE: 2001-12-06
cgagagaaaaatatctcgcgcttcacacgcaacgcaagaactcgacgaggcgagcgagcgatcgagcggacaccggcggcatcgtgggaacgggaaggcgtgggggagggaggagggcgacggtaggggatggccggagatcggctgagctggtcggggctgctgaaatggagcctctcctacgccgacgggacgcggccgtctcgcgccatcagcgaggaggagcggaggtggttggcggaggcggtggagcgtcacatgatggtggacgtggtgagccgcatgagggagatcgcgctgctcatgagcaccccgctctccgtcctggaggcgcacggcatcacccccgacgacatcgaaggtttactggctgagttgcaggtacatgtcgagtctattgacatggcaaacgatcttcattctgttggtggcttggttccggttatcaagtacctcagaaattctaatgctcgtatccgagccagagcagctgatgtggtaactacagttgttcaaaacaatccaactagtcagcagctggtcatggaagccagtggctttgatccccttttatctaattttacgtcagatcctgatctcactgcccgcataaaagctcttggtgcactatcctccttgattcggaacaacaaaccaggtgtttctgcttttcgtctagccaatggatatgcaggactaagagatgcattgacttcagaaagtgcaaggtttcagaggaaagcactgaacctcacgaattatctgcttagtgaaagccattccggttgctcggtgtttgcacagctaggtttcccgcggcttatgatgcatttggtgtccagtgatgacttgggtgttcgagaagctgcattaggaggactgcttgagcttgcaagggacacgacactgggaagtaggagtctactagcagatcatgacaggcttcgacggcttctccaggcacgtatagagagaataaggatgatggctccagaagaccttgatgctgcacgcgaggagaggcaactcgtagattcactgtggattacgtgctaccatgaaccgtccacacttcatgtggaaggtcttcttgttttgcctggggaggaatgtttcgaacaacctcctgacgtggctggtagattcttcgagcctctgcggcgaagttcggcaaggagagcaccttctaatgagagatcagatccaggagatggaactgggggaggaatgatgctgcttttaggtccatccccaggcagtagatcaaactcggggagaattgatcactctgggatgtgaattacatggaaaaggagactgggagtctgctgtcctcttatgtacattgtgcagggctagtgctatagagtgttgctgttaaggggctagtaaaaagtaaataaataatttcccagtttcgaagaaatgtaagtggaaaatatgtgtgatgttcagcagtgtataatatgtctgatgtttagcagtgtgtagtctcattatacaatagaaatgcgaaatacttttgtgtaagagacctaaacgatggtggggtgatagtatgaaatgtaaatgtagcgccc

SEQ ID NO: 15925 - DNA, 1718 bp, Oryza sativa
  ref <308>: DATABASE ACCESSION NUMBER: AK066434
  ref <309>: DATABASE ENTRY DATE: 2001-12-06
gggggtgctgcggcggcggcggcggcggcctgtagactgtagtggtggctgtgggacgcgagggtcgctcgccatgccgtggctggagatgtggctgccccccgcgggctcggggggaggaggagaggggatggcggcggggctgttcctcgacggcgaggcggcgcacggcgcgctcctcgcggcgatgcccggcatctccgcgtcgttcggcgtgcggcagcggcggccggggttcgtgtcgctgacgatgtcggtgaaagggggcagggggttcgtgagtggcccggtggggctgctcgcgagcggggaggagaagggcgcccgggcggaggaggcggaggcgctggtcgcggggaggagggcgacggaggaggaggtggcggaggcgtcggaggggaaggtggtcgaggaggtgaaggaggctcgtgctggtgcgggcgccatgaacatgacgaaacatttatggtctggagccgttgctgctatggtatctagaacagttgttgctcccctcgagaggctaaagttggagtacatagttcgtgctgagcagagaaatctatttgagcttatccatgccattgcaacaacacagggtttgaaaggcttttggaaaggaaacttcgtcaacattctccgtactgctccattcaaagccgtcaacttctatgcatatgacacttacagaaagcagttgctcaaatggtctggcaatgatgaaacaacaaactttgaaaggtttatcgctggtgctgctgctggtgttacagcaacgatattgtgtataccaatggatacgattaggacaaggatggtagctcctggtggtgaagccttaggaggagttattggtgttgcccgccacatgatccagactgaagggttcttctctctgtacaaaggattggtaccttcactcatcagcatggcaccctctggtgctgtattctatggagtatatgacatattgaagatgggctacctgcattcccccgaagggaagaggagggtatcaacgatgaaacaacaaggtcaagaggcaaatgcattagatcagcttgagttgggcacagttaggaccttactatatggtgctattgctggttgctgtgctgaagcagccacatacccatttgaagtagttaggagacagctacagatgcaagtcaaagcaacaaggatgaatgcttttgcaacatgccttaaaattgttgatcaaggtggagtaccagcactctatgctggcttgatccccagcttgctacaggttctgccatcagcgtctatcagttatttcgtatatgagttaatgaagatagtcctgaaagtggaatgaatgcaaattaattcttgagcatgcacatcaagttcaagaagcccagctcacattaccttgacaaaattcaagtaaacagcgcatttagatctgtttttgtagcatttcttcacggaagcttcaaaggccgtgggagtaactttatcttggccaaagcctgaagcattgttcgctcgaagcttttcaccacaagattaccttatacacgatgaggtcttgttcgacatctgattcgatcaccgatctgttgcagattgatctgtcatagcaaaaacatatgggcttcttgcccttcagatttcaattaacaaattttcaacttttcatttttgatgtattgatgcatcgactggaaaggaaagtgggtttgctacttgct

SEQ ID NO: 15926 - DNA, 4594 bp, Oryza sativa
  ref <308>: DATABASE ACCESSION NUMBER: AK066435
  ref <309>: DATABASE ENTRY DATE: 2001-12-06
gagttccctctccatttcattgatatttgtgtgtaagctctacaatgggtgaactggtgaccagcatggtgatcgggccactggtccacatggtgaaggagaaggcttccagctacctcctggagcagtacaaggtgatggaaggcatggaagtgcagcacaagatcctcaagcgcaagctgccggccatcttggacgtcatctctgacgctgagaagcaggcatctgaacacagggaaggagctaaggcctggcttgaggagctcaaggcagtggcctatgaggcgaatgaagtcttcgacgagttcaagtacgaggcgctacggcgtgaagccaagaagaacgggcactacaccaagctcggcatcgatgcggtaaaactctttcctactcacaaccgtgtcgtgttccgatacaagatgggcaggaagctctgccggatcgtgcagaatattgaagtgctagtcgcagagatgaatgcctttgggtttaaattcgaacctcagtctatagagtccaaggaatggaggctaaccgattctgacatctttgacccaatgaacattgctagcagatcgagagatgaagataagaagctgctcgttagcatattgctctcccaagcaagcaatgtaaaactcgccgtccttcctattgttggaatgggagggctaggcaaaactaccttagccaaactcatttacaatgagcctgaaattcagaaccatttccagttgatgatctgggtatgtgtgtctgacaactttgatgttgcgtctgttgctagaagtatagttgatgcagttcctaaaaaaggtgataaagtaaccatcaatgaaaatcaaacctcggcacttgacgagcttcagaaattagtgagcgggcagaggtatctccttgtattggacgatgtttggaatagggatgatgaaaaatggcgtaaactgaagaaatgcctcgaacatggtagcactggtagtgcagtgttagcaacaactcgtgaaggaggagttgctgaactaatgcacacaactgatgcatataatcttactgctctaaataacagtgtcattaaggaaatcattgacacagcagcttttagaccgaaaaaggagatcaagcccgctgagctagttcaaatggatgataagtcattattatctaaaaagaaggaaatgattgatcagtttgtggagagatgtgctgggttgccattggcagcaaaagcactaggttctgtactttataccaagaccagcctggaagaatgggaggcagtattaagaagcagcagtatctgcactaaggagactggaattttaccaatactgaagctcagctatgacaatttgccgtcacatatgaagcagtgctttgctttctgtgctatttttcctaaggattacgagattgataaggatcgcaaatggattaatcccagaaataaaagatatccgccttgaaaccactggagaaggtattttcaatgaattagcttctagatctttctttcaggagttgaagcgagtccgatttgacaaatatagaagcaaccatgggcattgttccagaatcatatgtaagatgcacgatcttatgcatgatgttgccacttcaattatgggaaaggaatgtatcgctataactaaatatcctactgaaagagggtcatattcaaatgctactcgccatctacttttatcatgtgatgatccagataatgtgatgaatgattatctgaaaaaagaatctccagctatccaaacactgctctgtgctgaacctattttcacatcaagttcattgcaacactcagcaaaatacagagctgtacgagcattgaaactcgatcagtgtaggagtttgttcttacttcagccaaagcatctacatcacttgaggtacctagatctctcagaaagtgatatcagagtacttcctgacgatataagtatcctatactgtctacgaactttgaacctttctgactgcagtgatctctatcgacttccaaaacaaatgaagtacatgacagccctctgtcacctccacactcatggatgtacaagtttgaagcacatgcctccagatttgggaaaactcacttccttacaaacactcacttgttttgtagctggtactggctctggttgcagtaatgtcggagagctacaacatttagatatcagcggtcaactagagctacgtcagatggaaaatgttaacgaggaagatgcaagactgatgaaacttgaaaacaagaagctctcaacactttctttagtatggaatgaaaatgacaaagaagatcgatcttacaccaatgcatcagattgtcatgagaaggtgatcgaagctctcaaacctcatgatgagcttcgcgttctgaatgtcaaatcctgcaagagctcatctttcccatcatggatgggtatgcttaaacgccttgtagagattgatctagataattgtacaatgtgccaaaatattccttcagttttggcagctacaagatcttcaagttcttcggctggatggattccatggactgcagtatttgtgcagcattggtcaaaacagtgagataccgtcaacattcccaaaactaaaagagcttaaactaacaaacttgaagagtttcaaccgatggtgggaaataaatgagagacaagaaaagcttgattttcctcagcttgagaagctggttattaagggatgtggagagctaacatcactgcctactagtgacagtaatatgtcagagcctgcattaccagctttaaaggaactcgaactctgtgatttaaatcaattcgagagatggcaggcagcggaaggaacacaagacaaaccaccgaccttccctaaccttgagaacattagtattgtgaaatgtccagagttgacaagtctaccagaagcaccaaagctcagtgtgttagacataggaaatggctctgaacagatgctcctttgcatacctagatacatggcttcattgtccactctgagattgcagcatgaaggtgaagaaacaacacctctaactgaacgctttttgattgagtgggtggatggcaaggacaatcagaatcgtgagtaccctttgccagttatgaagctagttggcttcaacgtgttcttccgttcaggtgcacaagcactatgggcatgctttgcacagcttaaagatttggtaattattagttgtgatggtctcatccactggccagagagagaatttcagagcttggtagccttgaggacattagtgatacagcgatgcagcaaactgaagggattctcgccacaagctcttgagcagtcaacatcaggaagggagatactcctgccacgtctggagtcactatcaatacatgaatgtgaaagtttggtagagatcttcaacgccccaccatctctcaaggaaatggacatagacgacaaccctaagcttgagtcgatattcggccagcagagacacgggccagcagggccttgcagcgacaacattgtgtctgctgttgcgttggaaccatcatcaccagctggggaccgcttctctcctcctgaatcactggagtctcactcgggcgagctcccttcgttggtacaactcaatctccaccactgcaaaagcctggcatcgctacaagattcaccgcaagcatactcatccctccaacagcttatcattaatgaatgccctgctctaaaagtgctccctacatgcctgcggcaacagctgcccagcctcaagcggaaatatctagacgcccatcatgaaggtacgcaataatttctttattcccataacgaagcgaattcgatcaatcccccgtgtattttgtcatttttatcccattataccactctattgttccaacttgttcagatatcctaggctgaactattttaggcatctacaggtaatcaatccaaagatatgtaagtgcttataaaagtttcaagctcgtgaaaaacagataaatgcagagaaactagtcaatagtaaaaggagcagtcagaattatagaatagaatgacgagtactgctgaaaaaaatcccaagaagggaatattcctttacctaaaaactcgttttttatttagtagtgttcacttcaatactcctctttacatatagcacggatttaagccaaattcctctatcaatgactaggggataaattagttctaacaattgattagtgcttatatttgacaggattgttcttggtttgaggttgagttttgccagatgccaacaagattgaaattaaacccattctcattcttatcatgcatgatgttctttccattaaaattatcgtcaagtcctccataaaaatctcaaaatggatatagcaaattaatgttaagggactgaaaagtcgaatatactggatcgccaaccctgctcttgcaagttcattagcgattgcctatatacttcatcttaacattctgttagccaaggatttcctcaacactgattttcattaaagtagtttgtaatagttctctactcaagatatatactacaatactttttgtgtaatgcctatatatacatatatatttttttcatggt

SEQ ID NO: 15927 - DNA, 2455 bp, Oryza sativa
  ref <308>: DATABASE ACCESSION NUMBER: AK066436
  ref <309>: DATABASE ENTRY DATE: 2001-12-06
ggcctccccccacagcggaagaagattccaacgagaaggcgagcgagagagaggagaagaaaccaagagagcgagggcggaggaagcagtcgagctctcccagcctcggcggctaaactccccccccccctcgctttcttcccctccttcctcaatctccaagcctcgatatccgtgttcttctctgaccgaatccgaatcccgcgtttctttgttgcgcgcgcgaccgcccgcgggaatcttggtggttcttgggcgatcgtgatggcattggatggcggcggcgaggttggcaggaggaggaggaggaggggatggggaggcgggttcccgagcctgatgcggcggaagcaggtggactccgaccgggtccgcgccgccgagggggaagggcaaccccagctcgccaaggagcttaacatcccggcgctggtcgcgatcggtgtcggttcaacaattggagctggggtatatgttcttgtcggaacagttgctagggagcatgctggtccagcattgacaatttcatttctgatagctggaatagcttccgcgctctcagccttctgttatgccgagcttgctagtcggtgcccatctgctggaagcgcctaccattattcatacatctgcgttggtgaaggtgttgcctggttgattggttgggctttagtgctggaatatactattggtggatctgctgttgcccgtggcatatcccccaatcttgccttgttctttggaggaccagacagtcttccatggattttatcacgccaccagcttccatggtttgatgtcattgttgatccctgtgccgctgccctcgtttttgttgttactgttttgctatgtgttgggataaaagagagttcagctgtacaagagcttataacagttctgaatgcttgtgtgatgatatttgttattgtagctggtagttatatcggcttccagataggatgggttggctataaagttactgatggatattttccacatgggataaatggaatgcttgctggatcagcaactgttttctttgcatatattggctttgatacagttgctagtactgctgaggaggtgaagaatccacagagagatctaccactgggaataggagcggcattgtctatctgctgttgcttgtacatgatggtttctgttgttattgttgggctggtaccatatttcgctatggacccagatacgcccatttcatctgtctttgcgaaacatggaatgcagtgggccatgtatattgtgacaagtggtgctgttcttgcactttgttcaactttgttggggtcacttcttccgcagcctagaatactaatggcgatggcacgagacgggctgctgccatctttcttcgccgatgttaacaagaggacacaagttcctgtaaagagcacagtcgtgactggtctctgtgcagcagctctggcttttttcatggatgtttcccagctggcaggaatggtcagtgtaggtacactccttgcattcaccatagttgctgtctcgatcttaatactcagatatattcctccggatgaggttcctctgccttcatctctgcaagaaacattctgtttgagccaagaatatgatgaggaaagggttagcggtattcttggagatgagagatgcaaaacatctgaaacaaaggatgtgattctcgcagaatctatggaggatcctctcattgagaagaaaataacaagaaagatggacgagatgaagcgtcggaaggtggccgctttcagcataggatctgtttgtgttggagttatggttctcacatccgcagcttctgccacatggctgccttttcttcctatgtgtattggctgcatcgttggcgctctgttgcttgtagccggtcttggcctcctctgctggatcgaccaagatgatggcaggcattctttcggccaatctggaggatttacatgccctttcgttccacttctgccagtcttgtctatcctcgtaaacacatacctgttgataaatctgggtggagaggcatggatgagagtaggcatatggctgctgataggcgtcttggtgtacattttgtacggacgaactaacagctccttgaaggatgtcatctacgtccccgtagcgcaggccgatgagatatacaagagttcatctggatatgtgtcctagaaaaaaatattttttagtttgcactattcttcagtgacaacatgcctcacctgtctgcaattggaagattagcctggacagaggagatgctaaatcattcatacttggggaaaaaacatggatgcaatattatatttaggatgtgcataggtgtatatataaacccaattggacagtggaatacatgattttgtgtatataagccctttgtactaaatggtaaactgaaaagcggttatcgatgaaaaaaaagtgcaatagacgaagtact

SEQ ID NO: 15928 - DNA, 1304 bp, Oryza sativa
  ref <308>: DATABASE ACCESSION NUMBER: AK066437
  ref <309>: DATABASE ENTRY DATE: 2001-12-06
gattcgccgccgcatcgttcccccacttcgcctccacctccatctccggcgccggcgaggccaggtttgaatcggcggtgctccggtgctcccctcccctcctcgaggcgacaagttccatgggtgtttgcgagccgacaagtacaagagagagcttcacagcctaaacccaaagctctaatctccgcctctctgaagcatttcgtcgagcagttggtgcgggcgctgaggcagaggccatggcgatggcgaaggccaaattgatttccctatctttcgccgacaagtgccggaatatcctgtgtgcaaattgggaagcgcacctcaacactatcaaagctgacatcaagggaagcaagggggagatttacacatcaagggtgcactacatggtcgagaggggcacgacctacttgattgttcccgaagacgacaggcacaccattaacattgtaatcgacgagcggggatctctctcggtctgcagcccaatcccaggccgccttactaccttgctcagatcactcgggaagttgcctcctcgaatcgctatgactggtgatgtgctgttcatgaaaaggtctaaggttccagttatcgccgatagcctgaagaaagctattctgaaggaacacaaagctgctagtgaagctagccatagtgtgtcagcaatattatcttctgcaagtgctgcatgcagatcacggagcgaaggactcctcagtttacttgaccaagggagctcctacaatatcttaaagtttgaaattggttcatgtgtctacatagattcgcttgggagcagccataaagttgatttggataactttgaaccaccaaaagcagatctgttattgccattctctgcgaggattattgatggcatcaaccggagtgacccaagacggagagcacttatctttttctgcttcgagtattttaatgtcactgcaacggacgcactcttgctctctattgatcaccatggatttgatgtgctcgccaaggtccctgaaaaagcagtgctccttgatgtcccacgacagtacgtctggagagagttcaggttttcattcaaagaagctgccaaggatattgaggacttctgccgcatgttggttgagttagaagaagaagctctccagagtatgaagagctatagcgggttataggtctaaaggggggaagttaacttgtttttactacgttatgtaacccgagaatttatgatgtctctcccttatcttttctgattggaggtacatgcagatcgttcaatagattttatcttatgtctctgcatc

SEQ ID NO: 15929 - DNA, 3385 bp, Oryza sativa
  ref <308>: DATABASE ACCESSION NUMBER: AK066438
  ref <309>: DATABASE ENTRY DATE: 2001-12-06
tttttttccagctgtatgaaataatataccgaatttaggctgcttcctgatttcactctgtatcatcttggaattaaatttaggatttggtcctgccgacaatacccataattagtccaactccagcacgccggattgccggaaggttggcgacgcgttatcattgcccaggcctgctgccccttctcccctccttctccttggtgaatcgtcggcgatggatatcgctcttgcttctgcggcggcgacatggctgatcaacaagctcctggaccggctgagcgactatgccatcaagaagctgctgggctcggagggcctggacgcggaggccagctccctcagggatgcgctgcggcgagccacgctcgtcctcggcgccgtgcccgccggtgccgccgcaggggtcaggattgggaacgaccagctacttccgcagatcgacctggttcagcggctagccaccgatttggccaggcacctcgacgagctcgagtactacgacgtcaagaaaaaggtaaagaagaaccagaagagcagcaatccattatccaaaatgaatttaccccttactcaagctgggcaatcaaagccgaagtacaatagaacagacataaaacagattagagatactgtgggatatttgcatagcatttgtgatgatgttcacaaggctctcttgctagataaacttgatgcaattaaacaagctgctcaagatgcaagtacagacaaacgtgagactgtggataacttcactgaaaatcctagaaataaggtgttcccaagggaagaaatgaaagatattatagaactaattaatagtgctgcatcgagtgatcaagaacttttagttgttccaatagttggtgctggtggtgttgggaagacaacacttgctcgattggtgtaccatgacccagaagtaaaagataaatttgacatcatgctctggatctacgtatctgctaactttgatgaagttaagcttacacaagggattctggaacaaatacctgaatgtgagttcaaaagcgccaagaatctcactgtgcttcagcgtggtatcaacaaatatttgaccaaaagatttctgcttgttctggatgacatgtgggaagagagtgagggtcgttgggacaagttattggccccacttagatccgcacaggctaagggtaacgtactcttggtaactactcggaagttatcggtggctaggataactagcaacacagaagcacacattgacttggatggtatgaaaaaagatgacttctggttattcttcaaaagatgcatatttggtgatgaaaactatcaaggccaaaggaagctacagaatattgctaagaaaatagccaccagactgaatggcaatccattggcagcaaaaagtgttggtacacttttgagaagaaatattaatgaggattactggacaagaattctagatagcaatgaatggaagttacaagaaagtattgatgacattatacctgcactaaagctcagttacaatcagcttccctatcgtcttcagctactcttcagttactgtgctatgtttccaaagggttacaattttgacaaaggacagttgatatgtacatggattgctctgggatttgtcatgaatgagagaaagaaattggaggatgaaggaagtgactgttttgatgatttggtagaccgaagctttttccagaaatatggagtgtcacagtattatactgtgcatgatttaatgcatgatgttgcacaagaagtctccattaacaaatgccttattattgatgggtcagatcttcgaacagttccgtcgtccatttgtcaccttagcatctggactgagccggtgtacaatgagcaaagcatagaacggaatgataactttgaagagaagttagatgcagtccaggataatgtcttgggaagcttggagtgtttaattcttgcaggtgtatatgatgagaactactctgctaagtttgtgaagactcttgagcgagtacgttatgtccggatgctccagttaacagcaatgccattcaattctgacattctactatccagtataaagaagttaatccatcttcgctacttagaactgaggtgtacgtcggataagcccaaatctttgcctgaggctatatgtaagctctaccacctacaagtactagatgttcaacattggagtggtctaaatgatttgccaaaggatatgagtaatcttgtgaacctacgccatctgtttgttccggggtcaggatcattgcactccaagatatccagagttggggaacttaagtttctacaagaactgaaagaatttcaggttcaagaagccgatggctttgagatttcacaactcgggaacataaatgaaatcagaggatcacttagtatccttggccttgagactgtcaaaaagaagggagatgcaactcgtgcaaggcttaaagacaaaaaacacctgaggacactttcactaacatgggggagtgcaagcggaagtactactaccgtccagaaagaagtgatggagggtcttaaaccacatgaaaatctttcccatcttcttgtctacaattattctggtgctactccatcatggttattaggagatagtttctcacttggcaatttagaaagcctccatctccaggattgtgcagcagtgaagatccttccaccatttgaggagatgccattcctgaagaagctgtccttggtttgtatgccctgtctgaaaagtatcaggattgacttcaactctgccgatgaggaggatgaacttgagttaagcgaaattgaaatatccaaatgtttagctttaacatccataagactacattcctgcaaggcgttgactatgttaagcatcaatgattgtgaggcactaggttccttagagggcttgtcattttctgaaaaactgaagcagtgtgttgtccaaggatgcccaaaacttccgtcaggtttcatcgcaaactgatgatttggtggcaaactctatcaaactagctaccaaagaagaggagggaaccgggatgtggacgaccttgtttctgctgaaaaaggcatgttttaacttctgtcagtggaggcagcttggacgcttactagttcgtgctgtatcgttgtggtttttgctgttgtattcactattattttcgtatactttattgtcattttattcacactaccatatatggaaatgttgtgcctgatgtgtaatatttcggtaggcacaccggctaaaacattaaatggtcttaaataccatgggaacacatctgcccttctatgttacccagataaatacattgttattttgtgattataattgtaaggccgcaatgaagatttgtgctatatattc

SEQ ID NO: 15930 - DNA, 2913 bp, Oryza sativa
  ref <308>: DATABASE ACCESSION NUMBER: AK066439
  ref <309>: DATABASE ENTRY DATE: 2001-12-06
gactagtcatttccacacccgttattcccaaccgcatcgcgtcgcgtcgccggctcaagcaaacgcaccggcgcctctcgccgtcgccgtcgccgccatctaccagcgccttcttctccggcgcatccgtttcacgccctctcacttcctcgccggtttccacggaggagggagcgatccaatcctccgaggaggcggcggcggctgcgggatcgcgggattcgtcgttcgatctgtgtggctgcgggtgcgggggggtgtggtcgatggcggcggcggcgtccaggaaggaggaggagaggaacgagcgggtcgtgagggggctcctcaagctgccgcccaaccgcagatgcatcaactgcaacggcctcgggccgcagtacgtgtgcacgagcttctggacattcgtctgcatctcctgcagcggcatccaccgtgagttcacgcaccgtgtgaagtcagtatctatgtcgacgttcaccacgcaagaggtcgaggccctccagaacggtgggaatcaaagagccagagaatcgttcttaaaggaatttgatgctcagaaaatgaggctacctgatagcagcaatgtcgacagtcttagggaattcataaaagctgtttatgtggagagaaggtatgctggtggaaggttttctgaaaggcctccaagagataaacagaatcaaaagaacaatgaacaagagcatagaagggctagttcgtaccattcattttctcagagcccaccttatgattaccaatacgaagaaagacgcaatggcaagcaatccgtgatgctaactaggaaacctggttcagatagggggcatgatgggaagatgtctggatttgcttacagtccacagagcctgcatgagaggatgtcagaagaccgatttgccaatgagaattctggaccaagaatttctgactgctcagggtcaagcatcagtaatacatttagaacgacaccacactcaccgaatttccttgataaagggtgttccagcccctctatgcaacaaaatcaatcaaacatacaggcttctagtggaatcactcaatctgagagaactatatcaacaggaaacatagattcgtcatctacaaaatcaagcaaatcaagcttagctgatatgttttttgaatctgatattgctcatagaactcagcaaacgaaggattgcattactccaagtttcacagctttctctgatgttgccaacattgcacagaaagatctccttaatgagcctgttgcgcagcaacaacctgtaactggtttggatcaaccagtagatttttttgctagcatgcctccggcaactccatccactgatagaatgctcacagcagctccatcaatggacaatgctgggtgggctacatttgacacaccaccagaagaaaagcaacctggagtgattgggctttctggcatttccgtaatggataaacatgctttgagtggtgatttgttttcgtttgaaccaaataatgatcaaccaacgtggctccagagctcaaagacatcaaaaaataatgcttctgtgactgatcagtctgatgtaccttgtaaatatacatcctctgatgcaagtaattctcaggcttggagtgcttttgaggccaaaagtgttagcacccaacaagcctcgccagatctttcactaatgagttctatagaacctaaagaaccaattgatgaaaataaattgcagctctggcattcattcgatgatgcaagtgagactatgactctcaatctgtccaatgctcagctgcaaactaatgagcacaagaatgttgataacaattccctaacaacaagcaatccatttacttgctccataacgtcaaaggtacccctttgctccataacaacctaatatatttttccgtcatgtaggaatctcgtggtaatgattcccaagaaattttcatgggtggattagctcctagcgaaccctttgctccattccctgagccatcactgtttgctactacttccgtgggagaagcctctgtacagcagatgccgttgaatccatttgatcttccatttgatgctgactcggattctccagatatgtttatggatgtgacagcgttgcaagcggttttgcctaatgctgacctatcaacttctttcgttgatggtttgccggaaacatggttctccaacaatgcgtccgcttatgttccaccggggtcacatggtggacctccatgccttgtcgagcaaatccccaactctgcactcaggaacataacattgagcgctgtatcaactggaaatccttttgcatagaaaatggcctcagccttcagtttacaaactagaaaagctaaaggctcggtaaaatccttttccaaaaagcagctcaccagtcaccaccaaattacaaattggtgtgtgattccgtcctttggttagtgaaactatgcatatgtacaaacaaggaggaacatcgtgaaggggactgtgcggagaaattttgcacacatatggtacaaaccaaggaggaacatcatgaaggggactatacggataggataggatgcgactcgttggttgtggcaaatgacaagctcggatgtgggaaatggtagactttctcacaaatcttatcaacaactgaaaatcagttttagtgtattttctttaggcaaatgtgtacggataccattgctccttggagctatagtgcagcatgttagctgcggagttcactggaaagattttttttttttttgtggaagtgattatttagattcctcggtatatggatcagtcccagaatcctattttcagttttttttggactaaactaacattatagattgtcttcatttccacaatagatctgagaattcgttttttttaacaaaaatctaagaaggattcactcc

SEQ ID NO: 15931 - DNA, 3309 bp, Oryza sativa
  ref <308>: DATABASE ACCESSION NUMBER: AK066440
  ref <309>: DATABASE ENTRY DATE: 2001-12-06
actatgagaacaacctgctttctgaaagcaaataattagcttgctagaaaagtaagtgttcgtaaatcatctaccttacttcatattgtgaggtagttacgcaaattcaaagtgcaatttatcgaagtgtatagaattaggtatagcagtggaagtgtgtaatcaagaggattttcttaatactgtttaagctgacttaaagatcatttttacaatacaaagcaaatattaaatagattatgtgaaagctatgaagttgtggtgtaacatatggaaaacagaaacaaaatagttttggtaatggtacagggtagcatcatctgaatgtcaagcaaagcaagcaacatatagcttagttgtaaaaagagtggattcccatcagtttaagtgtaatattgcttatacacaggtagtttcaaggtttgctaaaacctagctagttgaacatagaaaaaaggtaactgatattttccaacactcacaaattcagcataccaccaacttccagattagctcaaaacctgtagaagtaatatgagagaatcaatgttccaatttttttacttgcttcattcattgttgccgtcaacctctgatatccttaaaacagttggatcactgttggattggtgaaagccagaaataaaggctccccgaggacacccaacatttgctctagttcgagcttagtgttttctatattttggatttcctgaggtgttaatggaacaaaaacaaaataccagaagattcaaagcttatcttcatcatatattttattatgggtaaagcaaatctgtcttctactaaaactgcacatagtattatcagcaggtaagttatttgaaggagagtaagtaaaagaactgaaaaggatcggattaagttaaggtttcaaattttatgtaaattagaatggttctaaatatagtgaaggaagaatggaatacagagaaggatgcatatggccatatgggttgtgttttactgtcttaccatttaattactcattggcaacttctcttatgcctactcttacactactatatcaagtggatattgggataaaattacaatccacttatcattacccaagttcagcaagtagccacagccagaacattaattcttcttagctggggatgaaatacttgtctcccttgatgccacagacaacagcttccagaagaatcaacctaatcccccagttttttttttttcacatgcatgttcttgtcagctagggtgttagttttaatattgtcgaggaggccagtttaagatggatgaagtagaactgcccaataaaggaatatattttctgttgctgcttacgggagaagacaatcaatccatatgaacaggagtaaaaattccagtgccaattgaaagttttcatttaggaagcaactagtatttttgcagcacaactattattcagaatatcattcaagagtaccccattcggttgtagagaatgagctgccatgtactcctagtgtctaaccttggaagttggggtagtagtatcaacgatttgtgcagtcagtacagtagaagtcaaagagccaacatgttaaattaaagatgagtagaaaacaaaaacaaaaaaacaaaatcctcatctaataatcttaacagatgctcccacaatcccacaatatcaccatctaagcattgaggcaaaacaataatcattatttcaaccaggagcaatttgatcagatcatgcaccgacgctgaacgtttcgatccccgcgggaattctcgctccctcggtctcggaggcgcaagtgcgggagcgggaaggtggacggcgacgagaagaggaggaggagagagcgaaggcaacgacgtcgatggcgacgaggggggagaggtggacgggtgtctcgtcttctcacggtggtggggatgaggaggggatgctaatatgctattttgcggcggggatggggaggaggcggcgccggcgctcgcgggagagtaggcggaagcggcgggatggtgcgcggctaagttgaggagccggatatgggggcgctgatggataggaggaggcggaggcggcgaggggattcgaagcggcggcggggtgtatttcgaaatattatttttttaaggtttaatttgtaaatatgtattttaagaaggttcccgttatctctccctttccccctttttttcgctgtctagggtttgcggcggcggcgcccgctcacctcctcgccggccggacggcgcgaggaggaatctctccacccccacactcctcgcgccggtgcccctccctccccctccatcctcctcgcgtttcgcttcccctcttcgcactactccgactcccagccggaagcgccggtgtcgatggcggacgatgccggtgccggtcgcactcgcagtcgcagggatccttccgatcgccctacgcgttcaggccaatttctaatcagggctttgctacgaggcgaattggaggagcgcactgcagacgcaaggtttatcccacttacaccaataatggaggatctatttgtcagcggcattgaagagattcccgaagacacttctgtgcatcaccagcaaactgatgagccaccaccatcctacaacaccattaggaggggtgaaggcacattaatggctgaactgcgtgaggctacggagcaactacgtttgtctttctatgccaacacagatgaagaaactcgggcacaaatgaaacagttttgggatgaagaattcaatgcaatatctgaagaagcaactattgagagaggtttagagtggatgcgggcggaggttgttgaggcattcagtacacacagtggggctaatgtggttgaatatgagcttgaagatatttctcaccagtgtttgatttttgatgattgtgccaagtcttatcatcattacaatttcataatgaagtcgaagtgtcctgattctcatttggagggttcttgtctcttttttgctgaagttaaagttgtggatggagagaaacactatttttgctgtcccctacaacctgatgacgacggtcattgtcacggatgccaaaactctggaattgatcttaagcatccttcagacggtggctacgaggagggcaacgctgactctggattcccttttgatccaatttaatttgatggatgaaaattcagaaatatgtactaaattgagcagcgcctgaattgagttgtgtgatgaatgctcctacataaaccttgtgttcatgttcaaactggctattggtattgtgttttattcggtagcattagcaatctattagcaatatgttgc

SEQ ID NO: 15932 - DNA, 3252 bp, Oryza sativa
  ref <308>: DATABASE ACCESSION NUMBER: AK066441
  ref <309>: DATABASE ENTRY DATE: 2001-12-06
gaggggaggggagagaggagaagggaagggaggagaggcgaatgagcgaggaggcggcggcggcggcggcggcggcgggagcggcgggagtggaggagtcgttagggaggcggaggagtaggaggggcggtggtggtgatggggtggggatgggggcggcggcggcggcgagggtgtgggagttcgagcgggatctggtggccggggcggcgatgggcggcgccgtgcacacggtggtggcgccgatcgagcgcgccaagctgctgctccagacgcaggacggcaacgcggcgctgctgggccgcgcgcgcaggttccgcgggttcgccgactgcgtggcgcgcaccgtccgcgacgagggcgtgctctccctctggcgcggcaacggcaccgccgtcatccggtactacccctccgtcgccctcaacttctccctcaaggttcccacccccaccccgaaacccccccgccatttttgttcttactgtttgtttgttccttgttgtccgagttatcgattcgtacgttacaaccgcatcaatattgcttcggtttgagataacagtgccagtgcgatcttgtgggtgttttggtgcggcggatttggggttcatggttccattccttgcttgatcggttcgtatgctttagtgtgtgattcgatgagcacaggaattgtggtgatgtcggtaacttcttggtttggggaagcatctggtactggttctacagcgtgcggtgtaaattcttgaggatgagagattgtattaggtcattagattctgctgggatttcactttcgggggagaaatgtttgcggacggaaatagaaaaggaatcaaagaataaagtgctctcgagtcttatgaaagagcactatagactagcactcatgaacactaaatggcatcttgatgcacatattctcacaacatttgtcgtacttgttagtcattgtttccaatagcagcaatgccagttagcatgtaaacctttttgttctctattgaggatctaggagataggaacagtactgtacatcgatataaatttcatgattggttcatttgaatggtactccaattgtaccacactagcatcttgctagttattgccattatgtggtggtatcttgtgaactgatccgtaatgaacatttgattccaacaacagtgatgtaactactaaattagtaagaaggcattatgtggacttgctcatgcgttaaggactgtcattgttgtcatggtgttcgatgcaacatatgttgttattaatgtgtgatgaaataatcatatatagttactgattacaaaagatgtacaaaaagatctgatgccaaatatgagaaacttagaaaagcttttgggcaagatgacagccattctctaaaataacaaatggcaaagcgacattgctaaatggatatttgagttgcacctttttaagcagctgtaggactgtaggagttgcaggcacttcctgccatagtcaaatagcatgaccatgatcaaatcccttgatatatagtcatattataactcaagaaacaaatagattgcatctactgccagctactataagagaaatatacattgtacggcaatatagaacataacagtgataactatttgaagatggccaattaattatcgtgtttttgcctctgctgattttcgtgatactatttgaagccaggttgccctgtgacttgtaccgaatgcatctgagcttatctaaattgcagcagggtactgctttgcctttactcacttttaccaaattattcttgaagatttatgttgtggattatggcccatgcaacatatgtttggttaatgttaacatctcttcagatgtgtcgatttgacttgatgatttccactcacacttagctatgtttccttgatgctcaattatgttgaaacaagaattgctcatcttagtggcgaaagacatcgaatgtatgataagttgataaaccataatggtataacagataataaccgatgagcaactatgcactactttacaacagaggtatctaaaatatcttattgtagaataagagttttgtaagaaagcaattatggaagtacgaacaatgaaaatgatggttggagtggcttttaattatgaatgcttatctcaattggtatctctaatcactgatcgatattcttgcaggatctgtacaggagcatactgaaagatgcaggaacctcagctgataacaagttctcttctattgctttaaccaacttcattgctggtgctgcggctggatgtactactctggtcctcatttatccacttgatattgctcatacccgtcttgcagctgatattggccggaccgatactcgccagttcagaggcatttgccacttcgttcaaaccatctacaataaaaacggcatcggggtatctacagaggattgccagcatcactacaagggatggtcgttcaccggggcttatactttggaggctttgacaccgccaaggatgtgatggtaccactagactcgcccctgtggcagcgctgggtgacagcacaggcagtcacttccatggcggggctcatctcgtacccgctggataccgtgcgaaggaggatgatgatgcaatcagggatggatgtgcagatgtacagcagcacccttgattgctggaggaagatctacaaggtggaggggatcaagtcgttctaccgcggagcactttctaacatgtttaggagcactggcgctgccgccatacttgttttgtatgatgaagttaagaagtttatggacaggggtaggttatgacttacgacacgtatagagggtttggttcaggttctccacagatttttggattcagtatggagattagaccgccaaaggtacagggagcagcaagctcgagcattttgtaatagagttgtagtactggattcctccaggtcactaacccagctcgatgtaactggcgttcttcatggtctgaagatggtagctcttgtttgttcatttggtttgaaggcagagctttgcttcttgtgttattgtcattggttgtatgccagcctacacgtgtgactcaaaagttcactcttcagagttcaaacggtagtttcacggcgaatttcggtcaatttctgcgtggcagtcgaacaaaattgtcttgtcaagaaatcgcttatgagcacgcagacaaggcacttgcgagattactttactcaagcctcggttgaattgcaaaact

SEQ ID NO: 15933 - DNA, 3218 bp, Oryza sativa
  ref <308>: DATABASE ACCESSION NUMBER: AK066442
  ref <309>: DATABASE ENTRY DATE: 2001-12-06
gtcagaaaaattcccaatttgcatgtacgagttgagtaggtttaccgcctccgtcggctccaagtgcgacggggcagaggccggcgcagacgacggcggcggacccgcccgacgagccgccggccaccttgccggtgttgtacggattcctcgtcgatctgaaaccatcaaaccaggtaagaaacccattggtaaaagggtaaaaaaaaattgtgatttggagaccgcgcggatgatgaacaggacgacgacaagtgatgcgtacccatggtgcgggttgatgccgctggtgccggcgccgagctcgtgcatgttggtcttgccggcgagcaccgcgccgcacgcccgcagctgcgccaccaccgccgcgtcctgcacgcacggccgcatcctctgcagccatctcgttcctcctgttcatatgcgtctttgatcagtttcagggtacagtacaaccaatcagacataacatttccacccctaaatataaaactagtatatatgatttagggcctaccctagtatcgtattggtctcactttaaaccataccattttggggtaaaattgacagacatgtggatgaatttagtctgttatcaaatattggtaatgtgtaaaaaattgacagcacatttagcctatcataccaaaactcggcaatgttgccaacctatcaaattttggtattgccaaattttggaaatattcattttgacagtaatctgaactggtctttatttatcatgtttgctatgtcgacatagatttggtcctgacattagttagaatcttcagattcatacactctctttcttcagaaaaaatgtttttaatttgcaaacagtatttcatagcatggccaatgcaataatttattttgtcccctacaaaaaaacgagttagtacagcctactgtagctaatttaaaaaataaaagcaccgatttctctctttttgcaacaaatcggatcacgtcttctgttgatgaacagtatcaatccaaaacacacatgccaattgtcagcactcattttgcaagaagcaaacgatcgacggacagtgtgtacggcgatgaacagtgtcatcagaatcatccgaccgtaccggggcctcctctccatggcggcagcagctctacctaccgtcctgcagctgattaaatcctgattccgattgctttttacctcctgttcttatatatgattcgacaaccttagcaccgttgatgatacctgatcttgtgatgttcttacctgttgttgggtatggcaggcagtcgatctcgtctttgacggccaccaggacgccatccatggcagagagaggagctcctgcagttaattagcatcaagaacagtcaaacacttgacataatccaagaacaattaacagttaacagaagccaagaaatgaaatggtgcatgcaatcgatcaggtaaaagctgcatgaatgcaaagagtaaacgatgagatactgcaacaacagatgcatcagcacaacgagatgccttcaattgcaacagatcagcaggccaggccctgcaaggaatgtagtattggcctctgcgtgcaaccacatgcagtggcaactaaccgtccctatgagctatcaatgctggatcaggaccatgcaatgctttcagattcgatcaagcaagcaaagagctagtctagtcaatgcatgatcattaggggatgatgccgatgccatttctatggaatctttcatcagaaagccccttctgttcgaagtctgaacattttgctccatgtcagattagtccgagccctgaatctgctgcaagctgcgtgttgtttcattgtggaaacatctctttcagagaccagtccgtgcattggcaggctctgacaatgccttcctgtaaagcatctgctgatactgttcatccagctggtcagttccagactgcaatggcagtaatagtagtacttcttcaccagtactacaagtaaaaactcatggccggaagcatgcaagttggtagtagcatacagaagtaaacatggtggttatgacagtttaatttctgcagattctctgaacctaaatgtcaatggtgatgaaggctagacactgaggcacttgctgagtactgctagtatgatataattactgtttaatgctcgaatgattcattgattttgatttgttgatacggttctttggcataatgtacactgaaaatgtagttgattttgtttaccttgctggtatctgagggtggatgcctcggcctgtctgatgacgtcctgaggattgcagctgatgaacaaggccatgttcagatcagggcctgaacactccttcactgcagcgagaaatctcctcgcaacctgccagcaatgcagtacaagctaattgggtagcattcatgaacaagaatacctctaacctactaaaattcagagtgatctctcctgagatgtaggcactggtgaagtcccggattgtccagcgcctgaaccccggcgatggcgggtcagcgagcaccgattcgaggcgagccgggaggcagacgacggcctcctgaacgcgctctgccggcgacatgtctggcttcgtcaggctcacattctgctcagggatgtctgcaatgaagcaacagcagcaggagcagcagtattttcagaagaagtgatgatcatctaccttgttgacaagattgtctctcttgaggatgtagagcacgattgagccgatgatcggcgcctcaagaacccatgcgaatatcttcaccagaagcccagcaacccgtggagctgaagaaagcaataaaacaaaaatgatcagacataagcatacaaatcacttccaagaactgaaattctgaattctgaatgcaaaagctctttgacatgaaaatggacagaaaattcagcaagagcttgtaacctttgacgttggggctgatgtagaactcgttgctgtcggcgccgagattgacctccgacgccggcttgtacaccttgggagccgagctgaagacacccatggatggaagctgatgagctgagctgagctcaagaagaacaaagacctttgcttgctcaacaatgggagacgattcgagtgtgcgatagagtgcaaccatgccacagcttatgtagtactccatgtcgcagttttggacggtagtgtggaggtggttgcatcttacagaggtaaattcaatcgtacggaacctacagttaccg

SEQ ID NO: 15934 - DNA, 1614 bp, Oryza sativa
  ref <308>: DATABASE ACCESSION NUMBER: AK066443
  ref <309>: DATABASE ENTRY DATE: 2001-12-06
ggatccagggggggggggtggtgaagagctagagctggcggcgggttgttgaggagcggctgactgaggggagaccagaccaatggttggcggcggggcgggcgagccgctgaggagggcgtgggggtaccaccccgagtgccccggatgcagggtggacaggaggaaggaggagagggaggggatcccctacacggagctctccctcatctggctcgtcaccgtctcctccaccctgccgatacaatccctgtttcccttcttgtattttatgataagggacctgcatattgctaaacaagaagaagatattggattttatgctggttttgtcggcgcttcatatatgtttggaagagcactctcctctgtgatatggggcatcgtggctgataagtacgggaggaagccgattattataattacccttatttcaataattattttcaatacactctttggactcagctcaagttattggatggcattaacctcaagaggtttgcttggtctgatgtgtggtatacttggcccaattaaggcctatgctacagaagtgtgccgaaaagaacacggtcaccttggactatcccttgtttcttcctcacgtggcataggccttattgtgggaccagctattggtggttatcttgcacagcctgcagataaatatccaagcatattctctgagaagtctatatttgggaggtttccgtattttctcccctgcttatgtatatccctccttgccattgttgctctacttgcttccttctggctcccggaaactttgcataagcacactcaggatatggttttagaggattcaatttctgtagaagaaggtctttctggtccaactgctgaagaaaatagtgctggatgtctaaatttattcacaaactggccactgatgtctgctatcattgcatactgcatattctctcttcaggatgtggcttatgctgaggtattttctctatgggctgtcagcgacaggaagtatggtggatcaagcttttcttcccaagatgtgggtagtgtccttgcattctcaggtctcttcctcctggtattccaaattttggtttacccgtcagtggcaaaatcagtagagcccatcacgcttgtccgtatagtggcaatattgactataccacttctttctagctatccatttatggccggattgtcagggtccattcttcaattgatagttaactgtgcatcttttctgaagaatgcttttgcagttactaccatcactgtattcaacatcttaatgaatgatgctgtggctcaggacgttagagcttcagccaacggtgttgctgtaactctgatgtccatctttaaagctattgctccagcaattgcaggagctatatttgcatgggctcaaaggcgtcagacagcttcatttctcccaggcgaccacctggtattcttcatgctgaacgtcttcacagtcatcggtcttgtgagcactttcaggccgttttacgctagaagaagcacgaagcacgatcccattactacttagcactaaccattctactcaggacctgaggtctgatgtagacccccatttttataacaggaatcactcgtgtt

SEQ ID NO: 15935 - DNA, 2329 bp, Oryza sativa
  ref <308>: DATABASE ACCESSION NUMBER: AK066444
  ref <309>: DATABASE ENTRY DATE: 2001-12-06
gatactatctcgaaacgataaaaaagagcacaaattcttctcctgttagtaattctgttcgaattcctctccttccccaaaaaagagtggagttcatctccgccacgcggggttaccgataaaaatcccccaaatttccgctcccaccccgtcggattctcccccgaatccgagagttcatcgttttccgccgatttattttatctggttttgtaaaccagcagcccaattgctctctgccttcgtctacctcgtggaagattccgggtcaaattctagactttttggtgggttgcgtgcgaggggtggaggttgcttcgaaggcaagcgttgggggggggggggggattggattttgaggagggagggagggagtagggtttggtaattggaggaggtggagtaatggagctcgggttggggatggggatggggctgggcgacccgcctgcggactacggctcgatcgcggcggtggggatgttcgtggcgctcatctgcgtctgcatcgtcgtcggccacctcctcgaggagagccgatggatgaacgagtccatcaccgcgctaatcatcgggttgggtactggaggagtgattttgatggtgtcgagctggaagcactcgcgcatactggtgttcagcgaggatctcttcttcatttacctgctcccgccgatcatattcaatgcggggttccaagttaagaagaaacaatttttccgcaacttcatgactattacgttgtttggtgcgattgggaccctaatctctttcagtgtaatttccctcggttctctaggactaatatcaaggctgaacataggttcccttgatcttggagattatcttgcacttggggcaatattctcggcaacagactctgtatgcaccttgcaggttttgaaccaagatgaaacacccttcttgtacagcctggttttcggggaaggtgttgtcaatgatgcaacatcagttgtgctattcaacgcaatgcagaactttgatcttgcaaatttcagcagtgttaaattcttgcaattcattggcaattttctttatctgtttgccacgagcacctttcttggagttgctgctggacttctcagtgcttatatcacaaaaaagctgtacttcggcaggcattccactgatcgtgaagtttctattatgatgctcatggcttacttgtcttacatgcttgctgaattgcttgatttgagtggtattcttacggtgttcttctgtggtattgtaatgtcgcactatacctggcataatgtaacagagagttccagggtcacaaccaagcacgccttcgccacattgtcatttatcgccgagacatttctatttctttatgttggtatggatgcattggatatggagaagtggaagattgtcagtgaaacattcagcccaatgaaatctattgctttgagctccactattttgttcttgatgctggtcgcaagagctgcttttgttttcccactatcttttttggcaaatttgaccaaaaaaactgaagagggaaagatctctattaagcagcaagttattatttggtgggcgggtctgatgagaggtgctgtgtccattgcattggcctacaacaagttcacaaggtcaggccacactcaactccctagtaatgctatcatgatcactagtacaatcactgttgttcttttcagcacgatggtctttgggctcctgactaagccattaatcagactcctaattccagcaagacacctcaaccgggaatcgagtgcgctttcggatccacctagcccgaaatccttccttgatccactgatcctgaacggttccgatgtcgatcctgagattggtgtgggcattcgccgaccgacaagcctccgacttctcctagcaagcccgacacagtcggtccaccattactggcgcaagttcgacaacgccttcatgaggccggtgtttgggggccgaggattcgtccccttcgtccccggctcaccaactgaaaggagtgtgccattactccagggaaatgagaactagaaaactttttcaaaggagcgtgccattactccagggaaatgagagctagaaaacataaacaaaggttgtgtaaatctgaggtagaagaacaatcagcaaacacagtttctgtaaatttatctgaggtagtaacagcgttcttggtagctgtggtacatgctgatgtgttatgtacctaatattgtagatagcatggatgtatatatataaagcctctgtagtttagcaagaaatggtgctgaaaattttgccacgatttatacaatatggtatgatttttgcattc

SEQ ID NO: 15936 - DNA, 4000 bp, Oryza sativa
  ref <308>: DATABASE ACCESSION NUMBER: AK066445
  ref <309>: DATABASE ENTRY DATE: 2001-12-06
gacaaagcacaaaggccagagcgaaggccactccaatggatcactccacctccctgctccggctcatcttcctcgccctcggcgcagccctcgtcgtccttgtcgttcgctccgcgttccgccttcccggcgacatcgacacgactacgacctctctgttcgatgatggcaacggcggcagctgcaccaggttctcgccgtgggcgtgccggcaagggcggggcgacccgaggtcgaagccgtccaagccgcggcgaccgtcgcacgagtccgacgtgccgcggcacccgctcgacccactcacggtgagggaggtgaaccgcgtccgcgagctcctccgcgcgcacccgctgtttgcgtcggcgccgtcgtccctgttcgtgcactcgctggagctcgacgagccggaaaagtccgtcgtcaagagctggcggaagggcgccgacccgctcccgcctcgccgcgccgtggccgtcgtccggttccgcggcgagtcccacgtcctcggcgtcgaccctcagcgagggcgacggcgcggtgactcctctgcctgtccctgcctccggttacccgatgatgaacatggacgagcagaccagcctctgcttcgcgccgttcaaggacgaggcgttcaacgccagcctcctccgccgtggcgtcagggcctccgacgtcgcctgcctgcccatctccctcggctggtacggcccagcggaggagaaccggcgactcatcaagagccagtgcttctccaccgagggcacggccaacttctacatgcgccccatcgagggcctcaccgtgctggtcgacatggacacggcggaggtcctccacgtctccgaccgcggcgccggcatccccatccccgccgccgcgaacaccgactaccggcacggacactcggcgccgactccggcggaggcgcaagcgcaggggcggcacgggtaccagaccgtccgcgtgccgtcgatggagccgccggcgggcgggccggggttcgagctggtcaacgggcacacggtgcggtggggcgggtgggagttccacctgaagcccgacgcgcgcgccggcatggtggtgtcgcgggcgcgggtgcaggacccggcgaccggcgagcaccgcgacgtgatgtacaagggcatggcgtcggagctgttcgtgccgtacatggacccgacggaggcgtggtacttcaagacgtacatggacgccggcgagtacggcttcgggctgcaggccatgccgctcgtcccgctcaacgactgcccgcgccacgcccgctacctcgacgccgtcttcgtcgccgccgacggccgcccctacgtgcgcgagaacatgatctgcgtcttcgagcgctacgccggcgacatcgcgtgacgacactccgagagccccatcaccggcatggacgtaagtgcaaacccatacgactcctctgcttctcgctttcttgatttctttccttgctgcttggcgccaacgatgcgagtcatgctactccatttccctgtacttgtcaccgatgagtaatttttaattttaaccataagtagttttaaaattatcatattattaagcgtacaacatactttcacaatataagtatttttaaaaaaatttatagacttgtagcttaaatatgagtggttaaatttaaatatgaaacaatatcctgtggtcattagtcatcacctacgtaagcggaactgtaaatgttgctcatatgatttggctacttgcagaagttgacggttttgacagagattggtgatggatattttcaactttaggacactaaagaatatcgttcgcatataccgtcaacaaggagtcgacaagattccaatcaattccgatgcaagctttatatatatttcaaactagaaaagacatatcaccatcgttccatcaatgtgggatatgtttatgtataggcctaggaatacctcatattaggaatttacctatgtgacctatattttttataagttgctggtttttttcttattggtttttcaatgaaatacatataaagcataacaacctcacaacataaaaaggaaagtggattctaatccctcgagatgacgtcccctcatgtatctttgttttcttcaaattcaataaaaatagttatgaaaaattatttagagtatagtgatatttattggtccacaaaaatcaaagaaaaagtggcctacacgttaagtaaaaaaagataaatctgggtatgaataattcgttactattaatttatctttttttatctcggtgtgtgagttgaattcggacctaagattttgtggagtgatatatatacattgtatgagtgttgtcaaattctttgataatttttcgtaactgtttggatgctttttagacaaacaagggaacatcacctttagggatcaaaatagtttatccatagaaatctgtaaatttattgtaaactcactctaacttaaagtttgctgtatttattttttgaaattgatttctcaaatatgcctttttacccttagctcctacgcagttttattttgttatattgtcaagtatgcacatcaaagtataggtgttaagtttaagttgtttaaactctttgagcgaaaaaaaattggcatgttagttgttgatgttgatctaataatttataattagaaagaaaactcgatcacttgagaaatagataatcccaaaatacaatgtatctaccgttcctgtggaaactgaaccatttcccacacaaagttcgtgcaccacaaataatgatacaaaagcggtaggtgtgagagaacacctcacatataaacgagaagtggacgtagctatcgatcgatcagtccaaccatggcacaatctgctctgctctgctctgtttgtttggatatgcagctagctactaaccagctagacactgataagggagtcgcggccgaaggtgacgctggtggcgcgcatggcggcgtcggtggccaactacgactatatcgtcgactgggagttccagatggacggcctcgttcgcatcaaggttgggctaagtgggatcctcatggtgaagggcacccagtactcccacatgaaccaggtccatcaaaatgacaatatgtacggcacccttctgtctgagaacgttattggcgtcatccatgaccactttgtcactttccggctcgacatggacattgacggcgccgacaactccttcgtcaaggtggcgatggcacgacagaacaccggcgccggcgaatcccctcgtaagagctacctgaaggctacccgacatgtcgcaaggacggagaaagatgcccaggtccgcctgaagctatatgagccatccgagttccacattgtcaaccccatgaagaagacacgagttgggaaccctgttggttataaggttgtcccagccggtactgcagctagcctgttggatccagaggacccacctcagaagaggggtgcattcacaaataatcagatttgggtgacaccctacaacaaaacagaggaatgggctggtggtctatttgtctaccagagcaaaggggaggacacacttgcaacttggtccgaaagggaccgtccgatcgagaacaaggacctggtgctgtggtacacgctggggtttcaccatgtcccgtgccaggaggacttccccatcatgcccacggtgtcgtccagcttcgaccttaagccagtgaacttctttgagagcaaccccatcctagggcagcgtccgacccaggagaacgacctgccggtgtgtgccgccgctgccacgacctcttgagacgacagcggatcaccgacatgtgtgcgtgcatggtcgatgcttcggtgtatcgatctactgatatggattgttcatagtgaaagaatgtatcggtacatctacggatttggagctagccatggctggctatctatgttgctctatatatgtatgagcggatgtatgtgcactgcagtggtatgaacataattgagaacc

SEQ ID NO: 15937 - DNA, 2645 bp, Oryza sativa
  ref <308>: DATABASE ACCESSION NUMBER: AK066446
  ref <309>: DATABASE ENTRY DATE: 2001-12-06
gaatctcttttctctcgtcgtcgtctcgtcttcccacctctcggattcccgagctccacacgacacgacccacctcggccactctccgccgtcggtggccagtggcctccaccccctccgtcccccggggaccacaccggcgtaacatcagccacacctccggcagatctttcccccgccgcttaattcacctcctcttcgccgcggcgcaggcggagcagggtgagcggggtttggtggcacttgtatggtggcacggggctgcggttgcattgggagcggcggggtttggttcgggacggagccgtcgtgtgctcggcgtcggccgccggtggtgaggatggcgtcgcgaaggcgaagacgaagtcagcggggagctcgaaggcggtcgctgtgcagggcagcacggccaaggctgatcatgttgaggattcagtttcatcacccaaatacgtgaaacctgccgttgcgaagcaaaatggagaggttgtgagcagagctaccaaatctgatgcaccagtgtctaaacccaaagttgacccgtcagttcctgcttccaaggctgaagctgatggtaatgcacaagctgtggaatcgaaggctgcactggacaagaaggaagacgtcggtgttgctgaaccgttggaagctaaggctgatgctggtggagatgcaggtgcagtaagctctgcagatgatagtgagaacaaggaatctggtccattggcagggccaaatgtgatgaatgtcattgtggtggcttctgaatgttctcctttctgtaaaacaggtggtcttggagatgttgtgggtgctttgcctaaggctctggcaagaagaggacatcgtgttatggttgtgataccaagatacggagaatatgcagaagccaaggatctaggtgtccgcaaacgttacagggtagctggacaggattcagaagtgagttattttcatgcttttatcgatggtgttgattttgtgtttctagaggcccctccctttcgacaccggcacaatgatatttatggaggagaaagatttgatgttttgaagcgtatgattttgttctgcaaagctgctgttgaggttccttggtttgctccatgtggtggttccatctacggtgatggcaatttagtcttcattgcaaatgattggcatactgcacttttacccgtatatttgaaggcatattaccgagataatggcttgatgcagtatactcgctctgttcttgtgatacacaacattgctcatcagggtcgtggccctgtagatgacttcgccacgatggacttgcccgagcactacatcgatcatttcagactgtacgaccccgtcggcggtgagcacagcaacgtgttcgccgctggcctgaagatggctgaccgcgcggtcaccgtcagccatggctatctgtgggagatcaagacaatggacggtggctggggcctccacgagataataaaccacaacgactggaagctgcagggcatcgtgaacggcatcgacatggccgaatggaaccccgaggtggacgagcacctgcagtccgacggctacgccaactacacgttcgagacgctggacaccggcaagaaacagtgcaaggaggcgctgcagcggcagctgggcctgcaggtccgcgacgacgtgccgctgatcgggttcatcgggcggctcgaccaccagaagggcgtggacatcatcggcgacgcgatgccgtggatcgccgggcaggacgtgcaggtggtgatgggggcacggggcggccggacctggaggagatgctgcggcggttcgagtcggagcacaacgacaaggtgcgcgggtgggtggggttctcggtgcagctggcgcaccggatcacggcgggcgccgacgtcctcctgatgccgtcgcggttcgagccgtgcgggctgaaccagctgtacgccatggcgtacggcaccgtgcccgtggtgcacgccgtgggcgggctccgcgacacggtggcgccgttcgacccgttcgccgacacggggctcgggtggacgttcgaccgcgccgaggcgaaccggatgatcgacgcgctcgggcactgcctcaacacgtaccggaactacaaggagagctggagggggctccaggcgcgcggcatggcgcaggacctcagctgggaccacgccgccgagctctacgaggacgtcctcgtcaaggccaagtaccagtggtgagctggtggtatttttcgcgacgcctctggatcccgccgtggatgggcgcgctttttctctagggcggctctgcgtcggagacgctcagacgcatcgcgcgcgttcgcgcccacacgatgactggcacgctgctgctgagacggcggcacgcgatgccatcatgccaccggacggtaggagcaacggtggaagtgaactgtactactggtgctacactgctactacatgagatctgctcttattggtcacgtactcacgttcacgctgaattaccgaatgtgttgtgtcttgtgtgtgtgtgttaaaggcattgtcctggtaaatggtggagacgagatggccgggtcgcgggagttatatttgtatatgttgccagctttctgagtttttcaagccagtgcggctcttcagtgcaggttccaagcg

SEQ ID NO: 15938 - DNA, 644 bp, Oryza sativa
  ref <308>: DATABASE ACCESSION NUMBER: AK066447
  ref <309>: DATABASE ENTRY DATE: 2001-12-06
gctcttccgctgccaagctcatcgcccgcctcctctccgcgctatcgagctcgtcgcctgcctcctctccgcgacgccgagcttgtcggcccgtctcccagatctacaccggagagggagaggccgcgccggtgtggagaggaaaagggggaaggccacaacggggagaggagcggcgacgtcgtcctcctctccgccgccgctcttcctcgcccctggagagaggaacgtcgaacaccgccgtggcttcctgcccactgccactccggtcgccgctcacttcctccgcctcagcgccgctacctcgcttccttccgccggtagggaacggataaaggagagagagaggagagatggaaagtgaggatagaaaaaaagactggtgggacccactcaaaggaatatgcaccgtggagcatgtatctaacaatgttcttgggtgttcttgagctaagttggcacacgaggctccacaaatatttgtgacccactgctaataccctaagagaggagagataaggaaaacgggttacaaatttatagccagccgcagcacgtactccaaaacactatgtgtatgagaggtgagatcatatattaatcgtgtaatatatgtttataagtaactatggtatgagtgagct

SEQ ID NO: 15939 - DNA, 2778 bp, Oryza sativa
  ref <308>: DATABASE ACCESSION NUMBER: AK066448
  ref <309>: DATABASE ENTRY DATE: 2001-12-06
gtgtgcgtcctgcagtgccacccagggccctgcccgccttgcaaagcgttcgcgccggaccggctgtgcccatgcggcaagcagaccattgtgcggcggtgtgcggaccggacaacgcctgtgacgtgcgggcagcggtgtgatcggctgctcccctgccggaggcaccgctgcgagaaggtctgccacactggaccatgcggggactgtaatgttctcatttctgcccggtgtttctgtgggaagaagacagagacattgctgtgtggagagatggaactgaaagggaatttatctgagaaggatggagtgttctcatgcagtgaggcctgcagccatatgctgtcgtgcggaaatcatgcctgccaagacatttgccacccagggccatgcggggagtgcgaacttatgccagggaaggtcacagcatgccattgtgggaagacaaggctgctggagaagagagcaagctgcttggacccgatcccaacctgtgacaaggtgtgcgacaagaagctgccttgtggtgtgcataggtgcaaggtcacatgccatgagggagactgcccaccttgtgtggttcgtgtggaacagaggtgccgctgtggttcatcaggccagatggtggagtgctacaaggtcttggaggaagaattccgttgcaacaagccttgtgggcgaaagaaaaactgtgggaggcacaggtgtagtgagtgctgttgcccactttcaaagccgctcgctcggcttgaagggggtaattgggatccccatctctgccagataccgtgtggcaagaagctccggtgtggacagcatggatgccagcttctctgccatagtggtcactgcccgccctgccttgagaccatattcaatgatctgacttgtgcctgtggtaggacatccatccctccaccgcttccttgcggcacaccaactccatcatgcccacaccaatgcttagttccccagccatgtggacatccggcgacgcatccatgccattttggggactgccctccttgtgttgttccagtaatgcgagaatgcattggtggacatgtggtgctgaggaacatcccttgtggttctaaggatatcagatgcaaccaaccttgtggaaagaaccggcaatgtggaatgcacgcttgcaacaggtcttgccatccttccccttgtgatccaccacctgcaaatggagatgctagctcaagtactggtggtagagcttcatgtggacaggtatgtggtgccccaaggagggaatgtaagcgcacttgcacagctccatgccacccatcatcaccttgcccagatttgagatgtgaattccctatgaccattgcctgctcttgtggccgtatcactgcaactgtgccatgcagtgctgggggaaccgccaatggcgataatatgtttgaagtatccatcatacagaagctgccaatgccactccagccggtggaatctgatgggaggagggtaccacttgggcagaggaagctctcttgtgatgaggactgtgccaagatggagaggaagagggtccttgctgaagcatttgacatcactccacccaatttggatgcattgcattttggtgagaactcaaatgcatcggatttgctttctgaccttttccgccgtgagccaaaatgggtgatggccatagaggagaggtgcaagttccttgtacttgggaagacaagaggcaattcttcaggcaacctcaaggtccatgtcttctgtcacatgacaaaggataagagagatgctatcagggtcattgccgacaggtggaagctttctgttcaggctgctggttgggaacccaaacgtttcattactatccatcccacaccgaagtcaaaggcgcctgctcgcatcctgggttccaagccaggtgtatttgttgctgcttcccatcctttctttgatcccttggtggacatggacccaaagcttgttgttgcaatgctggacctgccccgggatgctgatgttagcgctctggttttaaggtttggcggggagtgtgaattggtttggctgaatgacaagaatgctgtggctgtcttcaatgatccagctagagcagcgacagctctgaggcggctggattatggttctgcttaccagggtgctgctgtgtttttgccaagcagcagcgctcagccaggcaatgtctgggttgcagggcagaaagatggagtggcggctaccaagagcagtgccaatccatggaagaaggccactgcctctgagcctgatccatcctcaggagactggacaggtgtgcttggtcaagctccaggatcagtatggaggcgtggcggtgacactgtcgcccaagtcatggggacatcgaaccgctggaacgccctggagtccgatgcggccacaagctccaggccagtcgaggagagtaagcctgctcctcgcaccgatgctgtatccagcgcagggccaagtactgcgccaccggttagtaagatgcagcctgaagtcgaagtggatgattgggaagaagcttgtgaatgagtcatcaggaagctaggtttcagatggtttacctccattcagatccttttttggtcgaattttatttgctagtaccaaatgtatcctcacacttttatgtggttcctgatgaaggcccgctgactgatctgttgtgagcacactgatcttgtcatgccggcatccctgtaacgctgctgcttcttttgcagtcgtccgttcgaactgaggaaaaaaatacgtcgtagattgccg

SEQ ID NO: 15940 - DNA, 3308 bp, Oryza sativa
  ref <308>: DATABASE ACCESSION NUMBER: AK066449
  ref <309>: DATABASE ENTRY DATE: 2001-12-06
acaatattttgtattaatttatgttttacaggcatacaacagatccaactttcaatgacatgtttattgtttagtttagctacaataattgttgggtagttgtagagcagcacatggtacttatgccacaagcccgcaaataaaataattcgcatttgctcatcctaattcatgctagcatctctattgcagaacaattttgatactattttttttttaaaattagccttgaaaatgccacttcccctaaggaatgacaaatgcatttttttttacaaatgcaaaaacttgcaggtagacacatatttggcaggtgaattcgtgtcatatggacatatctttcattggaagatatgtccatatgttggagctatttcaccagttctttcattggaataatgttagcatttaatcagtgatataggagatgattcaccttcaacaagctctcatttatcatcatgacgagtcagaagaatccgattgtcaagttacgccttctaccatatactccccaccaaaaacagctaccactggtaaataaattgctttctgttctaattggtgcctgaatttctgtatgctagatctgattgtttgttgctttcctggtattgtgtagtttttagttatgatgtacataatcctaagttaatccagaaattaatttttgagttctttctggagtttattcagtagtttataggttgtgaccaccagtgtccttttatggctgaatacaactcaaagaatcttcatgttggagttggattcactttggcagttcatacagtggatgctgatagatgcgctcgattattcctgtcgatagcatcctagtattgtgtctttatatagctatatctagcattttcatgtaaaagctatctgttctgtggatgggtgctcttattggttgcagcaatcaggataatcagctaaaataatgatatattgcagccttgtcagcctttattatatactgggttccctaaattgtcatctagtcattagtgccaaagtgcatgtagtcttctctgatcgttatttataactttatatgccaatggatgttacagacaacgtagtgtatgtcaatctatctggcgttttatttatcagaatactagaagagaatttgcaccagtggttcaagtaaatccctgaacattgaaactagatagtttgggctttttggcccctaatcttgtttgattgatacaaacaagtcaacgggtcacaagtgcttttgactgacagactacatccgtttctctcctctcatcttcactcttccccatcgaattctcctctcatcttcttcactcttccccatctttgaccaaattagccgcatcctatgcctggtggaatattctgacacaacatagcagtgtggcttgtttcagcagaaaattatttgacaggcgttgattgcaaagctgtcacagctgcacccatctgatcagatataggtaaactgagatgtggttctcagccagtgggaatgatgtacaaccacgttgtcattcaggggaactaaaaaccatctactcctgtttttagcaactcacatacagtacagatacctagaatcaacagatatccctactttaaccactttaaacaagtctgaggacatatattcctagtatcaatgttcatacacttgaaccagtaatgcaaggttcaggacatacaatgcaatttactcttgttttcttttatagttcatttgtcctcattttggtccctgatttaagttggacattcttatctcactagacggttgggtaagtaatgttaggggtcaaaatatagtggagttatgctatccaatcttgaaagcaatgtagagctttgatctgttactatccagtactacagtgaacagctagacttggagctagtgatttactcccttattggatacggatattgaagtagatatgggctggatgcctatactatgtaaattcacccattgacggttcattggctcagtcagatagagaacatgcctgcttaactgaattagtgaaagcaagtcaaataactaagtggcaactcttatcagcaaaactaatttgtgattatgatctgtggcttgtttatttcaaccatttcttttatatgaattgcgtgtaactcagaatttcatgtgaatactgagtaactagcacatctattttgatttgggcccaatttttcaactggcaagaaagaattggagtacaagatcaaagggtgggagtaactcttagtcttaggcatcgggattgggcaggatttgttgtgcacctaattttctttcatttctcgtacttgaacttgtttgtgcatataagtatgtgatcatccaactatttctaagaggaaattagccacaagcaacaaataggaagtttttatattcatacctttgcctcagaacttgcgttcatggtttgatggggatcttctttcgtctcattgtatctctcaattatggatttcatgctggttgaaaaaaaaaatcaagatcccattagaacacatgtcaacacatgccacagtagtgttgaatgctatcatatagctcctgcaagcttattttgtagtacatgggcatcagtatgtaagatgacaaatgcaaacttttaatgaaggcctagttctttgacaagtaatccacgtggatagataactgtaaggtcaacacaaagaattaagtgtggagtgttttgagttaattggttcttactgcttaatttcctgttatcttaaaacttcctgttatcttaaaactagacactgttctcctaatttgtcatccttttcctatttagtttgttgttttctacgaatcttgagctatttgtatggagaaaaagcagtgacaatggtaaaagatggttttgaaggcactacaagacatgcctcaagttataaccgtgctgttacgaggatccaagcatccaaaacacttggaagattaagcttcaggcgttgtcgacataatgcataattagttgcatacttcagtggatgattgaacgggatgtttggatatgcaaatatttctatgcatccggactgaatactttctgaacacaaagcaagccaacctgccatggccatgacacgatggttctatccatattttcctatttgtcatgtacggctgggctgggcctagcaccaaaactattcgttgttgtttattattattaggtaattaggttattcgtagatcatggttgtttattttattatgaacattttgataacattttttttaaaaaattaaagcctttatttttccgatc

SEQ ID NO: 15941 - DNA, 3356 bp, Oryza sativa
  ref <308>: DATABASE ACCESSION NUMBER: AK066450
  ref <309>: DATABASE ENTRY DATE: 2001-12-06
ggtcagcgcccacaactgctcgctccgtcctccaaagcccgcgagatccaaagccgaacgccactagctagctgagagagaagcgccggccggcgagggggctagtgcgcgggaatggcggcgggcggaggcggcggctacagggcggaggacgactacgactacctgttcaagacggtgctcatcggcgactccggcgtgggcaagtccaacctgctgtcgcgtttcaccaagaacgagttctgcctcgagtccaagtccaccatcggggtcgagttcgccacccgcagcatccaggtcgacggcaaggtcgtcaaggcccagatttgggacaccgccggccaggagaggtacgtacggcctcccccttcctctcctactctagccgcttcccgcgttggtgcgcaaatgggtagtgcatcgagtgtgttctgctagatttgctgctggccgcatgctcatggatttctcttggaagttagagtgcgacgtagccgataattttcctgcagattgtttgtaggcgcttcgctattgcttggttttggttaaaaaaaatgtgaactttggttgtcgtcgttgtcgattttaatttcttgtttgaactagttcggtgctgatgatattagagcattaatattgtaaatttgaccttgatagttcctgcacgaatttggcatggaaccgaaagtgtagtgagtgccaattcacatctggctggttctcctggagggtagattactagattgggaggtgacacgtggtttggctgttgggacgtccatgtctgtttcattcgagattaatggttcgagagtgaaaccaccaaaaatcgttgttgtgttctagcgaaagtggttgctgtgtcgtcttccattcgaagtttatagaggaagcagaggaaatgctatgtgtcaaaaatgcagtgatgctagtttagctgcagtgttaactgggggacaggtgtttcacaggtgttagaggacttattgataagtgcggccccagcggcgaaatggtcgctattgagggcttctattgctatggatctcaagagtagaaagtgccattgtggtcacgacatttctgcatcatgaggagtgcataaatacgcatcaaaagcatactttggttcccggcttatgtagtgtatacctaactacctaacgcactgtattgcaataccacacagttttattgatattgctttggagccttggagggggagtataaatcgagaagatcatcctaattggacagtgcaaaactttgttcgtactatatagaaacttttggttcattataagtctctctgaattatggataagaatagttctgtcagaaatactaggtccatatggtttctttagagaggttgggggaggcccatcactcaatttttatacaacaataaaacttattggccgtgtgcagtgtgcttgttagcagaggcaagagatttaaaccatttccacatctaaaaaagaatacaattttatattaagaaaacaccttgcatgctattgtaaattaaagtctaagaaactagtaaatctatatccgagacaatcatagaatgcaaaatacacatagactgacttgggtggggacgtggggtgaactaggattggttggcaattttaacaacaaaatcacaaagctttcacagaaaattttataatgtataacttgtgctataccagtgccttatttttctgctatagtttctatttggatccttaatatttctaaattccacattcctgttataccataaagacgcctcagcaaccaagccaatcacacattcacaaaaagcaaccttgcttactgaccttgacctgagatgttgactgtgagtttggcggttgtttgctccattccaataatctgttacccgctcgtgcaatttggtgtgttgtacagtcacaccatgttgatgtgaatgactagagcttaaatcctagatctggacttggcgaaggggaacaggaaaagatggcctgccccttatggccttagggcacccgcaatggttatctataggttctctacaagagatctatgtcagcatattttcctacttggaatagattgaatgaagagagagagcaaagctatctactaacctggagataatctatagagaaaaacgaggcaatggattagagagctatagatacccatgtagacatactattgaggtggtttactattaatttagtctattgctgagatgtacatgttttatagagagcaccttactttaccatagcttggccttttcctcactacatgcatgccatgtgtctatcacatattactgtagcaacacattggcagcactttttaacctaggaaataacaaataaggcatcataatgttccttctaatatcaaatgttcatgccaattgtttttagttctgttgtttgtggacaattttgaacatgtttgctattggaatcagaattactacctccatcccacgaagaatttatttgtagcagttctcacactgattgcagattagtactgtgagggaatggcttaggttccccttgttattaatagttggagaatgtgtgtgtgagagagtatgttgatttgtggagtgagtagggtcagagctaaaagtaaattgttcgtggacaaattttgaatgctaaaagtaaactctttgtggaacagtgggagtagctgatccttctttatgattttctttagtgcataattatatgattacctaatattttccttctgttggcagataccgtgctattacaagtgcctattacagaggagcagtaggtgcactgcttgtctatgatgtcactcggcgtgctactttcgataatgtggcacgctggctaaaagagctgagagaccacactgaccctagtattgttgtcatgctagtaggcaacaaatccgatctccgccatctggtggctgtttcaactgaagatggaaaggaatatgctgaggctgagtcattgtacttcatggagacatctgcattagacgccacaaatgtagagaatgcttttgcagaagttttgactcagatataccaaactgtcagcaagaagacggttgaggcatcagatgatggatcaaatgctccaatcaaaggagagaagattaatgtgaaagatgacgtgtctgcgctgaagagaattggctgttgctcaaattagagtagagatgcatttcttgttgattttttccactaggtgtacggctgtatgttgcttctattgaaagaggtccattaattttcattttgttgtggtgatattgagagttagattgttccaactttcagttataccatttcttgaaagtcttaactc

SEQ ID NO: 15942 - DNA, 2099 bp, Oryza sativa
  ref <308>: DATABASE ACCESSION NUMBER: AK066451
  ref <309>: DATABASE ENTRY DATE: 2001-12-06
gacactctctctctctctttcctcccaaatccgcacggctcccgtgctctcctctcctctcctctcaaaaccctccacggcggcggcggcgggactccctctctggcgaggcctcgtcctcttcctccgtgagaaaatatggatgggaacatcgagaatcctgcggaggacatgagtgggattgccagtaatcttgataatgaggagcaggcgattcctctcagtgatgtgcctgagcagtacaaggaagatccagaaaatacatatgacgaagaaaccaaagactcaagctatgaagaatcagggatcccatacaatgaagatcaggtgaacataaatgatggaaatgtggggcatcagcatgaagaggaccaagctatcccctcagaagaagggcatgcctatggtggagaagctcagggagagcagcaggccaatgcagtaactgatgagaagaaatggccaggttggcctggagaaagtgtgttccgtatacttgttccagcccaaaaagtgggcgctgtcattggccgaaaaggggagtttatcaagaaaatgtgtgaggagtccagagctcgcataaaggtgcttgatggaccaccaggggtaccagatagagcagttctcactgcagtgtaaggcctcaagtcgaattgtttatgtatcaaaaatagacgagccgtcatggttatcaaagttcagttttgtgctcctgtgctgcaaatactgttaagtcttttgattatcggatgaagatccctgtcaagaagcttcatatgttgtccggtaatgatttcagcaaaagatgaaccagatgcaccattacctcctgctgttgatggattgcttagagttcacaagcggataacagatggtttagatggtgaatctgatcaacctcaacgtgctgctggtactgtagggccaacacggctactggtgccagcttctcaagctggcagcctgattggcaagcaaggagcaaccattaaatccatacaggatgcttctaagtgtgttctccgaattcttgaaagtgtaccacctgttgcattaagtgacgaccgagttgttgagatacaaggtgaacctctagatgtccacaaagcagtggaactgattgcaagtcatttaagaaaatttcttgttgaccgcagtgtgctccctttgttcgaaatgcagatgaaagtgcacaatgcgcacagagagcaacctatgccacctcctcagacgtggggtcctcctccaccgtggggtcatccatcaaacgttcctcctggtggcccaggttatggtggtaatccacagttcatgcctcctcggcctcaagaccactattatcctcctcctgatgtacctcctgtcgaaaagcaaccacactatggaatttcttcatatggccgtgatgcacctcctactggtgctcctcctgcctcagggaatcaacacccaccacatggttcttctcaaataacacacagcatgcaagttcctctttcctacgctgatgccgtgattggggcagctggtgctagtatcagctacattcgcaggcatagtggtgcaacaataagtattcaggaaggtgttcctggagaaatgactgtggagatatcaggaagtgcttcacaagttcaaactgcccagcaactgatcaagaatttcatggctgaagcttctccccaaggccccccacaagctcctgctcctcctgctcaaccagtcgacacgggctacagctcctacccaccgtacggaggaacatcatacggatctcctcctggcggcgcaggtcctcacaacggtggaagctatggcggtgcgccacccccctaccctccgagctacggatactagttgtttggaagcgccctaggctttagaaagagtgggatcttctggttttgttctgttcgtctgtcaagaactctcagattattggttgttaggacttcctgaacgctttagttatggtgtaaactgctttctgacggcggcagcaaatgttccctgtttcctcatatgctgtctagcttctcatgtgtcgtaaaatggagcccattttaacctaatatttccttcatgcactcttcttccct

SEQ ID NO: 15943 - DNA, 968 bp, Oryza sativa
  ref <308>: DATABASE ACCESSION NUMBER: AK066452
  ref <309>: DATABASE ENTRY DATE: 2001-12-06
ttgaggcttgaagcggctcgcttagtaataaaggcagcaaggcctagccactccccgcgcgcgcgccgaagattctcagcaagattctgagccgtcgtcggccgttcgtccgtccaaggaaaggagagccatggtgggaacctcctcctggtcgtcgtcctcgtcgtcgtcgctcggctccctcgacgacgacatcatcgtcgcgtgcgtcgtcaaggcagcggacgccgccgtcgagggggcgtgcgtcaagttcctctgcagctacggcgggaggatcctaccacgccacgccgacggcgcgctgcgctacgtcggcggcgacaaccgcgtcgtctccgtcgaccgctccctccctttccacgagttgcaacggaagctgagggagatgtgcgggtgggaggcggtgtgcctgcggtgccagctcccgacggaggacctggacgcgctcgtctccgtcaacggcgacgacgacctcgccaacctgctggaggagtacgacgcggccagccgggaccgcctccagccgctcaagatccgggcgttcctgttcccaaggacgacagcgacaacgaccgcgccgctatcgcgcagcccgtcgcccaccgctgcgtccaggacggcaccccgtgcccactaccagcatcagactggcagcgcgccgtcgtgcgcatcccggtgggcggcgcgtcagatgtcgttgcctcctgctcgcgttccgcaccagcagcagcattacaaccggcacggcggcgacgcgcggccgcaacggtacctagtccagagtgccagcagccgctggtaatagcgatcagattgcgaaccggccgcggtctagtatctgcgtgccttacacgtactcggtactcgcgtaaccctgcgctgtacgtactaatgaaggtgtttaattagcatgtactgttgtgctgggtcttttaaagcaaaaaaatggacgaacttgatcaagt

SEQ ID NO: 15944 - DNA, 2543 bp, Oryza sativa
  ref <308>: DATABASE ACCESSION NUMBER: AK066453
  ref <309>: DATABASE ENTRY DATE: 2001-12-06
ggtggtgctcggcacgtcggttgttgctgttgctgctgctgctcctcccgttttccggtgagctctcgtggactccgcttgacttgatgtgggggtgaatctgtttgataggtgggggggattttgcggtgttcgtgtgagttttggtgtggatctgcttgttcctgacttcctgtgtgtttgagggtaatctgggttatttttacgggttgtttttggtgttttttgaggagttttttggtcggatgggtggtaggtctggatggattgttttggggcagctttgatcggattttaccctgggttggataactgatcggtgtttttctgttcgtggtttggtgttgatttttcggttagtgcatcggtgttttctgtaactgctgctctccgattttgagttttattttttttctgttttccccttcagttctagcctcggttccatggctgaaccttcgatttgattttgtttttttttcttatttcgtgagttactaatcttcgatattatcgactaatttcactgtgttttaatcgtatcgtcagttagagagttgagatctaacagtcgttgtgttccagtgttttccccatttggatttttcgatctcatcactcctgacgaaaaatttctcatcgccttctgtttggtttggtttggtttttctcgcgatttgccgcagatcgcagccatgggaacccgcagcgtggccttggtgctcctcgcggccgtgctgctccaagccctcctccccgcttcggcggcggagggtttggtgcggatcgcgctgaagaagcgcccgatcgacgagaacagccgcgtcgccgcgcgactctccggcgaggaaggggcgcgccggctgggcctccgcggcgccaactcccttggcggcggcgggggtgagggcgacatcgtggcgctgaagaactacatgaacgcgcagtacttcggggagattggcgtcggcactccgccgcagaaattcaccgtcatcttcgacactggcagctccaacctctgggtgccgtcggccaagtgctacttctcgattgcgtgcttcttccactctcgctacaagtccggacagtcgagcacttatcagaagaatggaaaaccagctgccattcagtatggcactggttcaattgctgggtttttcagcgaggatagtgttacagtaggtgatctggttgtgaaagatcaggaattcattgaagctaccaaggagccaggtcttactttcatggttgcaaaatttgatggcattcttgggcttggatttcaggaaatatccgttggagatgcagtacctgtgtggtataagatggtagagcaaggtcttgtcagtgagcctgttttctccttctggttcaaccgtcattctgatgaaggagaaggtggtgaaattgtgtttggaggaatggatcctagccactacaagggcaaccatacatatgttccagtctctcagaagggatattggcagtttgagatgggcgatgtcctgattggaggaaagaccacaggattttgtgctagcggttgttcagctatagcagactctggaacatcattgcttgctggccccacagccataatcactgaaatcaatgagaagatcggtgctactggggtagtcagccaagaatgcaagacagttgtttctcaatatggacaacagatcctagatctgttgcttgctgaggcacagccatcaaaaatctgctctcaggttggtctgtgtacttttgatgggaagcatggtgttagtgctggaattaagagcgtagtagatgatgaagctggggaatcgaatggtctccaaagtggtcccatgtgcaatgcctgtgagatggctgttgtatggatgcagaaccaacttgcacagaacaagactcaggatctcatcttgaactacattaatcagctctgtgacaagctcccaagtccaatgggagaatcatctgtggactgtggcagccttgcatccatgcctgagatttcattcaccattggaggcaaaaagtttgcactgaagccagaagagtatattctgaaggttggtgaaggagctgctgcccagtgcatcagtggattcacagccatggacatccctcctccccgtggtcctctctggatcctgggtgacgttttcatgggtgcctaccataccgtgttcgactacggcaagatgagggttggcttcgcgaagtcggcctaaacgtgttgttgtcacgttcctaatgacgaggtggacgcatacgccgagagaagaagaccgtagcttttaactagcgtatttatccggcgatgtgtgtatatatgcatgctacataacatgtttatgttttccaaggcctgagatggcgcccgtctattttagcttggcaagaatatctcggaccagtctctgttcgaattctcgtactgatatgtgaacttctgataacatgtgcactgtgttttgtgactgaattgctagtcagtccgaaggttaattatcccatggttgatgtgaagagagccaccggattattgc

SEQ ID NO: 15945 - DNA, 1815 bp, Oryza sativa
  ref <308>: DATABASE ACCESSION NUMBER: AK066454
  ref <309>: DATABASE ENTRY DATE: 2001-12-06
gaattgggcctaacgtaattgtgcttctttttgggggaggcgtggcccgtcgtgaggcggcgattctcgccgccggtggcggcggcggcggcggcagtggcgactcgccctccttccggcggcgccgttcctcctccatcccccctgtctctctctctcctctaactgttcgtcatgctctggattttggtggtggcaggaggatctggtctgcccgaggacgcggctgcagaacgcggtgtggagttggctgtacaagtgggtggagccggtgatgagcagctgggcgatgaacaagctgagggggagagctttggatgcactcatggagcacatccattacgaggacgagaacacgcagtacctctgcatttgctctgtcaacaaggctctaaacatggtctgctgctgggcggaagatccaaattcagacgcattcaagaggcatcttgcgagggtacctgatttcttgtggctttcagaagatggcatgaaggcgcaggtatatgatggttgccaaagctgggaaacagcattaataattcaagcgttttgtgccactgatcttgtaaatgagtatgcttcaactgttcagagagcccacgaattcatgaaaaattcccaggttgtaaggaatcatcctggtgaccaaagttactggcatcgccatagatcaaagggttcttggactctttcctctgcagacaatgggtgggctgtgtctgacactacagcagaagcactgaaggctgtattgttgctgacaaagatatctagtagcatggttggggatcccattgaaagagaaaggctgtatgatgctgttgattgcctcctatcttttgtgaacaaagatggtaccatttctacatatgaatgtaaaagaacttctacttggatagagattctcaagccttgcgagagttttccaaatatggtggttgattatccatatccagaatgtacctcctcagtgcttcaagctttggtgctgttcaaagaactatgccctggttaccgtactgaagagatagaagaatgtgttagaaacgcatcaatgtttattgagaacacgcaacgcaaagatggctcatggctaggcacttggggtgtatgcttcacctatggggccttcttttcagtacaaggattaattgctgctggaagaacatatgagaatagttcttccatcaggaaagcatgcgactttatattgtcaaaacagctcaatactggcggatggggagaaagccacgtttctaatgaaactaaggtctatgtaaacatcaaaggtgatcgtgctcatgtagtgaatactgcttgggcaatgctgactttaatttatgctggacagatggagcgagatccaaccccactgcattgtgctgcaaaagaattaatcaatatgcagttagaaacaggggagtttccccaacaagaacacgttggatgcttcaattgctccctcttcttcaattaccccaactaccgcaacatattccccatctgggctcttggagagtactgctggcatctccgctaaaagaggcatgcatgagcatggcattgtgataaaggaaggggtcgatggcatgccatgaatctcttatatatgctacagatgttactgagcacctcatcaccctatacaaatatgtacttacttatatactacctgatgttgtatatattgtcaagacctggtaaacataattcgctgggaaacagtataggaagagagtgaaacttaaacatgatttgttgttgttgtatttgtatccatgaagataaactgtcttaataaatttctctggg

SEQ ID NO: 15946 - DNA, 2560 bp, Oryza sativa
  ref <308>: DATABASE ACCESSION NUMBER: AK066455
  ref <309>: DATABASE ENTRY DATE: 2001-12-06
gctccgattcagggagaaaaccaaaccctagctcgctggctggctggctggatcccaatctcccatcggcgccggcgccgcggctcgctcccccctgtgctgcctgtggcggtgggcacgtgcagtctgcgctgcgtcagctctcgccgcggctcggctctccggcgactccttcggctcgctccccaagagaggatcgatatggggaacgcaactctcactgatatgactctcttgcccagcgtagaccctgacgacgcgctgtccgggatggcggccacctcctctgcccctgcccagggagccaagcccaagaagaagaccatgaagtccctctacctccagttcttcgatactgcccccgatggcaagtcccgcgtctgcaagctctgcaagaagagctactgcatgaccactgccaccgggaatcttgggaagcatcttaataaccgccaccctggttactgccaactttctgagggtgaagcaactcaaagtacaacgcctaccagcatggtttctcgagccaaaagatctcaacccctagcgcgaactcgatcacaagctcaatctcagtcccaagttcaacctcaatcccaagttcaacatcaacctcaacctcaaactgtatctaaagttcgtcatcaacctaaagcgaaaccagcaattgatattgaccatgtcaactggttacttctgaggtggcttatcagctcctcccttccaacttccaccctcgaagatagtatgcttatcgacagttgcaggtatttgaacccgcctgtccagctatggccaaaagaaaaggctcatgaaattgtccttcaagtgttcagaagcatgaaggaggatgttaaggcatctcttcagtgcgttagctctcggttctccattactcttgacttttggacttcttatgaacagattgtgtacttgtccgtcaagtgttactggattgatgaaggctgggccttgcggaaagttttgcttgatgtccgccgtatcccatacccatgcactggccctgagattctgcaagttctaatgaatgtgctgcacgagtttaacattgattcaaagatccttgcttgcacacataacaacagccaacatgcaatccatgcttgtcatgagctcaggcaggagcttgagtcccgtaaacttcctttctgttacatcccctgtgctgctcggatgctcaagattatcataaaagatggcctggaaaatgtgaggccagtattgtccaagatccgtgaatttgttcttgagaccaattcaaaccaggacatgatggaagattttatgcactggactgaagtttatcaagaaggctcatggaaacttccatttgaccattcatcaaactggagtggtgattacaatatgcttgatgtggtaaagaaggcccctaatgcaatggataacaccatcaagaagtttgaaggggtatttggaccaagggactgggttctgagttccacagagaagtcagccgtcaactcattgcactcgtaccttgagcccttctacaaaactaccaccaacctttgtacttgcaaaataccaacagttgggctggtgttcttctttatggaccatgttattgaattgatcaatgtctgccatgatagcacccgtcaggattggctcaagaaaatcgccagtgacatgtctgagacagctcataacttcgcatctcaagcttacaatatctacacgttcacggcagcaattcttgatccaagaatcaaaggagagcttatccctgaaacccttaactcaactagcaacttggaggatgcaaggaaccaatttgtcagggactacagtagcacctttgaagctgttgggaatggctacaacacccaagacaccactgacggcggtgatgcattttcctttgctgaagagattgtccgtaaacgccgtcgtgtgagtatgatcactgctgctgatgagctttctcagtatcttgctgagccccctgcaccaatttccactgatgcccttgaatggtggaagggtcactcctcccgttacccacggctctctttgatggctcgtgattttttggcgatccaagggacctcattagaccctgaagaattgttcacgagcaaaggtgacagcatgcgcaagcagcactactgccttcctctcagtagcattcaagctacaatgtgcgtaaaatcgtggatgcagagtgggtaccagttcaattttcaatcaaccattattgatttcgagagattggtcgaatctgctgttgctcctgatgctgtagatgctcctgagttttcatgaatgaatgaccgtaaattcagaatctagatcagttttcactgtctttgatgtttatgtttgtagtggtctctaacaaaatcccagagtgagaaccatggagagtagcttgtgttagaatcatgacattaatgaatttaactcaatgtctccgggcagttgttttaatattgtagcgttattatgttggtacttccgtgggtgaccaaaactaaagctaaatgtatcaggtaatattgattgtagtttgtccagt

SEQ ID NO: 15947 - DNA, 1859 bp, Oryza sativa
  ref <308>: DATABASE ACCESSION NUMBER: AK066456
  ref <309>: DATABASE ENTRY DATE: 2001-12-06
gtccgtgttgccacgaccgttccagggttttgcttcaaccatggcgaccgccgccgccgccgccgccgtgtaccttcccgaggtggatagccgcttcgccgacgccgacgaggaggaggaggaggaagcgacggtgaggccagtcgaggtggccgagagtaaggatcaggaggaggtggaggaggaggaggatgaagaggagtggtcggactccgacgtggccgatgcgctcgactggctcgacggcgcggaggccgaacgcgcacggcggggtgctgtcccgcccgttccagccgatctccaaccgcacgcagaagctcgcctcgcacatccgcgccacacccctggaggaatgggaaggtagaatgaacgtggggatgtcaaattcagtgacgactgcgataagggacagcataagggagacggcaattgggaaaacaaggaacacagagaaggctgatcgtgctacagtagaacaggctattgatccaagaacacgcatggttctgttcaagatgttaaaccggggggtttttaataccataaatgggtgcatttctacagggaaagaggcaaatgtctatcatgcatcaaaggctgatggccaggagttagcgatcaaagtctataaaacatctgtccttgtttttaaggatagagaccgatatgtccatggagattaccgctttagacatggttactgcaagcataatcctcggaaaatggtgaagacctgagctgaaaaggaaatgagaaatcttttacgagttggagcagctggaatccgatgcccaaaaccattgctcctgaggcttcatgtactggtgatggaatttataggaaaaggaggttgggctgctcctcgtctcaaggatgctgctttatctgatgataagttgcgtgaaagttattttgagttaattacgacaatgcggacactctaccaaaaatgcaaactggtccatggtgatctgagtgaatacaacattctttatttcgagggacacttgtatatcattgatgtttcgcagtccgttgaccttgatcatccttcagcgttggaattcttgaaggaagattgcttgcatgttactgacttctttaaaaaacgtggtgttgctgtcatgtcagtaacagaactatttaattttgtgattgatcaaaatattgctgatgaagatgttgatcattacctggaaaagattcagcaaaagatgttggaaaatggagatatggttgcaaacgacgatgaaatcaccccaacagtcttggttcagacgctggattatgtgaagcaatgcgaagcagatattgtcaacatgtcattgatgcaacgcccatccttcgcgaatgaaccaacagcggataagctttacaaccaaccattgctaggatttgtgcggaataaaaacgagcctaccaaaaaccagcaagtacaatcagaagaacctttggatctgcaaaataagtgctcctcggaacatagtgaatcttgcactagttccgatgaagacggttcatggcatgagattttgaaggtgggacctgaggaaaggaaggctgctcggaaggaaaacaagaagaaagtaaaagcagaaaagagagaagctcgcaaagataagatcccaaaggctgagaagaagaagaggaagaaaatggcaaaagccaagtgcaagcggtagtcaatctgtgtgtcgcaccaacaatggtcaatatcatcaaagctaaattagctataaaaatctactaaagttatcatatacttttcagtagattacaaatgtgagatggcctttatgaatgtaatgcaattggaagatgatttttaaattgagtataatcccttgcagcatggaact

SEQ ID NO: 15948 - DNA, 1744 bp, Oryza sativa
  ref <308>: DATABASE ACCESSION NUMBER: AK066457
  ref <309>: DATABASE ENTRY DATE: 2001-12-06
acccactcgccgtcgcccaggccggcggatgagagccaggtgagtggagctccacgaacccaccccacccttcccgctgcgggttcctgacctggcctgtgtgcctgtgccgcgagagagcgcgagatgtggatcggctagtctctccatggtctcgtgctcctcgtcccatggtgttttgcttacttgcccgtgtgtgtgctgatgctgctgaaatgctcatctggaaatcggaatggtgcgagtgggaaatgtgggaggatgaggaggaaggagggaagtagcgcgactcatgcccatcctagaattgaccttcaggtagagatagataggaattgcgcacgaccctattacaggatgaaaaattccaaatccagagttaatcacttcaactaacaagagtattatgcaatgtttttttcctttgtcggccgttcacactcatgatctaccaacgatggtttagattctaaccttagcagctgaaatcaaccgaggaataggcttatgcgcgcatcaattggcacccctatatatttttctttcattcatgaacaaacgtccaatggtagtatgatacatcgatgaacaactgaacacatgctactagttatctttcttggcaactgcagacgtgcaaatggcaagtagaggactgctctgcaagcacatgttatgattttctactcctgttttcattagtccttcttataatacattagtgtagcggagcgtattatgcagttttgctgtttcagaattatggaacacccttttgcccatggaaacaatgcgacacatggttttatactaatgtatatgtctctctttgttaccttttagcatgttggatcatgctgatgctaatctctgctatttgcagtgaaccatgggaggattttgctgttgcctctgcactgacgatttcgaggagtacgctcatccaaataaccctatctataggcaaggtgtatgcctaaggaattttttccacaacttttttggcgggtatactgccacattccagaggctcgaatctagacctagcaacccagctcaaggggctgctccattggcatccactaatccaagtaccaatataactgacaattcattatccgaaacttatcaccttgtgtccagacctccaccgtatgatactgatcctagatatgcccgtgttcaaagagagggtttggtatctaggcgtgaaaagtctataaatctaacacaagaagagtcactggctcttaggcgaaatggcagcagctctggcattgaacatttagctgctcagaagaaatggagcagcactgaacctgagggtgaatataaagtccatcactctgaatccaccaagagtttatccgcaaaatcgtataacagcagttttgcagttgtcacttcagaagatgaagatgtctgccctacttgtctagaagaatacactccagacaatccgaagattatagctaaatgctcccatcattatcatcttagttgtatctacgaatggatggaaagaagtgatacttgtccgatttgtgggaaggaaatggagttttgtgaaaccccatgagagatttctcgctggttgtatcagtggaaggcaaaagatctacagtgtgatatgctggagagtctgtaaataatactagttgtccagatagatctcttttttgagatcaaattcttatgtgtactgaaatcatggcctacaaaaaagaaaatgcgctagaatttg

SEQ ID NO: 15949 - DNA, 2059 bp, Oryza sativa
  ref <308>: DATABASE ACCESSION NUMBER: AK066458
  ref <309>: DATABASE ENTRY DATE: 2001-12-06
gagatcaaaccatgagcaggtacaggttcttcaaatggacatggtgaggacaattcaagcttgaagcttcccatctcttcgtttttcttctttcatccctcaccccaaccaacgcactaatatgcgctcgaaagatcacacaaccaaaaaccaaaaacagcggatctatagagaggaatgaaggcactcagcgtgcccgagatatcgtcgtcaaaaaaattgagcgatgaagtcactcaatcttctgaagccagagaggaagagagcgacgaggacatgaaagagccaattacaagattgttcgtgcatggtttcctgtcgctagtgatatcagcggtcggcaactatataattcctcttctaacaagtcacagcgagcccgagcaaacggctaaacggtccgcgatgccaatagctgttttctgtctcggcatgatcactcctgtgattggaaatggcatgcgtttccggatacttcaacccaaacagcaatatggctccggggttgcgttgcacatcaccactgcccgcatagtgctgatttcttacgtgttcctgctcctgattaacacaaggtatatcagcctcgccgtgttcccagctatcatgattgtgttcatcggcgctctgtgccgcaagttctgggtagaagaaacctgcaggaggcaacttcgacatgattcccccggtgcttccaaagctagcagcgtcttgcgtaaatctgaagagcagctgacgctgatcgtagcggtgctaccgttttggctgcagctacccggcgtgatgcttgcccgaggaacctggcagcaagatcgtgttttggtctctcatttcctggtgttcatcagctccgctatggttgctctggcgacactaatcgcccgcacggtgccagccgggatctatcctggcgtatcacgcgtgttgccagtgatgcacaggacatgcatcgccctcattctagtgtcggtgcacaccatggccggagaatggtttgggacgaagagcatggcgctagcctgcacgccggagcttgtcgccctgctcatatggttctccgttcacctcaaccatgcccacgatgcccgtgcgtgcaaaatcatttgcctcttcgcggtttccttgctgtgggcatgggcggctacatatgatgagatgacgatcctgcagggttattggagaagtagtttttggggcatctcaggcttgtcagggggactgtgctacttcagctcgtggatcttgaagcaatggccaaaagatagcttcaggcctaccactgatcaccatgcatcgcttctgctgcagctgctccgaatttctgcagaaatttccttattcacatcagttccaagtattgccttgcaacttcctcgttgggtgagccgaatttctgcgcaaattcgcttattcgcatcagttctcactactgccttgcaacttggtcttttggttcccatcatatacgtgttgttgaagagtgtcgcggtgataatgttctatgtactgatatattgcgtgtgtttccttccactgatcggcgtcgagtaccgtccaggcatgagtgtcaacagacgcaaggcctccatatccatacaactgcgaccgattatgctgttagtactgctgagcatactgatatctcacttcacgggcagatgaaactctaagaaaaaatggttcaagagcaagtgccagatgacaaatagtaagcgtgcacaatattgtcacctgttacagcttaaaggttggcacgcttaccgccgaattaactgactttgtaaattttgttttttcgatggtttaatttgtactggtagcaagtattatattcctggttaaaatgatatgagaggcattatagtctcggctaattgtacttgatttggagaccattcgccagaattaccaaatattcttggcacagggtaattttattgagaagacaccggggtgtatcacattttctaatgtaaaactcttctagatactaccttgaaatactttctttaaggattgtaaaatttctccttagcatatgtgagctctcatatattct

SEQ ID NO: 15950 - DNA, 848 bp, Oryza sativa
  ref <308>: DATABASE ACCESSION NUMBER: AK066459
  ref <309>: DATABASE ENTRY DATE: 2001-12-06
agacacttcgtgacttgtttccgtgagcgatcgacaggaggacatggcggaggaagcggcggcggcgtcgtcggcggcggaggggaggatgacgatggtggtaggggtggacgagagcgagcacagctactacgcgctgcagtggacgctgcgccacttcttcgccgccgccgccggccagccgccgcagtaccgcctcgtcgtcgtcaacgccaagcccaccgccgcctccgccgtcggcctcgccggcccaggcgccgcggatgtgctgccgttcgtggaggcggacctgaagaagagctccatgcgcgtcatcgagaaggccagggagctctgcgcccaggtgagtgatgctctgtttgaagtgctggaaggggatgccaggaatgttctttgtgagtctgttgagaggcatcaggcggagatgttggttgtcggaagccatggctatggagcaattaaacgagctgttcttggaagcgtgagtgactactgttctcatcatgcgcactgcaccgtgatgatagtaaaaaagccgaagcacaagcactgagtccatgagcggcggccccagcctggactgaacagtatcattcatgtatatatctaccaccaaattgtgaacgtatctgtgtgaataaattgtcattgtattgacacttctagtcagcttcagcatgaaggcatgtaccatatagcatgcactgtatatccttctacctcttggatcctggatcgagaaggtaaataatttatgtttgatatcttaaaacagtgcgtgttaatattcatgcgaaaaatatttcatgtctattacacatatgcatcgtcaagatattgcaagttct

SEQ ID NO: 15951 - DNA, 3792 bp, Oryza sativa
  ref <308>: DATABASE ACCESSION NUMBER: AK066460
  ref <309>: DATABASE ENTRY DATE: 2001-12-06
ggcttctaggggtttttatgaaaaacatccatcccctacccccaatccccaaaccctcctcgttccctcacctcagcgccgccgccgccgcaagccccgccgccgccgtccgtcctcccctcgacgtcgcctttcgctctccccccgtggtcgccgtgcgccatcccccgccgccgccgtgcgtcatctggcgccggtcccccttcccccttcttcgccctcccctcgcggcggtggcgtaaccggcgccggtttccccctcccctcgtggcggcgtctgagtcggctccggtgctcccctccctcttccatcccctttcgacggcgtcggggatgacggcaacgcggtggtggtggcggtgtcaggtgcgggtagaaaggagctggtgacgggcggggacaaggcgtcccgatctgcactgactcgatctgcgcgagccaaccccgcgccggattggatagggtatgaggggagaggacggcggcatgggaggatgaagaggacaacgccgatggagaaaggggtgaggttgcccggcgggggatgctggccttcaccgacgcgtggctccccccgccgcggccgtcgtcgaccgtcctccacccgtcgtcgccaccccccccccttctcccctatctcgggcctcttcccgacctcatgcctgcacgagcgccggccgcgtcccgtgctcctctcctggcggcggcgtcggagccggcgcccggtgccgtcctcccttctggatcgatggatttggaggtagtaccggcggtggcggtgttgggaggaatctatatgagtatttcactttcattcctcctcctctcactctcactaccgatcgggagcgcggagtggtgatggtggcgatgtcggagcgggggtgctggtcgcgtccatggctcacctcatcagggcacgcgccatccgcgccggcaccatcatccgcgtcctcgactatctcttcatcgactccgacatcaacacaaggtgaccatacaaatccttcctgctttcgatcgatctcatctcgctgctataatcatgtatcagaccagatgcctgcctggctgatcgatcttttcaaggagccgctctttgatcattttaatgtatgtgtgtgcacgttttgactgctatcggggaaattttggttaatttccttttttcattctaactgctaggtaaaattttattctgaaatgctctgccgaaattcgttttttcggagttctaaacggcgctagggaaggactgatgaataacagggcctgctctttactgatccagggcagaaattaaatctaaaattaaccaaagtctggtctatttttgtatagtagcagctcttgtccagtttatttacatcaggcaacattctaaagtgatgaaatgcggatgaaatcaaatggatgatctacttgttcatattgataaatttaatattacacattatcaacctaacaaatgatgtagtttaagaaagtttttagcaaatcattataagcatggagtaattaatccatgtcaatcatccgattaacaacctgtttagaatggaacattgttagctatttctttttgttacttgaaactttgaaagtttcaagtattacaacatgtgtcaacacttactgaaaattgaatccataactaacttttcctatcatatcttggtttctcagttcagggtcattatcgtccagcaacttgaattgctgcaaactgagtgtgcactgatcggtactagcaatactcatgcgagcccagtaaactttatctcacatggaaccatgcatttcctttccattgtgagctgtccccggcatgttgctactgggtacctgttctgaccgacgtggtggagtggtgatgttgcagaacgcgtacaacatgctccacagcgacatggtggcggccgtgcgtattgcgcacgcatgctgtatgttcctcgacgagctcagcaccacatacctctttcctgcccaccacaacgtcaacgtgagcacattcagatctcccaactttataaaagaaattgcatcttaattcaaagatagtttcttgcacctcttcgatgcttcatatctggagatttgggtagcggaaattgactacaacgacctatctctgattttggagtcgatactaaataatcaagagaatgggcttgttttgtttttttttttttttctagagtgggatatggaaacacctagcccaccgtctaagatgagatgttgtctaggataatagttgtaattggtagatgggatattgcagggctacgagagggtaaatgatccctctgtgtaataggggaggggagtttatttctagggtgaactaaaccatccaaacaagcaagtgcaattctgaacagaaagtaaggtaattgactgcaacatctatcaccgaatagatggtgaaatgaagatcttaggcttttttgccacttgaattgtagtttctaaatacatgtccactgatatatctgaaccatagctacttttcacggacaaactagcttcatatgtatgaaacatggcaatgaaaatgttgtttgattcctggattctgacctactggatttggatgcatcatctttcctttgaagtgttagccatcatctgcaaaagtattgcattcccaagctctttggatggcccggtgccaaaattgaagaacatcatgtactgtgttggagagtgcaaaccattcaaggcaccacaaaacatatctcctctgttctttgtagatgttgtattaggatacatgcaatcaaagattcaaacatcagattctttaccagctaaaatatcaaaaaatattaagacttggcagtgtagttatctttttactaattcttatagatatatgattagaaaaatagaatggtaaaaacatgggtattcgacactctcgcagtgtactagacaagtaaaaaaggacactagggagtataaatcagtcagcacatatttcattttggcacttgatatttggtgccacctcacctgtcatatcatggttttgttgttttccaccttactttcaggacagtgcaaatgtaccaaacaacacagatgtttgcattgatgtgtaccatacccttcagttcaaaatttcgcttacatgatacaagcagatagcagcagactccggtccttctcgtttttgtatttgagagtattctgccatagttccttttagggttgctaacttacttgccattttaccccacgttatatatgatgtattgtttggcaggagaacgtcaatcgaggtcattccagttcagaaagaaaaatacaatttctttgctatccattcatgaagaattgtacattacagagttttaaagtaaattgaaaaacgattgcaccacaaaccactttttatttaaatttgttgtacctactacatctcatattgttaaatgtcaggtcaacatactggggatatatacatgacaaaagaacagagcaaactccttttttatccaaatcattgttcactgaagtggagttgtttctcagagacctcactaatagggtgagcttacaagactgatcattgttagtcttcagctggaaaccaagcaaaagatgtcatactgttgtaaccatgtttgaagacaatttcgttgcctcttgtttgaagatggcaattgtcataatgcgtggtttgtcaaaaatatgtccactgtgacatgcgtatatgtattaataatttgtcagttatttgtacctatctgctttgcctagatgattattgtaaatgctcttatc

SEQ ID NO: 15952 - DNA, 2325 bp, Oryza sativa
  ref <308>: DATABASE ACCESSION NUMBER: AK066461
  ref <309>: DATABASE ENTRY DATE: 2001-12-06
gcccccgacccaacgaaacccctaggcgacggcgggagttcgacggcggcggcggcgtcggcggcggcggaggaggctgcgaccggattagccggtcggtgacgctccatgatttggcgctaccgtgtggagcggagacaatgatagcgcgggcgtttggccttgtgggcaaagcatggaagcgaacaccggcctcgacgccgccgcgccgccgctccgacttaccggcgctgcttcgtcgcctccacagcaggtcggcacaaccggaaatattccgcgaagaacggccccacctacaaaataatagcggaggagctccgccaaggctggacttaatctcagaacaaaactggagcaagcagtgctataatgtcaacactatgacttcagccgattctgccgtcgactctattaggtaaccttgctcttctgaacttcaatcttgacccaagctttgtaatgttacgattgtttacatccagggatactgttgaggggagttttgatcagaggttcgcaacactaaagagcattggggaggaccgtgtcaaagacagcgagcttgagttactgctaaagaagaaatctgcccccgtttgctatgtttggtgtgatcccaccccctttatgcgcatatcccaggggatcataacgactctttctgttaataagatggttaaatctggttacaaagttaaaatcctaatggcagactggattgcccagatgaaccgtaatattggtggcaatctaagtgaaatgcggactattggcttgtacaatattgagatgtggaaagcagctggtatggcccttgatagggtagagatagtgtggttgtcagatgaaataagtcggcttgctgatgaatattggccacttgccatagatgttgcaagaaaaaccactgtgagtataataaaaagattgacatatggctcttgggcatggatcaacatgaggccaatttgttagctagagaatactgcaagcgtgtaaaaaggcggaacaagccagttgcagtgtcacacaaaaagcttcctaatttattacaatatcctgaagaagaacataggaggaacccattcctagccatcttcatggatgattctacggttcgtattgtgttattagtatgttcagctttgttaatattctattggttgcattgttttataattttatttcaaatatttaatacaagagctagtgaaaggttcttgcaactcttgctcactatttataggccaacataactatagtgtaaggtagcccatcttggttcaggaagatgggcaaaaatagttgactttccatgcctatgggctatgcaagagtaatggtacaatttgcatggttcagttagatgcaaatatatattgaatagaatagtaaaaaaaaaagtgattttttattaattctattatggatacctcataatatctattcagaagaagcaacttctcttatgtattttaaaaaaggaactagtgtcattaaccagtttgttttggcctttttgttgttggagcctgtatgtgatattaattatcttgcccggtcaaaaaatataattatcttgtatgttgtttaacattttgtcaaccaatttaaccatagaggtacagacattagctgctttatattgtttactggctgatgtttgtctcagggaatcattggtttttgtgattgatagttttacaaatgagtctgttcaatatacgtttagtgtattgcaggttgatatcagtagaaaaataaaacatgctttctgccctccaaaattagcagaaggcaatccatgtttggagtacataaaatatatcatcttaccatggtatggaaagtttgaggtggttcgggagaaagaggatggtggtaacaagacgttcctgagcatggaggagcttactgctgattatgtaagtggggttctgcatcctggtgacatgaagctggctctcgcaaattcattaatcaaaatattgcagccggtctatgatcacttcaaaagcaatgctgaagccaaaaaagcactgcaaggcattgagaaatactacaagatctaaggatctgatgatcagatgcccagacttggatcgcggaattttttggcaggaatacagaatactacagggtggtttgatgatcagatgtccatacttcggtcgcagagaaatcctagacctaaagatcattggtcaccttgagccatgtactaacacttccagaatctctctttttttaaaagaaaaaatctggggtgccagtttgcaacatctaataatttataagagcttcaaaactaatgtcattgttccg

SEQ ID NO: 15953 - DNA, 1761 bp, Oryza sativa
  ref <308>: DATABASE ACCESSION NUMBER: AK066462
  ref <309>: DATABASE ENTRY DATE: 2001-12-06
ggcgagttggtcaattaattctcattgaacagatatatcagcagccatggcagcgacctcagactcgacgccggctgctgctgctgctgctgctgcttcttcttcttcttctccacttcacattgtggtgttcccatggctggccttcggccacatgatccccttcctcgagctctccaagcggctggccagccgcggccacgccgtcaccttcgtcaccacgccgaggaacgccgcgaggctgggcgcgaccccgccggcgccgctgtcgtcgtcctcccgcctccgcgtcgtgccgctcgacctcccggccgtcgacggcctgccggagggcgccgagtcgacggccgacgtcccgccggagaaggtcgggctcctcaagaaggcgttcgacggcctcgccgcgccctttgcccgatttgttgccgaggcctgcgccgccggcgatggggaagccgtcaccgccgccgccgagttcttgaggaagcccgactggatcatacccgacttcgcgcacagctggatatggccgattgccgaggagcacaagatcccatatgccacgtttttgatcgttccggcggccttggtggccatcctcggcccaagaagagagaatctgactcatccacgcaccacggcagaggactacatggtccagccaccatggatccccttcccctccaacatcgcctaccggcggcgccatgaggcggagtggatggtagccgccttcagagccaatgcctccggcgtgtctgatatggatcgcttctgggagtcagagcaacatcccaattgccgtctcatcatctatcgtacttgtcccgagatagagccacggttgttcccgctcctcaccgagctcttcgctaagccggctatccctgctggtctcctgatgttccctgatactatcaacaacgacgatgatgcttctgaacaatccttcgttccaccaacaatagagtggctcgacaagcagtctgagaaatctgtcatctatgtcgctctcgggagcgaggcgccattgacagaagaccatgtgcgtgagctcgctctcgggcttgagcttgccaatgtgcgcttcctctgggcgcttcgcccgccgagaggcgacggaggcagcaacgatggtggcgcggcggagatcctcccggatgggttcgagtcacgcgtcgccgcgcgaggcatcgtgtgcacgcagtgggtgccgcagctgcgcgtgctggcgcaccgtgcggttggcgggttcctgacgcactgtggctggggctccaccatcgagagcttccagttcggtcacccactcgtgatgcttcctttcattgttgaccagggcctaatcgcggaggcgatggcagcgagggggatcggtgtggaggttgcaaggaatgacgatgggttattccacagggacgatgttgcggcggccgtgcggcgggtgatggtggaagaggaggggaaggtattggcacgcaaggccaaggagttgagcgacattgttggagatagggagcagcaggagatgtacctggatgagcttgttggttacttgcagctctacaaatgaccaatcgctcatcatgcatgttctcgagtctgacacttcatcatgaatgattcctttcttgtgccagagtggtggaatgtttttattttttacattttaaattgcaacattactcaatcacgtgtcttcagctttactcccttgtgtaaaaagaaaagtggctataaatccaaacacatgttatgtcc

SEQ ID NO: 15954 - DNA, 3421 bp, Oryza sativa
  ref <308>: DATABASE ACCESSION NUMBER: AK066463
  ref <309>: DATABASE ENTRY DATE: 2001-12-06
ggtagatagcttccgcggccgcccaccaaatctcgcccatggtttcctcccgcgaccccggcgaggaggccagcgcgccgccgcccccgcccccgcgccgcggcgagaagcggcgaatgcgcggccgcaccccgtcgccggagccggcctccgcgccgcaggatctctgcccatcaggagcttgcggggacaatgttgctggagctacaactacaaatggaaagtggcatccacatgaatcgtacagacctgaaattgatgatgcccctgttttcactccaacggaagaggagtttaaagatccaattagatatattacgagcattcgtccccaagcagaaaagtatggaatttgtcgtattgttccaccatcttcttggcgaccgccttgttctctgaaggagaagaacttctgggaatgtacagagttcaatacccgtgttcaacaagttgacaagcttcaaaaccgggaacccacaaagaaaaaatcacaacctcgagttcagaagaagaggaagaggagaaagagactgagatttgggatgactcacaggcgtcctagtgcaaatacatcagaagactgcgcagatgcagacgagaagtttggctttcaatctggctcagatttcacactagatgagtttcagaaatatgcagatgagtttaagcagcagtattttggaataaagggaagtgacgaaatccctctttctgaaattaaaaagaagaaaaaaattggcaaccatcggtcgatgaaatagagggagaatattggcggatagttgtatgccccactgacgaagttgaggtggattatggtgctgatttggacacttcaatgttcagtagtggattctctaaattatcttcagattcaaatagacgagatccatatggtttatcttgttggaatttgaacaatcttccacgtattcctgggtctgtactgtcatttgaaactgaggatatatctggcgtcgtagtcccttggctttatgtagggatgtgcttctcatcattctgttggcacgtggaagatcatttcctttattctatgaattacatgcattttggtgaaccaaaagtatggtatggtgttcctggtgctgatgcagtgaagctggaagaagctatgagaaagaacttaccaagattgtttgaagaacagcctgatctcctacatgagctggttacgcaattatctccttctgttcttaaatcagaaggagttcctgtttatcgtgttgttcagaatccaggcgagtttgttctaacgctaccgcgagcttaccattctgggttcaactgtggcttcaactgtgcggaggcagtaaatgtcgcacctgtggattggctgcctcacggacaatgtgctgttgagctctacagggagcagcggcgcaagacatccatatcacatgacaaattattactaaaaactgcaaatgaagctgtcagacagctttggatgaaccttagcgactgcaaaagtgaacaaggagtatacagatggcaggatacttgcggaaaggacggaatgctgacaagtgcaattaagacaagggttaaaatggagaaggcagcacggggagggaatatggcactgcgatataagaaaatggatggggattatgattcagctgaccgggaatgcttttcatgtttttatgatctccatttgtcagctgtcagctgccaatgctccccaaatcgttttgcttgcttaaaccatgcaaacattctatgttcatgtgaaatggacagaaaaaccgcgttgttgcggtataccatagaggagctccatactcttgttgcagctctagagggtgatccaactgcggtctaccagtggggacagaatgatttaggtttagtctgcccatctggttctactcagtacaagaagttggacttgggtgaaaacacggaatttccggattcagcaaccaacgtcaatcatggctgcagcttaggaagtcaagatcaatatcactatgaccccgcaaagccagcaggataccagcaagagaagggaatccagattgcttcagaaaaacatgataagaacaagatggttgtcaatcttgagtctccagcaacagctagtaatccaagcaggtcaaagtctgactgcagtggctcactgtccttgaatcattcatctgagttaccatcttcaagaattcaaacaggaaattctacgctagcttccattaccacagagaaactgtttggtgttgacattaaatccaatttagcacagtcttctgatggccaagttagtcaattggccaagccttcctcgagccaaactgatgaagtctctaagccagcaatagctaagtatacggttgagctgctagacagtggaacaatgatgattggtaaaaagtggtgcaatcagcaagctatattccccaaaggatttaagagtcgagttacatttcatagtgtactagatccaacaaggacatgctgctacatctccgaagttcttgatgctgggcttcttggaccattgtttagggtgactgtcgaaggtcttccagaagtttcgtttactcacacatcaccaatgcaatgttggggcagtgtaagagacagagtaaatgaagaaatagcaaaacaaataagttttggaaaatctggccttcctgattttctatcctgcaattctttgaatggacttgaaatgtttgggttcttatcctcccctataattaaggaaatcgaggctctagatccctgtcaccaatgcttggactattggttgtcaagggtttcttctgttggaactgaactcccctcggaatctgtgatggcagcaatggttaatgactccactaaccccccaataaagttgctcgggattgagattaaccggagggaatcagaacaatcaagtagcttcaataattcctgtgtgaggaggtcacacttggcaggttgctgaagaaggctagctaagctcccagaagaaccagagctaatggcgatgaaaagaagtattcagtagcagtctagtggatcagatagcagtggtatcatctggagtggcaattgcactctccaggatgagatgaacaataatgtagatacatagtgccatgaatagatcagaaatttcagataactcatcctagacagcttccctagggaaccattagaattgaaatagagccaccattggtttgcattcttctagaattgcatttcttgatattcatttcagcttgatcccaattcatttctaacttgatggcaacaagttattgtattctctaattgtttctggattagccagtttattgtgaccaatgtaacaagttgatgtttcctgtcgacataaagcttacatgtacaaaccttggcagctaccaattggaaatgaaaggaagaaaatgttttcggacttatggct

SEQ ID NO: 15955 - DNA, 2414 bp, Oryza sativa
  ref <308>: DATABASE ACCESSION NUMBER: AK066464
  ref <309>: DATABASE ENTRY DATE: 2001-12-06
gaagagaaaagaaaagaaaagaaaaatcccctccgcctcctcccccaatccttaacctaaactccgatcccctccgccttccatggctgccatgggaagaactgtactaccttcctatgttcttctggatcgcatcgttcgatcggaggaggaagccgtcgaggaggagtcggagtgggcggccatggagtgcgcggactggaagtcgtacgggtgccaccccggtgacgaacgctaccccaggaacgccgctagggtgaagggcatgctgctcctggcgcgcctcgcggagcccccgggtctctccgagctctccatccgcctctccgccgccgccgccgtgcccaggccgccgccggccagcttcccccccggcgccgccgtcccgcccatccccaacttgcccgacgcgtcaccgtacgacgacccgccgctcacctacgtcgaggcggcaggcgacggcctcatcgccctcacctcgtgcttccgggatggctgcagctgctacctcgtctacgacgtcgtcggcaagtcgctctctatgatcccgggcctgcccgagtcctgcctcacctactgcagcatgcggcctctccccctgcgcaccgccgccgccggtggctacgcgctgcgcagcagctactcgctggccatcgtggctaaggacatgcggtttgacatggaagcggggcgagacgtctaccgggatgttctctgcctgtgcccaccgcggccatcatcatcctcaagttccagggggggcatcacgccatggcaattcaaggacgccatcttcccatcacagatgccgggttccttccacggtgacaaggtgttctcgttcggaggccacgcgttctgggccgacctcgcaaagggcgtcctcttctgtaggtgcgacgatgctctctccggccgcaatgatgatgccgtgcaattccgctacatcccgctgcctgtagagtgccatcttaaaatcagtttcgccatgaggggtgacctccagctatgccgcacaatgagctgtgtcgacggctgcggtgactctatcaagttcgtctgcatcagtgacggcggatccagctctgcgcacaccggcgatcgtgcgataacgatgtggacactgaccctcgcaaccggggagtggctgaaagatgcacaactcatggtggcagatctgtgggagctggagggcttcgacaaggcgaggttgcccaaggccataccaattagccctgtcctgaaccctcaggaagatggtgtccttagtttcatgctcaacgatgccgatgcagagctgtacatggtcagccttaacatgcacagcaagaagctcctctcgtccttgaccctctcatcctgccctgatgacattgttcctcctttgggtttggatctttccaaagaccttcagaatctgtctcttcgccctattgctgctgagtctgttccagccgagacacagggacgcccaattgcaaccaagaggaggaggtcgtcattaccgtagtgacatctttgtcaggtaattctaccgctataagcttctgcagtctgtcgatgagatgatgaggtcaggtaattctaccgctataagcttctgcagtctgtcgatgagatgatgatttatttagcttcaactgctgtgatccatgctttactgatttgttgttaattgttataaatatactgctagttgtgccacactgccatttaagatactctgaagaataaggatagatgattaatttagcttcaactggtgtgacccatactctcatttgtttgttaattattataactatattgctagttgtgccatttaagatactctgaggaataagcttctgtagatgagatgattaatttagcttcaattggtgtgacctatacttactgatttgttgttaattagtattgtactgctagttgtgccatttaaattgctctgaggaataaaagcagctagcatgaaattgccatccttctaacttctagtttattttgcttgacaacagtggacggctcgtgatgctggagcagacttcattttgccaggctgctgcttacttggtagggtagggatcgtattcttcgtgccgtcttgctgttttgcaagctgactctttaggttttatattgctgccgccaccgttatgaaatcagatgatgaacacaatataagagattttggatggatgttacataactagtataataaatctagtcacatccatccaaaatatattatcagaattatattgcttgaccatacatgactagttgagtattgctagtcggaattgttaagagtggttaacgtaaagaccttgtgagattattatcttgattagaacgtaaatgcatctagcctgttgcaattccaaggattgattccacaagtgtgggaatgc

SEQ ID NO: 15956 - DNA, 1324 bp, Oryza sativa
  ref <308>: DATABASE ACCESSION NUMBER: AK066465
  ref <309>: DATABASE ENTRY DATE: 2001-12-06
ggtcgcccctttctcatccgctattgggcgcgtggagacggaatgcggcggcggctccctcggacagctagggcagtggcggcgccctcccgtgcctggagcagggcagtggcggcaccctcccatgcctagagcagggcagcaacgatggaagggccaggcggcaccctcccgtgcattgagagtttcatagtttgattgctcggttttggtttttattgcggtaattaatcatggtcactagattctggtttgattgctcagttttggttttcatgtgattaggtagtaagcctagcatatatcattgcagcttgatagtgttaattagtactagtttgagacaatcggtttttgttttgcataaacaaaacagacattctgtattggcaactcgctcggtgcctggccgaccaatcatcatatcagtaaaattgttggacattttgcaaagtggggtagtaggctcacatcaaaattgactaggaataggtcaccagaaaacaggcaaaaatctgaaacttgagtatcacactgaataatttgcatagtggaggagtaagatatgttgcatgttgtatattcagctgtgatacttccactgaaaatagttgaaacaactagagaaacataaggctttggcttccccctgacaaatctgaactgaaccacctggtggcttctctttttctgtcactacaagacagagccaaatctgaactgaaccacatttggtttctctcttttttttcttttatatgcactacatgacaacacaatcagttgcaaaaatcagatatctgttcttggcacacttggcagctggcaacttccgcttttgtgcaggaggccaatgcagaattgcaggtgagatatatggggtgcggcatgaatggcaattgaagattggaagagcatgaacgagaggatgctgaagaagtggcatagaacaattaatgacaagataatgaatgtagcctttctttgtaattcctactatgtagtatatacactattaggagtttgtaaagattcagaacaccttgtatcctgagaactagttttgccagatgtcaagttatcctgagaactattgtaaccttgtgcaaaatacaaaagaggaaaattgattgcctaaaaggatggtaaatgcagcaggcagaagtggatggtgctaaaaggattgtagtttgatgaatgtagccttcgctgttaatccatacaatgtagtctgtacactcttaggagtatgcaaggattgtagtctagatgctgtaagtttggaccgcatttttggtcaaattgcaaggaaactcatatcgct

SEQ ID NO: 15957 - DNA, 3027 bp, Oryza sativa
  ref <308>: DATABASE ACCESSION NUMBER: AK066466
  ref <309>: DATABASE ENTRY DATE: 2001-12-06
gactttcctccccttctctcaccgccgccgccgtcgtccgccgccgaagggggcagccggattccgcagccccgattccaccacaggccacagacccttcacccgtggctcgggccgaggcccgacttccgagccgcaatatttggggaatcatccctggagtataatggcgagccaggagaagcccaccccgcctccgccgccgccgccgcatccacctgcaccggaggccgtacctcgcgtgcgccggttcggagggggtcctccgggcggaggaggcggcggaggttaccctaacccgccggacgcggcgatccccgacgcggcgacgctgcgggagcagtggcggttcgcggtgcggcagtacagcaggtggtactcccacgcctggggcaccgccatcctcgccggcgccgccttcttcggactcggctggctcgtcaagggctccaaccccctcccgtcccgcgccgagcaccacgcctccaacgccaaggaggaggagggctaaccggtgagaaaccccttcgattcttgccttttcagagttatttatttctttgcttgaaaagaatggcgagttcgagctcttgatccgctggtagatattcccatattggaatggaatgggggtgtttgggtagcaagactatctgtgattctggtgagctagtttcgataagaactggtaaagacaatttgggcatggtttgggtggtttttgtgtttaagattagttatgagttctagggaagagtagggtgctactttctgtgtacttacaaattaacaaaaggatgctgtgaaacaaatgggtgttgtgcaaaaatattggcgacactggggctgttcggcttcttcatttgctgttgcgctgcagccagcaagaatagtgcctcagaaacaaggccagccgcagtttctggccttccaaacagccccactggtactttatgcaactcatggccatttaggtttgcaatgtcaactctttaaatagtatgttttcgtgaccatgatatggtcagtctttgacgtgcttaaattgaccagaggagtttaggcatcttcttacattattagtactgctagtaagagagctagtaaactaatgcttatgaagttgtgcttttgtttgtgacataaagctatagtatgttgttttcagatttataagagtatccaataggttaaatcagacaatatttttttcttgaacattttggataaataggatatgccgcagttggaaatctgcattagctccatcacttcccctctttttgaactaaacttcgattacataaatgttgagtggaagtatgattcttattatatcaaattgtactattttagtactaaagtttaattaacgatattgtttggacgtattgaagtactaactgctataatgctcctcactaggtttatttcatagcactttgatttttttcttcaactattacgtgtgatcagcttttgttcaagaagctttcaataggttgatcaatcatttcttttgtggaaaaagttgaaaaatatggtttttagcttccaaagttccatattggaaatgccaacattgaattttgagaactatctgacaagctggatgagctatctttttctataatgttgttaccagttgcttcagttcctttaatagtagaacatgaacaagtccaggatcttattctgttaagttgctcctcttgtataaagttgctaccagttgcttcagattccttcaatttatagtagaacaagttcatgactttattctgttaagttatgacttaaatttatcagcattgattaaaattttgcttataatggtaattggtccatcacacataactagggaactgttttctgtaactttggcaatccatcgcttccaaatagctttctttaaacatttttggtatttagtgaacaagtgaccatcttaattctacttagttgttttaaggttatggttttgtgcagtgttttagaataaggtctacatggccacatacaggaacgggtgccccaacctcgtactgcttaagccgcataagcggccgattataccacattaagtgtctgattatgccgcataagcgctacaaggtggggtgaccgcatgaaaccgcataccactttttaaaacattggtattgtgtgaaacccttttttaggataagttttatagacaaaataccactaagctataagaaacactgatttgatttgtttgtacagttagcacgagcaaacaatacttgacagagtaaggaaacatcctacatgtgcatatagctaaagcctaaaacatcaccaaaattatatttgaattattgattgcttttcatgaaaccaattgaaagactagcaatttggctataaaattgtgaagatcgactatccgatccatgaatgttttatattgttttaaaataatgtggtctacagctagattttatgttaaaccctactatgcctctttgtgaggttcgcagcatcatttagtgaacacttctgtatatcagacattcatatggtctagttattgtactttctgtgtcattgtattatttacctcagtctgcaatagatatatatgaataatgatatcttcaaagttttattatttttaggttgaaattgtacatgacaaaatatgtacaaataccacaacttctcagtgcaacttaaaacacagtcattttttgtgttctcttgtttattgaggtttcttttgagcagaaagtccttgctactcaccggtgcaaatttaaaattagccgtaatgggcaaagcgaagataaggcaagcaagaagaagaattctgcatcgtgctaaatgcacattgtacacttttgactgcaagacactgctcacttatctcatcttcctcgcctgttgtgtatatttggtctagtatctgcagaataagaatacgtggccttactgtttagtgaagcctttggagtatcctgtaaatatggacgagatgctgctgaaatctaataagtgttgccc

SEQ ID NO: 15958 - DNA, 914 bp, Oryza sativa
  ref <308>: DATABASE ACCESSION NUMBER: AK066467
  ref <309>: DATABASE ENTRY DATE: 2001-12-06
gagtttccgtttcagttcgcctcttctccaataaagcagccgccccagcactcacgaactcctggaatcatccggagccgcatcccgccgccgccgccgtgcacccgcctaccggcggcgacccgtcgatcgggagtgagtgaggcagagagggcgcgagatcgaggcgtgggagatggacccgtacgacgtcgagatggaggccgcggagggggagccgatggccgagcaggctccgccgccggctgctgcggcggcggcggcggcgagaggggatgggtggagcatgctgtcccgcgcccgagtcctgctcgaggagggcaagccgtcgctcgcgctgcaggcgattctcttggccataagatcccaaggtggtgaacaggctctcatgcagacgctgaaccgtgcacgggaactctacaggcaaagatcacagcccagccctagtgttgatgatctcgcttctttgcttgcacaatgtgctatagcagagtcgcagtcaacaaacactaatcctcaacaagtacctggctctgaccctgtcatgatgctggattctgatgaagtctgcatacttgctgagagtggaaggaagcagataattttagatgcttttgctgacggcagcagcttcatttgcttgaaatgtggtgggctgtttagcacctcgcgcaaagatgagcacctggcctactggtgcgggactgcatgatcctggcgatgcccataattatacctgtggccaccccagtcaatgatcatggtacccgtgagattttgatcttctgttacaccgaggcaagagcattgccaatgttggacattgtgtggataaagcttgccatatccctgtaatctgttcatcctgtacttttttgctggtgaagtggaaaaaaatctctatatgtttgcct

SEQ ID NO: 15959 - DNA, 1649 bp, Oryza sativa
  ref <308>: DATABASE ACCESSION NUMBER: AK098959
  ref <309>: DATABASE ENTRY DATE: 2002-08-28
ggccgtcgccgttgccgtcgtcttcgtttcgcagctccaccacctccatggcggccgccgcctcctcctctctgctcgccgccgcctcgtcgtcctcccgcgcggcggccgtgtccgcccgccgcgcccccagcgcgagcccggccgcggcggcctccctcccctcgccgtctcgcgcctcctgcgctcctcccctccgcgcttccgcagcgaggaccctccgcagccgtgtcgtcgcgagcgcggcccccgctatgcagccgccgccggcgtcgagggtctccacggttgtcgacgtcgacctcggcgaccggagctacccgatctacatcggcgcaggccttctcgacgagcctgacctgctgcagaggcatgttcatgggaagagggttttggtggtgaccaacaccaccgtcgcgccgctctacctggagaaggtgacctgggcactcacgcacaacaacccgaatgtttctgtggagagcgtgatcctgcccgacggcgagaagtacaaggacatgggcacactgatgaaggttttcgacaaggcagtcgagttccggctggaccggcggtgcacgtttgttgcgttgggaggtggcgttattggggacatgtgcggttttgcagctgctgcgttcctgcgtggtgtcaatttcatacagattcctactactctgatggcccaggtggattcatctgttggagggaagaccggcattaaccatccattggggaagaacttaattggggcgttctaccagccacagtgtgtactgatagacaccgagacactgaatacattgcctgacagggaactggcttcaggcatagctgaggtggtgaagtatggtctcataagaggtgcaccgttctttgaatggcaagagaaaaacatgccagcattattagcaagagaaccaagtgctctggcctatgctattaagagatcgtgtgaaaacaaagctgaagtggttgctcaggacgagaaggaaagtggtctccgagcaacacttaatctcggccatacatttggccatgctatagaaacaggaactggttatggagcatggctccatggggaggctgttgcagctggaacagttatggcagctgacatgtctcaccgcctgggttggatagacgagtcaatcaagaaacgggcaattgacatactagagaaagcgaagcttccaattacacctccagaggccatgacagtggagaagttcaaaagtattatggccgttgataagaaggttgctgatggattgctgaggctcatcctcctgaaaggacctctgggaagctgtgttttcactggcgattacgacaggaatgccctcgacgaaaccctccgtgcattctgcgactgctgattcttcctacttggatcttcagactgtatactaaataggctacattatcatttcagagaggagactgcattgtatatgtatgagatctttcccccttttttttttgtcggagaaataatggagaatgtggataggggttggtttctggttgtagcgcgtaaagactgatcaatcgtgatacagttgtccccattgacaagaagggtttactgcattttccttgctgttgccaattcttgcaccagatttaataaagctgtttctgttttt

SEQ ID NO: 15960 - DNA, 2023 bp, Oryza sativa
  ref <308>: DATABASE ACCESSION NUMBER: AK066468
  ref <309>: DATABASE ENTRY DATE: 2001-12-06
gacccgagaagcccctcgcctccggccgcctcccgcaatggcgactcgccgccgctccttcccgctcgtcccgctcctcctcttcctcctggccgccgccgcgtacggacgcctcatctccgacggctcgccggcctcggcgtccgccacctccctcctctccaaccccgtgtcagccgtgatacgcctcaccacctccaactccgcctccgcctcctcgccgccggccgccgccccggaggagaagtgcgagcagtcgtacgggttcctcccctgcaccaccaccgtgctcgggaacctgttcctggtgctcgcgtatgggttcctcatgtacaaggcggccaccttcctgtcggccggcagtgagctgctgctcgagatcatggggcccggcctcgtcggcggcctcctcctccccatcctcggcgccctccccgacgcgctcctcgtcctcgtgtctggtctgtccgggagtagagagaccgcacaaagtcaggtcctgattggaatggggttgcttgctggttcgaccgtctttcttctcacccttctgtggggaacctgtgttgttgttggcaagtgtgacattggtccaaatggcgttgcagttgatttacagaacaacaagggcttcagcttgactggcactggtatttcaactgatgtccaaaccagctatgcagctcggatcatggggatttctgttattccctttatcattgctcaattccccaaaatgttgaagacccaccacggacagcgcctagctgtcttgctggcacttatcgtatcattctcgcttgtgcttgcctattgcctttatcaggttttccagccatggattcagaagaggaagcttgcatacgcaaaacacaagcatgtgatctccggaatcctcaggcatgcccaaatggaagcgctcgggcggctgcttaatgaggatggcacacccaatgaagatgtcataaaaaagttgttccacaagattgacatggatgagagccaaaccctgtcccgtgctgagcttcatgcacttatcattggtatcaactttgaggaggttgactttgacaagaatgacgctgttgacaagatcatggatgactttgacacgtcaggcaatgatatcgtcgaggaggcagagtttgtctcggggatgaagagatggcttaatgaggccaagcgcagcgtccctaccagtggtgcctattccaataagttcatcactgattaccatgcgagaacaaggcaggaacacgaccttctggtggacagatctgacgagacagttgagagcgttgagaaccctggctggtgcatcaccaaagccgtgggactcctgcttctcggcagtgccattgctgctgcattcgcagacccgcttgttgatgctgtccacaacttctccaacgcctcgcacatcccatccttcttcatttcgttcatcgccctcccgctggcgaccaactccagcgaggctgtgtctgccatcatcttcgctagcaggaagaagctacggaccagttcccttactttctctgaggtatatggtggtgtgaccatgaacaacacgctgtgcttgggcgtgttcttggcgctcatctacatcaggaacctgacatgggacttctcatcggaggtgctcatcatactgctcgtctgtgtcatcatgggactcttcacaagcttcagaaccacattcccgctctggacctgtctggtggcgtacatgctttacccgctttcgctcgttgtcgtctacatcctcgacttcgtctttggctggtcataagcaaatgcttctgaacttctgcttcataagctaatgcatctgaactcctgcttttgacggttactttttcttcggtttgatcttgtaaatttatctccctgtaatttatctgtctgcacttcacgctgtgcattgtaacttgtgcctatcctaaggttcccatttgttctagtttatcctgatcttgaacagagatgagcataatatataaattgagagttgcctgaaagt

SEQ ID NO: 15961 - DNA, 1999 bp, Oryza sativa
  ref <308>: DATABASE ACCESSION NUMBER: AK066469
  ref <309>: DATABASE ENTRY DATE: 2001-12-06
ggggaaacgcactgatgatcagtgaccgagaaggcagtgatggcagctgagtccacagcacaggcgccggcgcagccgcacttcgtcctcgcccctctcgcggcgcacggtcacctcatccccatggtcgatctcgcgggcctcctcgccgcgcatggcgcacgcgccagcctcgtcacgacgccgctgaacgccacgtggctgcgcggcgtcgccggcaaggccgcgcgcgagaagctgcccctcgagatcgtggagctcccgttctcgccggccgtggccggcctgccgccggactaccagagcgccgacaagctctcggagaacgagcagttcacgccctttgtcaaagccatgcgcggcctcgacgcgcccttcgaggcctacgtgcgcgctctggagcggcgcccgagctgcatcatctccgactggtgcaacacgtgggccgccggagtcgcccggagcctcggcatcccgcggctcttcttccacgggccgtcgtgcttctactcgctctgcgacctcaacgccgtcgtgcacggcctgcacgagcagatagccgccgccgccgatgccgacgacgaacaggagacctacgtcgtgcccgggatgccggtacgtgtgacggtgacgaagggcacggtccccggtttctacaacgctccgggttgtgaagcgctccgtgacgaggccatcgaggcgatgctcgccgccgacggcgtggtggtgaacaccttcctggacctcgaggctcagttcgtggcgtgctacgaggcggcgctcggcaagccggtgtggacgcttggcccgctctgcttgcacaaccgggacgacgaggccatggctagcacggaccagcgcgcgatcaccgcgtggctcgacaagcaggccacctgctccgtcgtctacgtcggcttcggcagcgtcctgcgaaagcttccgaagcacctgtccgaggtcggccatggcctcgaggactccggcaagccgttcctctgggtggtgaaggagtcggaagcttcgtccaggccggaggtgcaggaatggctggacgagttcatggcgcgaaccgcgacgcgcggcctcgtggtgcgcgggtgggcgccgcaggtgaccatcctgtcgcaccacgccgtcggtggcttcctcacgcactgcgggtggaactcgctgctggaggccatcgcccgtggcgtgcccgtggcgacgtggccacacttcgccgaccagttcctgaacgagcggctcgccgtggacgtgctcggcgtcggcgtgccgatcggcgtgacggcgccggtgagcatgttgaacgaggagtacttgacagttgatcggggtgacgtcgcgcgggtggtgtcggtgctgatggacggcggcggcgaggaggccgaggagaggaggaggaaggccaaggagtacggtgagcaagctcgaagggccatggcgaaaggaggctcctcgtatgagaacgttatgcggctcattgcgaggttcacgcaaactggagtggaataggatatcgcgttaatctcacaatgagacgatgagctttgaagtgaacaaggtttatctgccactactttggaggattctttagttaattcgacgactgttcttcagtttgcgacaaatgtgttcctcggcattgtgattctgctccaatcaagggaagggtatgactagtacagaggctcgcgaacaaacgatatatataaacgaggagaatcagttcatggcctagagtggctacatagtaagactgctgaaaggtcgaaagaataaatgaacttctcagctcatatcttcctaaaggatcaaatctataggtgcggcagaatggctccaagcccaacgacgaactgtattagagcatggccaatagtatagccaacagctgactccacttatattattttatagctaataaaagataactagtacaatagattagctcttatgtaggctgcatctcattgattaaataattaattatacaccc

SEQ ID NO: 15962 - DNA, 2071 bp, Oryza sativa
  ref <308>: DATABASE ACCESSION NUMBER: AK066470
  ref <309>: DATABASE ENTRY DATE: 2001-12-06
tatgtcttttcatttgtaggtaatttgggcgtgtgtcataatctctgatatatgaggaaagagaagaggaaagctgagccttggtcttcttccttcatcgagcatgtgcattatctttgctggtgatgatggtcattcggagcaactagctctcctgaacaatgaccatgaagtttcagaagtttgtgttgaagaaatttcagcggataatacaggacgatctttcctcatcaggatttcagaatctaaagttttttactattggtgtgctgagaagtcaaagaaacacgggatggaccttcttgcaaagatgaaaaatctactgcagggaaggccaacactctctgatctcacaggcatctcagattcacgactggatgcttttgccactcatctacacgcttatcttgttgcatcaagtattggagatgttaaatcgctgggatcacttaatgacttcctgggcgcttcaagcccacaagatcaatatttacagccctcatcagttgtttccaagtcttcacgcttctgcacctctgcagctaatgcagcaaaagcaagttctgtctaccaaactagtctgagtcccagatgtggtgcttttaaagatggagtgccaaggatgtcgtgtgcaaagattgctggaagagacaagctgaagcgacgtggggactggctgagctcatcaactggtcctgatgacgcaaatcttttgacaccgaagattgttagctctgattctgccagtgagaagtgtggtggggactgttctgaaaacagtgctaattcacctcctctagacttgcctctttcatttcccttgttgccatctctgtttcctcttgcgactcaatatccacttcctaaggtttctacagagcaaccatttaagccttactattgctggtgcccaccatgcccatcttctctgcagtacagtgtaacccctctgcatatgccagttacatctgtagaaccactgcccttgccgcctttgagttctctgctatcaaatgatcagccgccgacttcaacagtttctgcaaagatggatacaactgatctcccgtcacttaatcttccatcgatactgcgtgatcctttacttcacctgccgcttcctacttcaccacttgtatccttgcatggttcacaagttccaacattcacaccattgatgtctgaccccattgtgcatgtcccggtcattgatgtgtgttcctctggccaggcttacctggtgagttgcgggccttctatgtctgcgactgttaccctgctccctagcttgaagcccctgattccagaaacagaatctttggttgagagaagcgctagggaaacactaatgaggcttatagcctcaacaccatctgcaagtaatccccagctggtgaacattctccctgcagtccttactgacgtgcctgaaatgaatgtgaggaaacatcttggtgtccatccaggcgacaggctaagctcatcttgtagcgtcgatgtgattggacctgggtttgccgtcacagaggatgatgcatctgttggagatggggctcacgcaacttttgcggaatatgatgatatcggcgatcagcagcattttcagagcatgtaggtggtaggttgtcgacaaggtactcgttggttgtccagaatattttgaaaggcagttgtatctatatggtaatagcttagcgttgggtttacttttgtgacgctctgcgtactgcctatttgctgtgatgatttagctgctcagtcaaaaacctcattaggttggtcaatgtaattagctgtttgtagtgtattcattcataaaactaaaagcaaactacccagttaatttgctcgtgcgtttcaaagattgaaatgtggaatggttatgcacgtgcgtagctcagcgtttttgcttgaagttactgtggtagattggggttttgaaccaaatatgaatgatcaaatgcctgatgtaaccacacgtggcattgtaaaccatgcaaatgtaagggcaagctaattgactgacagcttttagttcacaaatatcagtaagatttccctttttttcagt

SEQ ID NO: 15963 - DNA, 2110 bp, Oryza sativa
  ref <308>: DATABASE ACCESSION NUMBER: AK066471
  ref <309>: DATABASE ENTRY DATE: 2001-12-06
gggactccgaccgggtccgcgccgccgagggggaagggcaaccccagctcgccaaggagcttaacatcccggcgctggtcgcgatcggtgtcggttcaacaattggagctggggtatatgttcttgtcggaacagttgctagggagcatgctggtccagcattgacaatttcatttctgatagctggaatagcttccgcgctctcagccttctgttatgccgagcttgctagtcggtgcccatctgctggaagcgcctaccattattcatacatctgcgttggtgaaggtgttgcctggttgattggttgggctttagtgctggaatatactattggtggatctgctgttgcccgtggcatatcccccaatcttgccttgttctttggaggaccagacagtcttccatggattttatcacgccaccagcttccatggtttgatgtcattgttgatccctgtgccgctgccctcgtttttgttgttactgttttgctatgtgttgggataaaagagagttcagctgtacaagagcttataacagttctgaatgcttgtgtgatgatatttgttattgtagctggtagttatatcggcttccagataggatgggttggctataaagttactgatggatattttccacatgggataaatggaatgcttgctggatcagcaactgttttctttgcatatattggctttgatacagttgctagtactgctgaggaggtgaagaatccacagagagatctaccactgggaataggagcggcgttgtctatctgctgttgcttgtacatgatggtttctgttgttattgttgggctggtaccatatttcgctatggacccagatacgcccatttcatctgtctttgcgaaacatggaatgcagtgggccatgtatattgtgacaagtggtgctgttcttgcactttgttcaactttgttggggtcacttcttccgcagcctagaatactaatggcgatggcacgagacgggctgctgccatttttcttcgccgatgttaacaagaggacacaagttcctgtaaagagcacagtcgtgactggtctctgtgcagcagctctggcttttttcatggatgtttcccagctggcaggaatggtcagtgtaggtacactccttgcattcaccatagttgctgtctcgatcttaatactcagatatattcctccggatgaggttcctctgccttcatctctgcaagaaacattctgtttgagccaagaatatgatgaggaaagggttagcggtattcttggagatgagagatgcaaaacatctgaaacaaaggatgtgattctcgcagaatctatggaggatcctctcattgagaagaaaataacaagaaagatggacgagatgaagcgtcggaaggtggccgctttcagcataggatctgtttgtgttggagttatggttctcacatccgcagcttctgccacatggctgccttttcttcctatgtgtattggctgcatcgttggcgctctgttgcttgtagccggtcttggcctcctctgctggatcgaccaagatgatggcaggcattctttcggccaatctggaggatttacatgccctttcgttccacttctgccagtcttgtctatcctcgtaaacacatacctgttgataaatctgggtggagaggcatggatgagagtaggcatatggctgctgataggcgtcttggtgtacattttgtacggacgaactaacagctccttgaaggatgtcatctacgtccccgtagcgcaggccgatgagatatacaagagttcatctggatatgtgtcctagaaaaaagtattttttagtttgcactattcttcagtgacaacatgcctcacctgtctgcaattggaagattagcctggacagaggagatgctaaatcattcatacttggggaaaaaacatggatgcaatattatatttaggatgtgcataggtgtatatataaacccaattggacagtggaatacatgattttgtgtatataagccctttgtactaaatggtaaactgaaaagcagttatcgatgaaaaaaaagtgcaatagacgaagtactactatacttg

SEQ ID NO: 15964 - DNA, 2532 bp, Oryza sativa
  ref <308>: DATABASE ACCESSION NUMBER: AK066472
  ref <309>: DATABASE ENTRY DATE: 2001-12-06
gatatacttcagtttttgtcttgggagtttgggagggagttcgtgctcataccctcatatctcccctgttcgtctccctctctcggcgtcttcacgttcttcttgggtagaactgtagaagtagaagcaggagtctttaggtgttcttgacgatgctcggctcagcgggcgttgtaatattagagctcagaggacaccattgacaagcagaggaattaggttctacatcaacctgataaattgtgcatcgtgtgatgttctgggcgtttcttgcttcatggcaagcgtaaacactggaggtttacgcctggtgagatgcccaaagtgttataacattctaccagaacctcccagtgttgaggtctacaagtgtggtggttgtgacaccatacttcgagttaaaatccgtcccagcaatggacaaaatgtagcgacgaaacaagtccggcaagactccgatgatttttcggttgctaccaccgcgagcaatggagtgcatcctcaaaagaaggatattgctttcagtggtgctaccatggacagatcccgtacccctgatgctccgagcactgacacagagcatgccagtaatggcacgagcagcaacgataatggccatgctatgtcagttgagaataatgcttctgaagttgcagatactgacaacaaggaagattgcaatttggatggccagaacactagtggaaggatcgaaggcccttctgaagaaataccacccaatgcaaatggcatggatatcgattccgacagagaggaaacctacaatgtggaaggaattgctgagaattcagaggattgcagggtaagaggaggtggagatattgatacagaatgcaacctgagtttacctgagcacgaattgcccttacatcaggagagcaagtcagactccgagctgaaggaagcaaccaaaaccgaagacgaggcaaccaagaaaggccatcttgtgagggtgcaatcccgttcttgcgatcttcgagagtcgcatcgcgcgtcggccggtagctcaatggatttccactctgccaggacttccctccagtccaagagcttcagggcgagcgagccgctccaatcgaagatcatgaagacagtggacgagctgagaggtgacctctctgaatttttcagcaaacctgaagaagaaggagaagacgacgacgatcgcaagccaaaaacagcagcttaccctcctcgtccttcaaagcaagacggctacagcaagcctcgtgcgccgttcacttccagtgtgccactcacggcttaccaccctgcagctaagcattccggccatgtatctcgcctgagcaggtcaggccaagtccctcctcctcctcatcatcatcgtgagctttcctcgctgcgatatcgccggcggcgcagggcctactcgtgctgccacagcgaccagatggagacgatgaggcgaccgtgctcccacgactgctgccattaccatagctgccggccaccaccatgtcaccaccatgaccggccatggaagagccaagaaggcgcgatgcaaaggccgccggtgcaggagacgacgaggcgccgggctccgcccaggcaccactgccggccggtgctgcgcggcgcgccgttcgtcgtctgctccggctgcaaccggctggtccagctgcccaccgacttcgccgtcccgagcaaaggcacgcgccggctgcagtgcggctcctgctcggagatcctctcctactcgtacagggacccggccaagaagaagctccagtctccgtccggcgacggcgaggagtgccagtacagcaccgacgactacgagatccatcaggcggccggcgacgccgacccgttctcgtactcggaggagtacggcgtgatcagctactccaccgaggaggagcagcagccgctgcacgtgtcgaggaactcgtcgttcgacaccgtcgacgacgagcggagcgccaagctgcaccggctgatggggtactcgtcggcgagcgagctgctgcggctgcggcgctcccccgacctgtacgagagcttcggagagcggacgcccgctgcaagaacgagtgacacgaagggcaaggccatctgcgtagctgacgaagaggagcatcccagcgcgaaggtgagaagaggccgtggcttgccgctcccagggatcctgaagaaggggatccatggactggaatccctgaagctcaggtagtcactcgtcaggtcatagcggatgatgtacactactctattttttgaggattaactgattatggccagtttagggaattcagaaacgggcttggttattagggtgctgggatagtgggtaagatgctgataggtgtgatagttcattgtatttgatcattagtttgtgtaaaggttggttttctgtggcaattttgtgtgctttttggtggtggtgtgtgatttgcagtattgttgattgtataggctaaaaaggctacgacctgtgtgcaaattagctgttgtaactattttgagtttttttttaatcttgatagc

SEQ ID NO: 15965 - DNA, 1052 bp, Oryza sativa
  ref <308>: DATABASE ACCESSION NUMBER: AK066473
  ref <309>: DATABASE ENTRY DATE: 2001-12-06
ttgggagggttaagttcaagcccctgctcaacttattccctactatcacaattcacatatgcatgcgcatgaatatctagggctctcatctacatcaggatgctccagcctccaggaggctcaaggcttcttccttgagcgagtcatcatggccatgaaatcatccatgtccacgaagccatcacggttcctgtcaatcttcttcaccatctccctgcaatcctccaggctgcagctgtccccaagcttgtgcagcacctgcatcacctcctcggcgctgatccttccgtcgccgtcctggtcgaacacgaagaacgcccggcgcatgtcccccagcggcacgccgctcttgtgcacctccatgaactcttcgaagtccatgtagccgttcttcttgaagtcggcgacgcagatcatccgcctcgcctcggccgcggcgtcggctttcccgaacttctccaggagccccttcagatccttcctggtgatccggtcgtgctcgccggcgatcttgttgaacactttcttcatctcgtcgtcgtcaggcttgtagatcctcgtcaagtcggagaactgccggtccccgccggacagcagccggccggttggccggcctgcggccttggacttgagcttctcaagattgtacttgaaggtcaaaaggctcagatgagacattttggatttgatttgctgcagctacggatgattgatacgcctaaatgagctcctgattgcccgtcatggaagttcataggttccttgtcctaaacatggctaaggtgcatatatagaatatatgcctgacagctgcagaaagtttcagaatatgtgattcctccagaacttgcagaataggctacctcaaaccagaaagaagggcaaaagatgggccagacaacatgcaaagtaagaatctagtatagccgcttgggataaggaaagagaaagagatgtagaagtgtagaacagaaccaaagctgacttgaaataatttctttccttttctttatcaactataatgataagaacaaaggagtacaattattagc

SEQ ID NO: 15966 - DNA, 1273 bp, Oryza sativa
  ref <308>: DATABASE ACCESSION NUMBER: AK066474
  ref <309>: DATABASE ENTRY DATE: 2001-12-06
ggggggtgatccagtcgcgcgctcctccttccacgcgccaaaaccccagccaccaccaccatctcccgtcccgttcccaccaaaatctccccctccgatttcgcgcggctgcggtggtggtgcgtgtgctgctgccactgacgttgcggcgggagagcgcgatcgatgtctgtgcagtgcgcggtccggccgctcgcggcgctcccggcggcggcgggcacgtcgcgctcgcgccgcgttggcggggcgagccatgtcgctgttgctgccgtgccgtcttcgccccgccggccgaggcgcgctgcctccgtcgcgccggtcagggcggccgagtcgtccccgccggccgcggcgcccgcgccgccgtcgtccggggccgcggccgggaaggccgtcgtccccgacgaggagttcaccctcgccaaggtttcgttcggtgtgattgggctaggtgtcggtggcaccctcttgtcgtatggattcggggcgtatttcaacctgcttcctggttcggagtggtctgcacttatgctaacatatggttttccactcaccatcatcggcatggcattgaagtatgctgaactgaaaccggtgccttgcacaacctacgccgatgcttttgctctaagagaaaagtgtgctacccctatcctcaatcaggtcaggagtgatgttacacgttacagatacggtgatgagcagcacctggatgaagcactgaagaggatctttcaatatggtttgggtggtggaattccaaggcgtagtgcacctattttacaaaacattcgggaagaagtaactgatgatgggaagtacagtttagtacttgtatttgaagccaaagcattggagatatccgattttgagaagagacaggccaaattcacatccttttttggtcctgggattaaggcagaaattggaaaaggtggtgatgatctatatgaagttcgtcttatctcagaaactacttaggaaacacacaggactcgcagtttccttttctgctaatataccagaaaaatgttttttttcccttgttccactaatttgtgtatatgatgttagtattctcagagttctgccattatatgcatcatggctgcttttctgtctactggttatagtctgtgtgacggagaaatagcatttttcatgtgcttttgtgcacatgcacaaatgaaaatgtggctgtaatatgcatgtaaattgactggattcacagagttctccatacgtagtaaaatagtagctgacattattttgg

SEQ ID NO: 15967 - DNA, 1105 bp, Oryza sativa
  ref <308>: DATABASE ACCESSION NUMBER: AK066475
  ref <309>: DATABASE ENTRY DATE: 2001-12-06
gacacaagcgtctcctcctcctcctcctccgcctcatctccaccaccaccgcgagctcgccagcgccacgattcccgaggcccaggagagcgcgagccgccgccaccgcagcagcagcctagctcctagctagccagccatggcgctcgcccaccagaccggcaagttcgaagtcggcgacaaggtcctcgccaccagtgctgtatttggggaggaaatctggccggcagcagggtacggacagaccatgtactgcatccgtcagagggttggccccctctacatgaagatggagaagagatttgggaaatgggatggtgctgctgagctcagtgagaaggagatcatcagggctgagaggaactccggggtgatcagcaacagggtgagggagatccagctgcaaaattaccagaggaagatggagcagaagatgcagagagaggaggatcttcgcatggggctgaggctgtacaaggatggtaaatatgaggaggcattggagaagttcgagtcagttttgggatcaaaacctgagatcaatgagtcttccatagctagctacaatgttgcctgctgttactcgaagcttgaccggatacaagctggtatttctgcactggaagatgccctgaaagcaggttatgaagacttcaagagaattcgcaccgacccggatctagaaaacttgaggaaaactgaggaattcaacgtcctgctgaacaagtacgacgaatcgttcatcaatgagaatgctatcaacgccatcaaatccttgtttggattcaacaagaaatgagcactgaactggtcatggtggtaggagatattgcatcttttctccagctgcagttgaacacttctgaagctttgctaggctatatagcacttggcaaacacggttcaatttttctccctgccattagttcacacttcacacaccagtagttttagctattcttggtgagattctgcagaacggtttcagtcttccctcttactgtaaccagtcgatggagatacactttgtaaattcaagcaaccaaatgttaaggaaatatattgtgattgtgcttataaatttatcccaaatagtatgttacgc

SEQ ID NO: 15968 - DNA, 2544 bp, Oryza sativa
  ref <308>: DATABASE ACCESSION NUMBER: AK066476
  ref <309>: DATABASE ENTRY DATE: 2001-12-06
ggcgtgcttccccctctctctctccgcacactctaaggcgcgcagcagcatcccggcggcgtcgtcatcccgtcgccaagtgtcgacatcatcgtcgcccctccgccggctccgctccttcgcgccgcccctcctcgccgcctattacatctagggaaattcatctcggatcaatttttatcacttgagagtttgcgtgcagcgtggtctatgttatgcatttgtttgcacataaaaaaacaggtccttatccccttgaaacaagattagctgaacaatgcctcaaaatacttatgaaagtctttcttctttacatcgttgtttttttcggtggaaaattgttattttccttacataaaaactctatttctacaatcacaagcatgggcttttactattcgtgtagtctgtagatagtgcttctgtcatacaacttgttcaatggaactctgtagtcgctatgccccttactcttaaaaagtgcaataaatagaattttaagagagaagcaaaggccaactgccctgtttgcttgcccttaagtgatgtgttattgtgatatttgaattatttttttctttcgttctggaaatactttcgttagtattattaggtctttccatggtatcatgtctgacctactagcctttcatggcacagtatagtatttttacttgtttggaaccaatatccttcttatgtaccagaacataatattgtccttatattctggcaggactgcttataatctggcacttcacgaacatgggccaaagctctatgacaaactgacagaagacatggaagatcacctgcaagaaatgtgcgtatcgattgaggctgctcaaggtggtttaaaaattatagataggttcagtcaagagagtaccttgccctattatttgcttccgtttgtatgggagaacatcttagcttgcgctttaattgttgcagcagagtgaagttataatttcaggcttcgttccaaacagctagcgtgtataccacagcactctatggttggtggcagcaaaagatggaaggaaaaaacgtattagcggatggtgtgatggtgccgtacttgttcatcagagaaaactaacaagtccacggcgaagctggggatttaactggcattcgtagatttcttggatttgggattggtttgcagcctgattcagactatatggacattggagggtgaagcttgttttatgtgcaggggtgcttttggaggcagatacggtcttcatccacccgacggtagatccgagcatgtgcatttgtggcggtgcgaggcagcaggcagcggccagtagcccgagaaccccgacctcgatgccctaatgggcgtcacgccatatgtgacggagatacgcgacgaattgggggtgagccagggagactgcgcgaaccatgatcttgcgagttgcgagcgctgggcctggccaccgttttcaggccgttgggcaagctaggaggcaagaccttggagacgggaagctgatctacttctccagtctccagttatgtcttgcaattcgtaactcccttcttggctgcggcctacagccctacagcgagtgagtaccacaagttgtggcttatcggcaatgaatgagatcctatctggagccgtataggtgatgatttatcaggatgttttatttgtgggcattaccgtcttccctctttcatggacggtatgatgaggaactcccattgtgcaagctcttcagcatgcctaattggctctttctgcaaatctactcaacatattatcacactcttcgcaccaaccacgcataggccttcatgaaacaagacagagtgtacttttcgacgaaatactccatagatcacatagcgccactcatggacagcgcaacagtggatatacaagttcaagcattggaaggcccttcaatcacaatggttctccacacatcaacggatcatcgttgcaacttaaaagatggatggacagactttgcagtaaacaacagcatgaggttgctcactatgcattttcatttctacaagaaaagcatttgcaagcaaccatagatatcttctgaagaccgtactggccctgccatacagtccttttggtgccatcagggttcgctctccatgaaacgtgatgctaatatcttatgatatcaatatggtgttaattagccttgtgccttataaggccatcgtgcagactgcacttgtaaatctactatgccacccacatatttagccactgttataaggaccaaataggcaacatccttatctatatatggacacctgagtaagttaacatggtcacctgctatattgctttcaacctgtttctttttcagtgtgcaagtataacaaccggattgttgctattcccaacatgtacgtgcaggcggcgcaccattggcgcgtcccaccctctagtacaatgtatcagacaagtcattcagactagaatgtatgaatggcaacttgagcctttgctgcttgctgaaattgctgaaatggtaatgaatggtgtcatgttgtttt

SEQ ID NO: 15969 - DNA, 1931 bp, Oryza sativa
  ref <308>: DATABASE ACCESSION NUMBER: AK066477
  ref <309>: DATABASE ENTRY DATE: 2001-12-06
gactttttgcccatggcctcttgccatgcattcattggcttgtcgaagctacaagagcactagcagagcaacaagaggaagcctgcagccacgctcctcctggatctcctcacgatgggttcgcatcgtcaccgcagcgcagggcaatgcagcctcgtgcagccgccacgcctcatcacctgccttctcctactgctgcttctgcttctgtcgccaccggcgctcccgtgctcggcgtcgtcgtcgtcgtcgtcgtcgtcggtgatcactcacctcccgggattccatggtcgcctgccgttctacctcgagactggatatattggtatcgaggagaagactggcactgagctcttctactacttcgttgaatcagagacgaaccctgacacggaccctttggtattgtggctggtgggtgggccccgttgttcggccttctctggcttagcctacgaagtaggtcctttgaattttgtgttggaagcttataatggtagtttgccaagattggtttataatcagtattcatggacacagatggcaagcataatttttttggatagtcctgtcggttctggtttctcatacgcacgtgattccaatggttacgatgttggggatatatcatcttctttacaagtggtcacatttatgaaggagtggctcaatgatcacccacgctaccgctcacataatttctatgttggtggagcctcatatgctggaaaggtggttccagttatcgtgcaatacatttcagaagcaattgaagaacaaaggcaacgaccattgattgatcttaagttacagggatatatagttggcaaccccataacaggttcgaaattcgataaaaatttccatgttccctattctcatggcgttggaattatatctgatcaattatatgaggctgcggtaacgcattgcaaaggagattttgtgaacccaacaaaccaattgtgtgctaacgtcgtatatactattaataaactcatgtctgaagtttcggatggaaatatcttggaggataaatgtgttaaagctgcaccaaaacctacaatagatgtttcagcaagcagggcactgctggaagaatacagccggctaagcaagccacctattcgaccttctatggattgcgcttcatatggttactacctatcatactgctggatgaatgacaatacgactagagatgctcttaagatcaagaagggaaccattggtgagtggttaagatgaaatagaggtgtatttccctatgctaaagacatcccaaacgccttggattaccattttaatctcaccacaagaggttaccgagcacttgtgatgagcggtgaccatgatctcaaggtgccatttttgagcactcaggcatggataagatcctttaacttcttcatagttgatgactggagagcatggcatgtggatggccaagctgctggattcacaattacgtatgccaacaacttgacctttgccacagtaaagggtggttcccatgtcgctacagtaaacaggcctaaataatctttcgccatggggaaacggtggctagccaataagcctctatgatgttgccagctcctatttgtcagaaatgtttgcagggttttaactcaaccatgtgtctgctgtccaagtgccatggttctcgaaaaaatactatttgtaatggagcccatataaatagtgttctcttctgccgaaaggcaggtttcacttaaagtgaaatggaaaacacaatagttatatattaatttctctcgaaaaaatttgatccctactacacatccattgggttctatttataggtttacaaaaatagtgttctcttctgccgaaagacaggtttcacttaaagtgaagtggaaagcacaatagttgtatattaacttctctcgaaaaaatgtgttccc

SEQ ID NO: 15970 - DNA, 3206 bp, Oryza sativa
  ref <308>: DATABASE ACCESSION NUMBER: AK066478
  ref <309>: DATABASE ENTRY DATE: 2001-12-06
actatggcagatttattgatcttgctagtgaggttgtagacaagcatcgtattatatttattagtagtgctggaaacaatggtcctgctttaaacactgtcggtgctcctggtggtactagttcaagcattattggcgttggcgcttatgtctcaccagctatggctgctggagctcactgtgtcgtacaagcaccagctgaggggatggagtacacatggtctagccgaggtcctactgctgacggggatcttggtgtctccattagtgcaccgggtggagcagtggctcctgtaccaacatggacacttcagtctcgcatgctcatgaatggaacttccatgtcatcaccttctgcctgcggtggggttgctcttcttgttagtgccatgaaggctgaaggcattccattaagcccttatactgtgaggaaggcaattgagaatacagctgcatcaataagtgatgtgcctgaggagaagctaaccacagggcatgggcttttgcaagttgatagggcttttgaatatgctcaacaggctaaggaattgccacttgtttcttatagaatatcaatcaatcaagtgggcaagccaacttctaaacttagaggaatatatctacgtgggagtaacacatgccggcaaacaagtgagtggactgttcaactagacccaaaatttcatgaggatgcaagtaacatggagcaattagttccatttgaggagtgcctgcagctgcattccactgatagctctgtcatcaaaattcctgagtacataatggtgacaaacaatgggcgcactttcaacattgttgtaaatcctgttaatatcagcagcggccttcactattatgaagtttatggtatagattgcaaagcaccatggcgtggacctattttccgcgtaccaatcactgtaataaagcctattgctctatcaggagagccacctgcattgacactttcaaatctttcctttaagtcaggtcacattgaaagaaggttcataaatgtgcctattggagcttcatgggtggaagttacaatgcgcacatcagcctttgatactcctaggaggttctttttggacactgttcagatctgtccactgaagcgacctattaaatgggaggctgttgtcactttctcttcaccttctctcaagaatttcagttttcctgtagaaggtggcttaactttggagttgtccatagcccagttctggtctagcggaattgctagccatgaacctacctgtgttgattttgagattgtgtttcatggaatatccgttgatcagaaaataattggccttgatggtagtgaggcacctgtgcgtgttgttgctagatctctattagcatcagagaggcttgttcctgttgccactctgaacaaggtcaagaccccttatcgaccagtggagtctaatctttgttcacttcctcccagccgtgatagattaccatctggcaagcaaatcatagcactaactctgacttacaaattcaaactagaggatggtgctgaaataaagccccgtgtgcccctacttaacaacagaatatatgataacaagttcgagtctcagtattatagaatatcagattcaaacaagtgtgtctactcttctggtgacgtctatcctaattatgtcaaactctcaaaaggtgaatacacgctgcaattgtacataaggcatgacaatgtgcagttattggagaaactgaagcagttggttctatttatcgagaggaagctagagaaaaaggatttcattcaattgagtttctactctgaacctgatggccctacagttggaaatggcaccttcaaatcctctattttagttccaggagaaccagaagcattctatgtgggtccaccatctagagaaaaacttccaaagaatgttctacctgggtctgttttggttgggtcaattacctatggtgcggtaagctctttcagcaagaaagatgaccaaaaccagcatgctccagcatcttatagtatctcgtatctcattccaccatcaaaggtcagtgtaccagatgctggttccctttttgtttcactatcagcattgctgtttttgtggtcttgtataatatgctatactgcaagttcaggtttaaatccgtattcaagatcatcataggaccctaagtattttccctctgtatattttcactctcatcattctatttcatattcaacttatatgatgattgtctaagacttgcaggttgataatgataaagaaaagggagtttcatctggaagaaagagtatttcagagagattggatgacgaggttcgagacaccaagataaagttcctttctggctttaatcaagaaactgaggatgacaagtcttcttggacggcacttgttgcttctcttaagccagagtatcccaagtatacacctttgcttgccaaaattttggaatgcatagttcagaaagcaacttcagatgataagtttagccatcaaaaagagattatagctgcagctgatgaggttgtggacagtattgataaagaggatctggcaaagtctttgtcccttaaaccagatcctgaagatgaagaggcacagaaaaataagaaaaagatggaagaaacacgagaccagttggctgatgcactataccaaaagggtcttgcattggcagagattgagtcgctaaagactgatgagtcaactgaggcatctgctaaagatgtttttgaagagaattacaaagaattaattaaatgggttgatgccaaaactacaaaatacggctctttaactgtcctgcgtgagaggcgctgtggaagacttggcactgcattgaaggttctgaatgacatgattcaagatgactctgagcaaccaaagaaaagactttatgatttgaagatccaattgattgaggagataggatgggtccatgtatcggcctacgagaagcagtggatgcatgtccgatttcccccatctttgcctccgttttaattgttaggactatttttcactcatttttcatcaccatggattcagtattttactatttttgtcattgttggtagcaaacttgctggtttggtagtttttcactaggtattttatttcttcaaatggtaataagaacttaagaaggctgcctgctactgctaagctcatcggtttgtgcagttttgtctgcttgtc

SEQ ID NO: 15971 - DNA, 3292 bp, Oryza sativa
  ref <308>: DATABASE ACCESSION NUMBER: AK066479
  ref <309>: DATABASE ENTRY DATE: 2001-12-06
gtgtattccacagtacacgcgaccttgcctgcaaaggggaggagggcgagagacggcggcgatggtgatgccgcggctgcaggagctgaaggagatcttcgacgtcgcacgaggcaaggtttgctaccccccgctctgcttgcttgtgacagctccttcgttggcgcggcggtgaacccggtgattcttgacctggaggaatctctactggccaaggttctcggcatgaacagatttcttcttcgggaacatgacgcttgaggaggaggtcacaatccgggtcagcaagatgaccgcgagcgtgttcaaggtcttcgccaccgcggcgtttggtgcgtcgagttattatgccctcggcctcgaattttggcatggctggcaatcacattagtttggaggagatcacagagtatgagagtgtgataaccaaggagtttagaagcgaggatgaaggatataagttctataatgattatgcttggtcgaaaggttttagcatcagaaaggacaatgttaggtacaatggagatggtaaggtggtctggaggcgtttgtgctgctcatatgaaggctataggttgttgaaatactttgaaagaacagaccaaattagggagccaagggccctgacacgttgcggatgtgaggccaaacttgagatacagttgaatgaggagatggggatttggtttgttaaagatttcaacgatggtcatgcgcacccacttgcaaagcatgaccaagtggcattcttatgatcccatcggaatctaagtgatgctcaaaaggctgaggttgtagaactcggggtcagtggccttcgtacatgcaatataatggacgtcatggagaagaatcatggtggttatgatcaggttgggtttgtgtctcgggacttgtacaacttcgttgctcgttacaagaaagaaagaattgagggtatggacactcaatttgcactgagccttttgaacgaacagaaggaaagagatgcagaatttttctttgagtacaatactgatgccggaggtcatctgaagaatatgttctaggccgatgcacaatctcggatcaactatgacgcatttggaggtgttgtggtttttgacgccacttaccgtgtcaaccggtacaaccttccttttgttccttttattggtgtaaaccatcaccgtagcacggttgtctttgggtgttgtctgctctcagatgagacggtttcttcatatgtgtggctgctggagaccttcattaaggcgatgggtggcaagcatcctagatcgtttatcaccgatggggacctttccatggcaaacgccatcgccaaggtctgtcctgatgcagatcatcggttatgtacatggtacattgaggagaacgcaaaacgccatctccatggggatgcgctcaccaaatttcgtagactcgtctacgaagtaatgaaggccgatgaatttgagagacgatggtgtgcctttaagaacagggataatgtgccggagaaggagttatggctagccatgatgtatgcgctaagggaaaagtgggccgcggcgtataccgatgggagatatttcttagggatgaggagcaatcaaaggagtgagggtttgaactcaagaattcatagtcatctcgacaggaaaatgtcactgatcgatgtcatagagcatttcatgtgctgtgtgtcgcgtatgcgtagaaatgaggctgagatggatgctagagcatcacaatcggtaccattcactaaaattagtgctgcacgctttttcacccatgtcattttcagggaggtaagggcagagattcggaagatttgtaaatgggtgattttggaggtgaggcaactggatgaggctcgaaggtacagtattgcttcgaaatatgaccataaagtgcatggtgaagtgagttgtagttttgatggtgcattgttgatgggcgtgaagtgttactgtcagatgatggatagcaaagagataccatgctcacatatatttacagttctgaagtatctccgaattgacattattcctcagtgctgtgttgcggttagatggacattgcaagcgaaggcagcgttcccttcaattagaactgcaaatgtgcatgagtggtccgaacagatggatcagtaccgccttctccgtaacatagctaatgaggctttagtcaaagcttctttgagttttgagaggtcacagcaagtcattgatttctttgaaaattttatgcgggaaggtgccgagaacgagggtagcgttaatgagacaacacttggtcctttgccggcgcacttctcagcgtcgaaccaacccagtggtgagagagtcctcgatccacataagattgttcctaaaggaaggtttccttctaagagattgaagccgtgccgtgagtcctacgcaaataagagggcttcacactaaaccttttcttccaacattaatgtgactttttaatttttgcactttattatgttgattactggaacacaactagtgaaacacagttatggaatagaatgtgttgcacgacaggggagggctgtgcttctgtgtatttccaacattgtctctgaatctgttcatgtagttgttcaagttttatgcttatgacagattggtggtttatttacgactgtggctgatagatgttttaggtacaatagataggccattcctttttcaacttatctcaaacaaactcttaacattcagaagttggtgctttactgaggcacttaatttattttacatgtgtacagaggcaaataagctgaaatgctttagaactataaaacaattctttgacagaaacattacagaattgaacttgatttattccaatttcagaaaattacagaattgagctgcctcctgtgtcctaacttgactggttgctgcttggtttctgaaattaggtcctggatgaagatcatggagttgtggtttaccctgtctggtggtcagtagctcctcctgcagttcaacgttggggcgacgtccctgggcagcataactgtggcgcacctggctgccctgagatgattccgacggaagcacacagttttgttgattgcgttgcaaggctgcagttcattgctgattatttattattaaaggagtgtaatgaacaaataaatttagtggcctttttaaatattaggaataaatgatctgcaactagaatggtgacttcattttggtgatggttgtgtgatgctttaatggtgctgttggctagaatgatgctgtcgttgattctggaatgatactgctattgttgg

SEQ ID NO: 15972 - DNA, 3361 bp, Oryza sativa
  ref <308>: DATABASE ACCESSION NUMBER: AK066480
  ref <309>: DATABASE ENTRY DATE: 2001-12-06
gaatcactccaccgcctcctccttcccctcccctcttcgcctcgtccgccatggacgcctcctcctcctcctcctcaacgccgccttgcagcttgtctggctacggtggcgcggcggggattctcccgaggaggaggaggtttcacatgaacatgacaaaagaatcgtaaataataaggcccttggcacatcgacagacttgttagatgacagtagctattcatctcgaagaactcatgaaaatgtcttttcagagccatctgtttctggaagaatgactgtggatagaacggattgccaaactgatgttttttctggtgtagatactgtaaataatacaacacaggttggttctgtaattagtacttacaggtcgttagacacatttgaaggtgtttatggaccagcaaacacaagttccatagaaaaggtccaagatattctcccacaatcgcgttctgtgtctgatggacaacatcaaagcagacattttgctaacagaagggctcagctaggtggactgcctcatcagtttttatcactttcaaaacagaacgagcagactaaaaatggccaaggtcctcctgataataaaacagatagtgagggtgccaatttacttggatgccatcaaagtgatcaaggagactatgttgattttacgtctctttcatccttcaaaagaatcaacgagcatccactgaattttattcctgaagcccatgccagcaatctgtttgaaccaagaaaagcatccgagttcacaaattcttatgcagggggctcatatttgagagcagggcgattggttccagttgcatgcttaagggatggtcctgtgagtaaacaaaagaaagcaatgaatgaccatgatgatgcaaagttaattggctggagtatttctaatttactgagcaaggagaatccagaaaactctacttcagcaaatagagctggattgaggggaacaaaggacgtgccagattacttgaggagatacaatagtttgttaattgatggaagattgaaagactctgtggatctattggaaagcatggagcaaaagggattgcttgatatgaataagatccaccatgctagctttctgaatgcctgtaagaagcaaagggctgttccggaagctgttcgtttttgcaagttgatcaataacccaaaaatgagtaccttcaatatgcttttatctgtgtgcgctaattcgcaagattttgatggggctctccaagttatggtgctcctaaaggaagctgggctaaaacctgattgtaaactttacacaacacttatatcgacttgtgccaagtgtggaaaagttgatgctatgtttgaggtcttccatgagatggtcagtgctggaatagagccaaatgttaacacatatagtgcactgattgatggctgtgcaaaagctggtcaagtagcaaaagcatttggtgcttatggtatcatgagttcaaagaaggtgaagccagatcgagttgtctttaatgctttgatcagtgcatgcggtgaatctggagcggttgctcgagcttttgatgttctatcagaaatgacagcagaagcctctgaatctaaaggatccaaaccgattcttcctgatcatgtcacagttggagctctgatgaagacatgtattcaggctggccaggctgatcgagctcgtgaggtatacaaaatgcttcaggagtacaatataaagggtactccagaagtttacacaatagcattgagaagctgtagcttgactggtgatttaggatttgctctgaagatctatgaagatatgaacaagattggagtacaacctgatgagatgtttctgagtgctctagttgatgttgctggccatgctaggagggctgatgctgcctttgagataatgaaagatgcaagagcaaagggatatcaagttggaaccattgcatacagttcattaatgggtgcttgctgcaatgccaaggactggaaaaaggcattgcagctatttgaggagatcaagtcaatcaaattaatgccaaccgtttcaatgatgaatgctctgatcaccgcattgtgtgatggtgatcaagttttgaagtcttttgaggtccttagtgagatgaagagattaggagtctgtccaaatatgataacctattcggtgttatttgtggcttgtgaaaggaatgctgaagcacaactgggtttggatctatttgaacaattaaaaatagacagtattgacctcaatcccacaatcgttggttgtcttactggcttgtgtctacaaatgttcgacaatgatctttcactgggcaatatcgttgtcacattcaacttagggaaaccacagattgagaacaaatggacctcctcagcaattaaggtctaccgtgaggcaatttccacaggactattaccctcaagtgatgttttgtctcaagtgttgggatgtttaaggtttcctcatgataatacattaacaaatactttcattgaaaatatgggaataagttgtgatattccacatcatcccaatgtgaattcactgttggaaggttttggtgaatacgacattcgtgccttttcaatactggaggaagctgcttcgttaggagcagttgaaagtatttccatgaaagatacccgtattcttgttgatgcccgaaagtcaaagatctacactgcggaggtttcagttcttacaacattgaggtctttaaagcatcgactagctgcaggcgcaaggttacccaacgtgacaatattattacccacagaaaagaaacaagtcggccttgatgaaagggagaagacacttaaacttgctggaagagtcggtcaagcagttggttccctgctgaggagattaggaatcaaatatcatggcgaggagtctcatggaaaaatgaggatcaacgggcttactctaagaaggtggttcaatccgaaattgacgagcacatcctccactggaacaccagctgacttgcttcctctgccgtcacgattagccaaaggaattgcagatcagcagcgcaacatcagaaacctttctcttgagtaatccatgattgaccttcctttctcgtggatcaatttttgcgtaccatcaagcaagggcaagagaaaaatcttagaaaccacccagaaaatagttcagcttgataaaatatgtaaagagtttctttgtttacaggaaatttatatatcatacatagacacttgtgtgcatcagattgcacaaacgcatatcaggatatagatcttcagctgcttttgcagatgaatttgtcttccatcttgtaacatggtgccaagatcacattgaaaataagaatataagaatggcgtggctgtg

SEQ ID NO: 15973 - DNA, 2417 bp, Oryza sativa
  ref <308>: DATABASE ACCESSION NUMBER: AK066481
  ref <309>: DATABASE ENTRY DATE: 2001-12-06
gcgtcgctgcacgacgtgcggctgcagccgggcaccgtgtactggcaggcccagcagaccaacctggagtacctgctcctcctcgacgtcgaccgcctcgtgtggagcttccgcacgcaggccggccttccggcgtccggggcgccctacggcgggtgggagggccccggcgtcgagctccggggacacttcgtcggacactacctgagtgctactgccaagatgtgggcgagcacacacaatgacactctcctggcgaagatgtcatcggtcgtcgacgcgctccatgattgccagaagaagatgggatcggggtacttgtcggccttcccctcggagttcttcgacagggttgagtccatcaaggctgtttgggctccttactatacaattcacaagattatgcaaggtcttcttgatcagtatacggtggccgggaattctaaggcccttgatttggtggtcgggatggccaattacttcagtgaccgtgtgaagaatgtcatacagaaatacagtattgagaggcattgggcttcactcaatgaggagagtggtgggatgaatgatgtgctctatcaactctacacgataacgaatgatcagaagcatctgactctggcccatctttttgataagccatgttttcttgggttgcttgcagttcaggccgacagtatttcaggcttccattccaatacacacattccagttgttattggtgcacagatgagatatgaagttactggtgatcttctttacaagcaaattgcaacgtttttcatggataccatcaattcttctcatagctatgctactgggggcacatctgctggtgaattttggaccaatccaaagcgtttagctgatactctgagtactgagaatgaggaatcttgcacaacctacaacatgctcaaggtttctcgcaacctattcagatggacaaaggaattatcatatgcagactattatgaaagggcactgataaatggtgttttaagcatccaaagagggactgatcccggggtgatgatttacatgctacctcaggcccctggacggtctaaagcggtttcctatcatggttggggaacaaagtatgactccttctggtgttgttatgggacagggatagaatacttttcgaaacttggcgattccatttacttcgaggagaaaggagatagaccggtgctaaacatcattcagtacataccaagtgcttataactggaaagcagctgggcttactgttaatcaacaactaaagccaatcagctctttggacatgtttcttcaagtttcactctccacttctgcaaagacaaatggtcagtctgccacattgaatgtgagaataccatcatggacatctgccaatggcgcaaaagcaactctaaatgacaacgatttaggattaatgtctccagggtctttcctttcaatctccaaacagtggaactcagatgatcatttatcactacagttccctattacactaaggactgaagcaataaaagatgatcggccagaatatgcatctcttcaagcaatcctattcgggccatttgttctagctggcctgtcaactggtgattggaatgcagaagccggcaacaccagcgcaatttcagactggatatctccagtcccttcatcctacaactcacagctggtgaccttcacacaagaatccagtgggaagaccttcgtcctctcgagcgcgaatggctctctcacaatgcaagaacggccgacggtcgatggcactgataccgccatccacgcaacattcagagtacaccctcaggactcagcagggcagcttgacacccagggtgcaaccttgaaggggacctctgtgcagatagaaccatttgacctcccaggaacggtgatcaccaacaaccttacccaatccgcgcaaaagagttcagattccctcttcaacattgtacctgggctagatggaaacccaaactcggtctccctcgagctcgggaccaaaccgggatgcttcctggtgataggcgtggattactccgtgggtacaaagattcaggtcagttgcaagagttctcttccaagcatcaacgggattttcgagcaggccgcgagctttgtgcaggctgctccattgaggcagtaccatcctatcagcttcattgcaaagggggtgaagaggaacttcctgcttgaaccattgtacagcctgagagacgaattctacacggtttacttcaaccttggggcttgaaccttgaaagaggttactcattagtagaaagaatcaagaattcagaataatggttgtccttactatactgtaatttagaatatgcagccaaagaggaaacgttttgtttcttctgaaattgtaggataatttttactgagttcagtgcaatgttgtgc

SEQ ID NO: 15974 - DNA, 2552 bp, Oryza sativa
  ref <308>: DATABASE ACCESSION NUMBER: AK066482
  ref <309>: DATABASE ENTRY DATE: 2001-12-06
cctcttccccctctccctccttcctcaaccacgtcgccgacgaccaccaccacccaccaaatcacgcatctccccactccattgccaccgcctcacgcttctacccctctagaaccttccagaacaatccagtatcccctctcctcgcctcctcgagatcgcgcggagagggaggcggcgtcgtcgcttgatctgtcaggaggaggaggaggaggagggtagtgtgaaatcgggggatatggtggtggcggcggcggcgaggccgcagacggcggaggcgctgtcgaagcgggcgagcatgctgcgggactcgctgcagaggagccaggggaacacggacgggatggtcaccatcctcggatccttcgaccaccgcctctccgcgctcgaggccgccatgcgccccacccaggtgaggacgcacgcgatccggatggcgcacgagaacatcgacaagacgatcaaggccgccgatggcatcctctcccagttcgaccttgcgcgccgggctgaggcagcggtattgaagggtcctcatgaggatttagagagctacctggaggcagtggatctgctcaaaggcatcgttcgcttcttttccacaaacaagaacttcaagagcagtgaaggagttctgaatcatgtcaacaacctgttggctaagtctgctctgaaaattgaagaggaatttaggcagctgatgactacgtacagcaaacctattgagcctgatcgtctctttgattgtcttcccaagtctctgcggccaacaaaagatgatcctgacgctgatccagggaatgctggccactctgagcatccatccaaaagcttggagactgcagtataccggacaccaacactaattcctccaagaatcctgcctctcatgaatgacatcgctcagcagctcattcaggctggaaatcagcagtcatgctataaaatttacagagatacccgtggatctgcactagaatcgagccttcggaaattaggagtagagaagcttagtaaagaggatgtacagaagatgcagtgggaagctttggaggctaaaattggaaactggatccattttatgcgaattgcggtcaaactactactagcaggtgaaagaaaaatctgtgaccagatttttgatggtgtcaactttaacaaggatcaatgttttgctgaactgacagcaaatagtgtcgtgactcttctaagctttggagatgccgttgctaaaagcaaaaggtctcctgaaaagttgtttgtattgctagacatgtacgaagtaatgcatgaacttcaacccgagattgaggtgattttcgaaggaaaatcatgctctgagatgcgggaggcttcattgggcttggctaagcgcttggctcagactgctcaagaaacctttgctgattttgaggaggctgttgaaaaggatgcttcgaagactattgttaatgatggaactgtgcatcctttgactagctatgtgattaattatgttaaattcttatttgattaccaatcgacactgaagctactatttcaggaatttgaaactggtagtgagacagaatctcaacttgctgttgttaccatgaggataatgcaagccctacaaaataacttggatggaaaatctaaacagtacagggatcctgcattgacctacttatttctgatgaataacattcattatatggtcagatctgttcgtagatcagaagcaaaggatatacttggtgatgactggattcagaggcaccgtagaattgtgcagcaaaatgccaatcagtataaacgtgttgcttgggcaaagattctccagactctttccatacaaggtgcgggcagcactggttcatcagatcttagcagcagtggggtttcaagagctatgatcaaagaacggtttaaatctttcaacatgcaattcgaagagctccatgcaaagcaatctcagtggattgtacctgatcaggaattgcgtgaatccttgaggcttgcggtagctgaggttctgttaccagcctatcggtcgtttgtcaaacgtttcggtaaccttgttgagaatggcaagaacccgcacaaatacgtgaggtacagcccagagatggtggagcagctgttgggggaattcttcgaaggacagcaatggggggagcagaagcgctgagcagtgaacactgtccatgagcgacagcacgagctctaccagtaagttgaagttgtacatcagcacgacttgcaaagatttctttcccggacaagcaactaacgattctttgcgttataacgtattgtcataccgatgcgctaccgatgtatatatatataatagtaacttcagtttgcctcagtgctgaatgccaaacacggcaacaggtgaagaggcgtgtatctctctctgttctcacaacacaccgatgttattattgttttgtttttttcccgatcacagagttgtactcttctgtagaaaatattgcttattgcagtgagactgtactattgggatcgaaaggcataataaaggggacaagacaatgttatgttcc

SEQ ID NO: 15975 - DNA, 2668 bp, Oryza sativa
  ref <308>: DATABASE ACCESSION NUMBER: AK066483
  ref <309>: DATABASE ENTRY DATE: 2001-12-06
gactccagccggcggcgagacatctgggagtgggaggtaaaaccctagctagatccgatccgaaccgaacaccgaactgcggcgcggcgacatggaagaaggccggggatcgccggagccggcgggggcggcggactggattgtcctcgacccgtacgtccgctgcagctggcggaggaggcacaagtacgaggaggaggacatcacggcgtccaaggtcggccggacctgcaccggcttccccgtccgcgcctccctccgcgtcgccgacccgcccgccgtctcccgcctctacctccactgccctccccagtggccggccgacctccccgaggtccgctaccccgacgtcatcgccgcccaccgcggctgcatcctcttcgtcgccgccgtccccttcgaggaacccgggttcaacgtcgatgggcactaccccctcgactacttcatctactccgcctccccctcctcgcagccgttgctcacgcggctgccgccttgcttcgtcggcggcttcaccgaccaggaggaggacgagttgtaccagccgtaccaccagcagcggcagcgctacatgtgcagccgagacgtcggcctcctgtgccgcgacggcgacggcgacggcgaggacggccggtcgctcttcactgtggcgcacctcacatccagtgggagcaaggaggtggagctctgtgttgtgcaatcaggggaagcggaggagtggagcatcactcccctgcgtgtccgtcgcgccatgagcatgctcggcctcaacctcggcgagtggaggaccgacgccgtgctccccctccacgaccgcttcctgtgctgggtcgactactaccagggcatcctgctcatcgacgtcctcaaccctggggacgagccacatcaattcagcttcatcccgctccccaaaccggtgagagatggcagcacccgcttgttcagccagtcctactgcgccgacccagttcgctgtgtttgtgttagaggtagtagtgacagtggcttcttcatcaagctggtctgcgtcaccattgccgccaccgcagacaaggatgtataccctcctgctttcaccatcacggcatggactctggtcagcatcgaccaaaagacctgggaactggattttacaatggaagccgccgagttctgggatctttgtgctaattccgtaggtcacacctgtgctcttccgcgtgctgtgccgactttttctcacctgagcttggttgatccaggtgtcgtttccttcctgctcatggaaaagatcgatgatgagttcctgttttggatcgttgagttggacatgacaaataaggtgctgcggtcactgcccaccctctacatccaggtggaagaagaagaagaagatgatgatgaaataaagaaagtgcaagaggtacaaggaccctcccgttgcaaggcctataagagagtctttcacggcgaatacttcttccccagccacttcacctcgtatctgagaaagaatcccatccaaaggttcgatatgtgtcccttctgtttggttatattctttaggttagcactggctactttgtgtttgttttccaacataaagggaacacgttggttaaatggctagcaaattggctgtattgaaacatagcatgtctttatgagctaaatgactaactaatagtacttcggcgattgctttgctgtgtcgagacatgaacatatttgtctgaacgccatgctattttcctgttaacgatgattcaagcagtaactaacttggtgttatccttttgtactcttctataatacgttgtcattgcctcttcagtaaattgcattacattctctattttctgtgcagttcaactagtagagcttgtcatttcgtgaacgttgtactgatttgccagcacatgaccttaataaatttggtcctaagttagtcttggtacgaattaccaattataaacatcacagcttgatataaaagaaaatgatgattgcagtgtcaaaaactacagctcagtctgatgaccgtttgctctgctgaaaagcaaaatttaatactgggcattaagacagccaactgaacaagttcacactttatttgactagtgtgtcttatgtacatatgcttcttttatcacaatctggagctagttgcattaatcatcttgtgtttttgctgctttaccatttattttggtgtagtcggctacggagtcaaatgatgcagaaggcaaagcaagagagcgtaatgcaaaagaaacaagtgaatgtaatgcaagagattccagactgcagtacacgttgacggattggctcgtctctgcgtcggcttatcacgaagattagcacagggcgctggaaattcggaggccgcttccgtcgccgctgcctatataagaagcagaacccatctagagcgggggacgccgaggaccatgcatgctcccgtggtaacgatagcacttgcttatttcttttgttttattttaagctgcgcttgtgatcgtcgtcttcaaaattgattgctcgccgaaggttgaagttggtgcagagatttaatgataactgtgatataggtggctttgttttgccgaaacctggtcacaatatattatcaccatgtccatacatgagtcaggtatcataacaaaggggatgacttttgcct

SEQ ID NO: 15976 - DNA, 942 bp, Oryza sativa
  ref <308>: DATABASE ACCESSION NUMBER: AK066484
  ref <309>: DATABASE ENTRY DATE: 2001-12-06
gggcgtaatagaaagagagatctcccgtctcgtccgtcgtctcctccgctccttgcgccaagacgagtcgcggctcaacagaggaggggcgccgatctccatctggcgagcagagcaggggaggggaagggaaggtatcctgaaagatgcttaatcttatcaaaataaaggataaaaagaaagagcaggcagcaagtgctgctggaaaggctcctgtgaagaagcaatctgctggagagctccgtcttcacaaagatattagtgagctaaacctacccaagagcacatcaatttcttttcccaatggcaaggatgatctgatgaattttgagatcatcgtccgacctgatgaaggatattacctaggtggcactttcgtctttacttttcaagtctctccctcttatcctcatgaacctccaaaggtgaagtgcaagaccaaggtataccatccaaatattgatttggaaggaaatgtatgcctgaacattttgcgtgaagattggaagcctgttctcaacatcaacactgttatttatggccttaaccttctttttacgcaaccaaacgatgaggatccgttgaaccatgaagcagcagctgtcctccgtgacaacccaaagctgtttgaagctaatgttaaaagggcaatggccggaggctatgtgggtcaacactatttcccaagatgtgcatgatatggtgctgggtgccacaaacattagtaagttaagccacctgggcctcttcccgacattctggattgtatggtttcggtgcgttaaagtgctgtcggatggatgtgatatgttgactgtatgacggcgatgctgccatctgtgtgatatttgtttaaagtcagtaaattggtaatctggtggtggtacagataaaatttgagttgcagttcaagctggatttatacatcattttcttttgtgc

SEQ ID NO: 15977 - DNA, 1693 bp, Oryza sativa
  ref <308>: DATABASE ACCESSION NUMBER: AK066485
  ref <309>: DATABASE ENTRY DATE: 2001-12-06
gacagcctcactctcactccaccccactggggaaagccaatgccgcgggccgaagccaacgcggcaaaagcccaaccccccgagatccctccccgccgcgccggcggaatccccgggcctcgtcgtcgtcggcggcggcgatggggtcggtgtccctcaacgtgccggcaccccgccgcggcggcggccggcgcatctcctgccactgcacaccgtcgctgctcaacctgctcatgttcctcgccctcctctccaccaacgccctcgccctcctcgccttcttctcctcctcctcctcctcctcctcctcccccgccgcctccgccgccaccgcggcggcctcgacgatctccgaccacgtcgcggccatcgcccgcgagatcgacacctcctcctcctcccacctgccgtaccgcgcggacggcctgccaccggagctcctcctcttcctctccccgcacgcgctcccgctgggccgcgacgcccgcacggggctcacccacatgccggcctccgtcgcgcactcctgcttcaggtcgcccgccacgctctccctcctagccgccttcatgtcctacgacccgcacgccgcctgcccgcgcaacgccaccctgcagcagcaccgcctcctctccaaggcctgcgagccgctgcctcgccgccgctgcctctccggggggccccgcgcggcgctcccggcctccaacatgggcgtcgacggccgccgctgggtcaggccgcgccacgactacgagttcctcctcgacgacgtgctgcgcctcggcgccaccaggatccggattggcctcgacgtcgccggcggcgccgccaatttcgccgcgcggatgagggaccgcggtgtcaccgtcgtcaccacggtgctcgacaacgccgggaagcccatgaacgagttcgtggcggcgagggggctgttccccctcctcctctcgccggcgcaccggttccccttctacgacggggtgttcgacctggtgcacgtcggcaccaatgcgctggacgaaggtggcgcgccatcaatggggaattccggcacggaggaggcgctggaattcttcatgttcgatgtcgaccgcgtgctccgcgtcggcgggctgctctggattgatagctacctgtgccagagtgaggagaggaggcaattggttgtgaatctcattaagagatttggctacaagaagctcaagtggatggtcggagagaaagccggcacggggagcgcaaagacggcattgtacctctcggcattgttgcaaaagccggcgagggattgatactgaactgatggatgaattgctccaagctcatcacttgatccgaggtacgaatgtacctcacaactattacttgtagttcagctgttttgatggcaaaaaaaaaaaagaaaagaaaagggaatgccatttaggttccacggaacacggattagcttgattacattggttgttcagagatagtgaagtgacttaaaataagtgcaaaagtggtacaattcttctacttttgttattgtgcaataggttgccattagatgggaaacatatgttgtaatagtaggatttgttgctcaactgggggactgaaaacaggacttccattccaatgatgtgttctttcatatcaggaagtaaaggagagtaaatgatgatgatcatggagctttttatttgttact

SEQ ID NO: 15978 - DNA, 1016 bp, Oryza sativa
  ref <308>: DATABASE ACCESSION NUMBER: AK066486
  ref <309>: DATABASE ENTRY DATE: 2001-12-06
gcccagcggccgtgccctctttcgttcttgccgccagtccagccgtcgttgccctcgcggttgccgccggcgtgggcttggccaccagagaagtcatcgccaccaccctcaccattggagaagatctggcgtgcgctgccaccacccccactgccaccatccccaccaggagggaaagaggagccggggctggcgcttgcaaccagcatcgtcgctgtgaagctcgggatgcgcagctccttcagcaggagggtattgcgtgccgatgtgaagctcgggagaacggccatgcctacgatgttatcagcggtgttggagaagtgatcgttgaggcatcggagaaggttgagcacaagttaggagttggagacggcgtggtcgatgtcgcgaagggcgtcggtagcggtcttcatcttctgcagtaatcggtaatggaggagtcgccttgaatcatggagtgaaattggtgctgaggaagattgctcagcgttctttgttagctcggaacatgtcttccatggcgacccaaagctcttgagcggtctgatcctgctccatggcgaggtcaaggacggtgtcggcgactgatccaaagatccagctacagatgcaacagtcagcctgtttctagctacgaaggtaagagcctaaactcgaataccatgtagaagaagtggaatagatgcctcacacacaatgtggggaggtgatctctcatatatatagctgaattgcaatcaatgctaatgagttatattagaccaaaggtctgggggattaactatctaggagagtaaaggtctaggagataaacaacctataaataaataatcctattatagtccaaataccctctttgcaagcgtatttgcattttccttctctaaccttcaaataagataccaatcattaagcctgtattggttgagtgtcacatgaatgtataaagtctgacataagacttgatgtttccttagaagttccatttacttgggagttaggatgtataaagtctg

SEQ ID NO: 15979 - DNA, 1562 bp, Oryza sativa
  ref <308>: DATABASE ACCESSION NUMBER: AK066487
  ref <309>: DATABASE ENTRY DATE: 2001-12-06
ggtggtcggtgcccattttggtcagaatcgcgcgagctaagcaacaccccccaccccgcctgagaaatccccacgtcaacggcagcaaccctcccccctcgatctccgcctgtaatcttcgattcgtcgccggcaaccgccgcccgccgccccccgtcgatctccaaccgcagccttcgccaaaagcctccctccaaagctattcaaatggcaggatggcaagaacctcaggtggattgatgttgcctgcggtcgcgggcacactgctgcggtcgcttctgatggatcgctctacacctggggggcgaatgattttggccagttgggagacgggacagaggagagtgcaaaggaaccccaaaaggtgaaggcactggagactgaatttgtgaaatcagtgtcctgtggagcacattgtacagctgctgttgctgaacctcgagaaaacaatggcactatatcaagaagtaggctctgggtctggggacaaaatcagggctcagattaccctcgcctattctggggagcttttgcaccaaatacggtgatccatcaggtttcctgtggagctgttcatgtcatggccctatctgaagatggcctgctgcaggcatgggatatacttggggactgggaagcatgggacagcttgggcattgctctcttcagtctggagataaggagctgatcccaaggcgtgttgttgctcttgacagaacagtaatcagggatgtgtcttgtggtggggtccactcttgtgctgtaactgaagatggagccctttatgcttggggtggaggacatgtgggacaactgggcctaggacctcagagcggtttcttttcttgtgctcttaatggatctgatatgcttcttcgcaacattccagtcctggtcataccatcaggagttcagcttgttacttgtggtcattctcacacccttgtatctatgaaagacagccgcatatatggttggggctataatagttatggccaagccgctaatgaaaaatctacttatgcttggttcccctctccagttgattggtatgactctcagagtgtgttggagaggtaaggagacttgctgcaggtggtggccattcagctgttttaactgatgcatgttctctaaaagaactgtgtgagttcaagctagcagagacagttaacatgtccaatgctcttctaatagaagatgttgcatcgcggactggtggtgatgccttggcacgtctgtgtgagaaattgagggagcatttggttgagcaaggagagtgtgagctgttggaaaatcaaatgattgaagaggtggaggctaaagcctaaatactctagtgattcatcgctccttcgtaggcattgattgaagcattaatcgtcttgttgcacttcatatgaagtgtgattgtagtgtctggactgaaggctctaattaattgtctattggactgtgaagtcccattggtgtctccaatgtgtatcaaagaaatggggactacatgtatgttgtatgtatcatgagtgactgttgttgtagagaaccaaataacctttggc

SEQ ID NO: 15980 - DNA, 2267 bp, Oryza sativa
  ref <308>: DATABASE ACCESSION NUMBER: AK066488
  ref <309>: DATABASE ENTRY DATE: 2001-12-06
gtatcacaacatggcttttcacttctcttctcgactgttttcatcttgcctcctatttagcttttgcctgatgttaataagagcacatggatctcgcagattgtacatcgcctaccttggtgagaagaaacatgatgatcctactcttgtgactggttcacaccatgacatgctcagcagtattattggaagtaaggaggaggccaaggcttccatcacctacagctacaagcatggcttttcaggctttgcagcaatgttaacagaagaccaagctgaggatctggcagaattacctgaagttatcagtattactccaaatcagaagcatgagctaatgaccaccagaagctgggatttcctcgggcttaaaaatgaaccacccagtgagtttctgcaaaggagcaactatggagaagacataattattgggataattgacactggtatttggcctgaatcaaaaagcttccatgaccacggatatgatgcaataccatcacgatggaagggcgtctgtcaactaggagaggcctgggggccctccaattgcagcaggtaaatcattggtgcacggtactacgcggctggccttgacaaagccaacttcaagaagaattacatgtctgcccgggacaacaatggccatggaacacacacagcatacacagcagcaggtgtggcagtagagggggttaacctccatggcctaggagctggggtagcacgtggtggtgcaccccgagcacggcttgcagtttataaggttgggtgggaggagggtggtgctggtggagtatacctcgctactgccgcagtactagcagctctagatgagaattcatttggggcactccatgcagtccagaatgggattactgttgtttatgccgggggaaatagaggccctcgacctcaagtcctttataacacagctccttgggtcattacagtcgcagcgagcaagattgatcgatctttcccaactgccatcaccctgggaaacaagcaaacattagtgggacaatcactctattacaagttaaagaacgatacagagagcagatttgaatcacttgtaaatggtggcaattgttcaagggaggcgttaaatggcacaagcatcaatggaaaagttgttctatgcattgaattaacttttggcccgataggaagaattttcaaagatgtctttgcaggcgttattcagggtggggcgtctggtcttatcttcgctttttataccacggatgttcttttgagcacagaagattgcaaggggatagcctgtgtttttgttgacaatgagattggatatcaagttgcaacatacataggcagtgaaagattacccactgttaagattgagccagcaagtagtattacaggaaatcaggtccccgctccaaaggtggcaatattctcctcaagaggcccatccatcaaataccctacagttcttaagcctgacatagcagctccaggagtcaacatcttagctgccaaagaagatgcatatgtatttaactcagggacatcaatggcagccccacatgtagcaggcgttgtggcattgcttaaggctctacatcctcattggtctcatgctgctctcaaatcagcaattgtcaccacagcatcaacaaaggacgaatatgacacgccgatattagcagaagcgcttcctcggaaagttgctgaccctttcgattatggaggagggaacataaatcctattggagctgctgatcctggcctaatttatgacatcgatccaaaggattacaacaaattcttcgcttgtcagatcaagaaatatgagatctgtaacattacgacattgccagcctatcacctgaatctgccttctatatctataccagacctaaggcatccaataaacgtacgacgagcagtcactaatgtcggggaggtggatgcggtttaccaatcctctatagaatccccccttggagtgaagatgactatcgaaccgcctgtcctagtcttcaatgctagcaagaaagtgcatgccttcaagatttgcattacacctctgtggaaagtgcagggaggctacacattcggcagcctaacttggtacaatgagcaccacactgcaagaatcccaattgctgtccggatcacaattcaagacttctacgctgatgttgcttagtaatgaacatatttctagacaatgtatactcagtaataaacatgtaaaccaatagcgcttgcaataagaacaatttgcttcattgttc

SEQ ID NO: 15981 - DNA, 2794 bp, Oryza sativa
  ref <308>: DATABASE ACCESSION NUMBER: AK066489
  ref <309>: DATABASE ENTRY DATE: 2001-12-06
ggtttgtctgcatgttttcagaaagaggtgcttgtgtcagcatcatttctgtttctttgtctgaaaggcagcaaagggccttctcaacttgttttctattagctttgttcattgattatggtttatgtgtttcctcatgattaacatctgcctttggctagccgattttatggatacttggttggagaacatcttttttctgtattaaatttgtttggctgcacttttccagagttccagtttgctattcaggtttaaagaaaagttgaggaattgttccttattctgcaaaggtggtgcttataaggaaccactcctcctacctttgttgacgggctaacaccaaatggcccagctgttgcaccatcaggactccgcgttttatgggaaggaactccatgggcgccgatggagcattcttcagttctttggcttccgtcgccgcctgcgatccactaagatgatctctgacaagaaacagagtcagggaaaaggcagtggtggaagtagacgccgaggttcatatgttccactgaaagatgaagacactagtgtcatggacgatgacaaacacactgagacaacaaagaaaaacaagtcttcaaaaaagagttctggtaagggaagtttgggctccttgattctaaaaaagctgtatggaaaggaaggccataaagaaaagatgcttcctgttgcaccgaagctactccgtaccctttcaatacattacctggaaagcaatgagtatgttcttgatggtgaatctgcttccaatggtgatggttcttcacaaagtattatgccaaattccacagatacaaatatccaaaatgctacattcaacacccaggatggttgcgataatgatacaagttcttcgcttctaaagagaggtgacattcatgtgaaacaaaggagccaccgtagcatttcaatggatggagttcttcataaggtcccttatggacataaggcatctgaagatgtaattaaagaaggactttcccggtcagcctccgccacatatgacagggatggtttgaaatcttatactgtaactgctgcaaaaagacctgtaaaccaaggttttcggcgttcacgttccctcactgaatcattggagaaatattctcacttgctggattctatttcaagcaaccagtcgaagaggacgctgacaagttcaaaatctactagggatcattctttggatgcgcctgctgtgatgactgggttgcagagtttggttatgactgctgaaaatctcgtgatcccagaacatgccttggcaccatatgttccagagagaattattgtggatggagatgtggatgctgctatggatgagatctctggtcataaggatgctgatggctctgaaaatactgtgttaatcgaagagtacatcgttgacaaaaagtgtggtgtttctgtgtcaactgaagctaatatatgtactccccctttactttcagaagtgattgatatttcacaggggcatgtagcaacttgtgatgacgatcaggttcactcatcaactgaagataatatgtgtactgttcattcaaaatcagaagaaattgatgtcccagaagaacatggaacaacttgtgacgatgaccatactaatttgtcaacagaagcaggtatgcatactactaaagtttcagaagacggaaggatttcagaagaacatacaacaacttcagatgacaaacaaattcattcatccgatgttctgaagtcaagagaaggtactttttgtgttcctcgtcccagtcaagaaattgaagctgagataaatctaagctgtgaacaagaaactgatagtccaatgtctgttcttgacatgaccttcccagatgatcctgctagtccagtgaaatatacaatcctggatgattcgtcgttgaagccaagagtcctccatttaagtgataccgatgattcagctgatatggatctcaataccagcacttccatggaactttcaactgctggcctgggtcacaaaaatgttcaagaaagtgactctgatgaactaagctctctccaagcagatccaaagaatgaagatgggttgatctatgtgaagaatatattcatgaaatcaagcttccgcaatgaagtactatttgatgaatggtgctcacagaacattacagttctccaagaagaggattgccaacactacgaggctgctgccgctgcatttgatttcactgagatgtcagctgatcagctacttctgtctgacttgacaaatgaagtgttgctcgacatctacaagaaatattctgtttccaagtccttgctctcccggttttcgtcttttgatagaccgaaacctgtgggaaaccatgccctcaaggaattgtggtctaaagtaagctgccatctggatgaacagccacagtccagcatagaaattgacacaattttgtcgaatgatctatccaagaacgatcactgggtgaattttcagagagatgctgatcacttggggaacatgttggcagactttgtgtttgacaggcttctgacagagttcactcttcagcttgcaaagttttgagcctagctagtttttttattttgcccctaaaaattttgttggtttagctgttctatatggtggaatgctattatcctcatgtatatattaacattctttctgttctctccttgaagagaacaaggtttggaggggtggttgttacttgttagggcttaggaattcaattcatgtgctgaaaggttttgaaatttatatattgagtggggttgaaggagc

SEQ ID NO: 15982 - DNA, 1393 bp, Oryza sativa
  ref <308>: DATABASE ACCESSION NUMBER: AK066490
  ref <309>: DATABASE ENTRY DATE: 2001-12-06
gagtcccaccgtcatactcatcgggggctcgcccgtctccgcagagatcgccccacacctgagaaagtgagaagttgaatcccttcgccgccgccgccgccgccgccgtcatgtgcggctccgccgcccgagccctgaactccgtctcccgcgcggccttctcctggaaaccaacagggttgccgcagcagacgctcgccgctgcggtgagcaggtcgggcgtggggcttcactcgggggcgaaaaccaccgccacgctgctccccgcgcgagccggcgaggggaggtacttcgtcgttgagggggaggagacgagggtggcggcggaggtggcgaatgccgaggcgcactcgccgctatgcaccgcgctgcggcggggcggcgcgcgggtgcgcacggtcgagcacctgctctccgcgatggaggcgctcggcgtcgacaactgccgcgtcgaggtcagcggcggcgacgagattccgttgcttgatggatcagcgcaagagtgggtgatggctataagaggtgcaggtcaatgtgcggccaaggattccagtggccagaaactggagaaactggctccggaaatccatgagcctgtttacttgcagaagtctgattgtttcatagctgcactcccttcctcaagaatccgtataacctatgggattgattttccaaaagtgccaggaattgggtgtcagcgcttcgcaacagtcctagatgctaatgtctactcaagcaagatagccccagcaagaactttctgtatatttgaagaggttgaaaaattgcgttctgctgggctcatcagaggaggatcgctagaaaatgctacggtttgcagtatttctggtggttggcttaatccaccactgcggtttgaggatgaaccttgccgccacaagattttagatcttatcggtgatttctcgcttcttgcacagaatggtaaccagggttttccacttgctcatgtagttgcctacaaggctggtcatgccctgcatactgatttcctacggcatttgttgggaaggagcgctgtgggccaagaaaaccttgctgagcaatgttgaaagcatatggataccgctgctccgtcgataatggcaaggacgcaaaatttcaaggatacaaacataggatggtcgcccttcttccagctaggccatgcagtaccaactattcatcttgcaattatctgccagccatttttccatctattcctttctctctctttcttttttgatctgatgaatcatgtagcccatcagcatctgtacaacctgtttagtcttgcaaagttgcaattcagcatagaagtagatgcccatgttatctgtgtgtacagttctgagcagccaaatacaactcaaactgaacccttctctcc

SEQ ID NO: 15983 - DNA, 1999 bp, Oryza sativa
  ref <308>: DATABASE ACCESSION NUMBER: AK066491
  ref <309>: DATABASE ENTRY DATE: 2001-12-06
ggctccgccccgtcgccggccgcaaccaccaccaccactcgccgtcgcctccgccccccgcacgcgctcctcccctcccctcccctcccctcccctctccccggccgcgccgctcgccggatctctcccctcctcccttccaggaaccccagccaagcaggtagcgtgtgacgggggaagggggggatggggctctcgtcggcggcggcgggggaggggccgcagctgtgcgtgttcgacctgaggcgggggcagcaggaggggcaggagctcgacaagatcctcttcttccaccccaccgactgccccatcctcctccagctctccgtcatcggcctctgcgaggggatcatcaccttcgctagaatattttctcctgatgatgattgtgaggtgatagaatcagagaaacactcccatgttttttaccaagctgaagcagatatatggatggttctggtagtggagaaaaacaaggacattgagtcaacttggcggtgtggtgcattgcagggaattcttaaagaggttcactcgcttttcacaatgttccacggaccaattcgaactttacttgacaggcaacccagtgcagaacttgcccgtggtcaccttcgcacatttttcacagattatttaagtgattttaatgctggtaaaaagatacaattgccaaccttccgtgattgcctaaaggagcgaggaactgtccaaatgctaacaatctcacgagaagtggcacttgaagttcagtcactcaccacagttcttgggtcatgtcttggaaatgtcatgtgccaatcacttgtattatttgaagatctcttggtgtccacaacacttccaccggatgatacactaaacctatatacttatgctatcttgaggttaactcctcgtgctttattgtccaatgcaacttcctggtcctatctgcggaaaggaacttcggttcatgctggccccacttctagttcatcaaatggaacagcttcagtagaaaggcctctccagcgtgagaaactatacaaaggaaaggatggttttgttgccgctggttccactacttcagaagttcgtggtgctgtggcttgggttcccatactgtggttccagcaggcagaagaccgcatgcatctctgtgtttatcagcacaagaacataaccattctgctactgattccagcttcatctctaataaatggagatgatggcattgctcatgtgaagagacatcttcttgaaaatgcatcacagaacattgtgactctggagctgaaattatcacgaggatggggaggagaaaatgcttatcatgttggtggatatcgctacttacttgttgatccagatagaaaagtatcaagagcctccccacctgggaaagtcaccaccctctcaaaggattctctactttccttgaatagactaagagaagaaatagatttggagaagtcaagggccaagaggtctgactcttgtcatgacaaggattttgaagtatgcatcagagccaaaaataatgcatgggtcattgctaaagttacccgaggaagagaactttatatggcgttagagaaggctggtgaaacacttctttatgcatctactgccatcgagaagtttagcaacaggtactgtgaaggagcattctctacagactagaacaccgaaatgacaacgattgttttatccaaaccactcacctatccagcttcgtcatttaggctgtgcggctcgctccctcatggtgtcgtgaatatggatcttgttattttgaagagattcgtacatgttgtacagctgccatgttgttgcctttctatgcatacaaaacaaatagcttcgtcagagaacaatacagcgcaggaaacagtcagtttcccctgccctgcgctccgacgtccttccagttccagattcgaccatcttaatttgtttgttgtatattctgacgatggacctgctgacttatgtagtagttcattcgattgcttcg

SEQ ID NO: 15984 - DNA, 1612 bp, Oryza sativa
  ref <308>: DATABASE ACCESSION NUMBER: AK066492
  ref <309>: DATABASE ENTRY DATE: 2001-12-06
tttattaaattttccaacgaatattgatgtgcagaagctaattgagaaagccaactccctacagtctattgcaattgatgcgaacacttcatcctcatctttccttttaaagagggatagctatgagtttgacagagttcacagcaatctctcttcttcaactcctccgagaactccattgcatcctgtttctgagagttactgggaagagaagtggaggaatgtgcacaaggacggaacaacccccaaggaggttgagaggggcaattcttttagtaaacaattaaagaaatctttgacccagaagcttggtttatctaggacagagtcagatccttctccagtgaaggtcctcagtgtgagtagtaatgatactcggaattcagtaagacgttgccttctgaatactttatcagatgatttggattgttctaatgaacttgccgggaaaactcaggaagacgaattccctatcatctcagttcacagggagcatcctctgagctctgcagagccttccaagttaaaggcagctggtgaaaatgtaactgtgagcgcatcatgtgtggcaaaactcagccctctaaaaaaatctgtggttgagccagctaatgagaacgcaacacaggggacaaagtgtgtaccagaagcttgttccagcggtgagaactctccagtgttctatgcagccagagccagtgctggtaatgaacctttgaatggccaggacacggattctgagagtagcagtgttacctcaaattcctttgctggtgaccatgatagggatgaaattctgaaagatgagccatccagctctaatgatgataacaaaaccatccaagattcagaagcagcatcttctgataaaagtccagaccgaaatggaacctctgagagggctgtcgtttctaatgaaagaaagccattcattagtaaattccagtggctcttgaagttgggaaggccttcggttgaaggcaacatggagaagagtagtggagagacatcagctgataaacaagacggggacacatcctgttctccttctgatgggaattcaaataactcccgtggtagcgtaaagttggcttctggtgataaaaaggtcatgggcagcctaaagaatcttggacaaaacatgcttgaaaatatccaggtgattgagtcggcatttcagcaagaccgtggtcagcctggccctgtggagaacttctcaaacaacattcttggaggcaaaggacaggtcactgcaatggctgctctgacggagcttcgcaagatcagcaatctgctgagcgagatgtaacagtgtaagatgtatcgcccattctttcccagctttctagctcagctaaggcctggtagtaataagtcaggtacctaggtctttttcattcagcagtgcttggcactgcttgaatatgtatatatagattcgattcgattccattccattgagtaaatcatgtaagcattgtacaaggatcacccgtggatttacctggcgcgtgatgagggagtagttctctccggcattaggaagctatctaatgatggatgaaattttgtaagataaactttttaaggaagaataagcagaatatgttgc

SEQ ID NO: 15985 - DNA, 1441 bp, Oryza sativa
  ref <308>: DATABASE ACCESSION NUMBER: AK066493
  ref <309>: DATABASE ENTRY DATE: 2001-12-06
gattagcattctatctcatcagcaatggccaccatgccgctaaccttctccccgcctcgcctcctccaccgccaccgccgccgcgaagccaagccccaacgccgctccgccacccgagtctccctcctccctcgacggggagcggcctcggcgcggcggccgctgtactgcgcccccggtggcggcggcgaagtctccgcccctccagccaccgagcagcaggagcaagcggcgaaggaggaggaggaggagtacacctcctcgacaccaaccggaatgttcacagcgttctccccaagaccggagtctggaccaactcatattgggatgagttcgtgagcctaccagctgttgttccacgtggtcctgttgctcttctaggattgggtgctgggactgcagcacatctgatgctaaaattttatccttggttgcaacttgttggatgggagattgatcctaagataattgaactgtcaagggattattttggtttatctgatttagaaaaggcaacagaatcaggtggttcactttctgtgcgcattggtgatgcactttctccgtcagctacaattgaaggagggtttgctggtattgttgttgatttgtttgctgatgggaagatcatacctcagctacaagaagttgaaacctggttggaaatcgcgaaaaagctaatgccagatggacggatcattgttaactgtggtggagctgatgctgctgtatctcttgctaatgatacgggcctttcgtcctgggttcagaattccacaattaaggcactctgtgctgcatttccggggcagctcaactggaagagactatcagagaaagagagtgtaaattacgttgcattgacgggtcctcttccaaacttggatgagtggtctacctcagttcctagtgagatgagcacaaaagtgaaacagtgggtaccttgcgaacttgcttgaggttgagaatgaacaatttcttctagatgtaccctatttgcttcaacaacttgtgtgccccctctgttgatggctctctttctgtgtgttttaggcatatgcctctgatgcaacactgaaatgttcaaggaatagaagtgcaaggtaattgagccacactcaaattttgtttctgaagttaagtagcatagcgaagtgaagcataagttgaactcagtgaatgtgcgaatgttggaaggttgtcaagacaaacaagcagcacgaagttcagaacatactacacgacagttttgtcatctcttactgttaatattcatgcatttttgtttgaaggaaaaatccatgtcagcttcgtaaagtgacaaattggtttgtctgaacagctgtccagtagctttcactgacaaatactgttcgttagtagctttcactgatagatgcatggatggtacttcccccttcatgagggctctgaagaaagc

SEQ ID NO: 15986 - DNA, 552 bp, Oryza sativa
  ref <308>: DATABASE ACCESSION NUMBER: AK066494
  ref <309>: DATABASE ENTRY DATE: 2001-12-06
gtatcgaggggaggcgaggctgtgcggtggtcgccgacgacgacggggaggaggaggatatcgatcgccggcgatggggtactggtgggaccgcgtcgtgcttccggtgaggagggcgtggctcggcgtcgccgcccgattcggggttcggcagacagggctgtggaggctgaggcaggaggtgagcacgtgcgagtacgaggacgtgcgcgtgatgtgggagatgctgagccgcaccagcacggcgggggcgggggcggggcgggcggcgccgccggcgaggaggcacagccggttccggcagccgcggccgtggaccgagagcatctgcctctgcgcgggcttctagaaggtctcccttgtgggcttgtggctgtggcttagctcgtcctcttctcttcgcgacttctctttgattttttttttcttcctttttttttcttttctccgtctcactactgggctctgagatgtagtaatcgattcctcctcttgtatcgatccgcctagatgatacttggggtatgtgaatgaacagagctgtttcagatt

SEQ ID NO: 15987 - DNA, 2218 bp, Oryza sativa
  ref <308>: DATABASE ACCESSION NUMBER: AK066495
  ref <309>: DATABASE ENTRY DATE: 2001-12-06
ggttgcgctcgctttcccccaaacgtgacccggccgggagggagaagtcgccatgaagcagcctcccgctgctgctttctctctctcgcctcgttaaaatctctcttccaccccgaaccccatccagttcagttccctctcgatcgcttcccgtgctctcgctctctcgcttgctagatcagagattcccctctgcggcggttgtgaggtttccgcttcggctcgctagctagctctgctgtttctgtgagagccgggagcaccaaccgcgcgtggggtgggtgcccggagctttgatgcgcgtggccgccggtttctccccgtcgttgatgggcaacgcatgcggcggttcccttagatccaagtacctgagcttcaagcagaccgcgtcgcagcgccacgacaccgacgacaacaacaacgccgccgcggccgactcgccgaagaagccctcccgccctccagcagccgccaagacggacctctacgccatgggcaggaagctcgggcaggggcagttcggcaccacctacctctgcaccgagctgtccactggggtggactacgcctgcaagtccatttccaagcgcaagctcatcaccaaggaggacatcgaagacgttcgccgcgagatccagatcatgcaccatctctcgggccacaagaacgtcgtcgccatcaagggcgcctacgaggaccagctatacgtgcacatcgtcatggagctctgcgccggcggcgagctcttcgatcgcatcatacagcgcggccactacagcgagcggaaggccgccgagctcacgcggatcatcgttggggtcgtcgaggcctgccactcgctcggggtcatgcaccgggacctcaagccagaaaacttcctgcttgccaacaaggacgatgacctctcgctcaaggccatagattttggtctctcagtcttcttcaagcccggtcaaacttttaccgatgttgtcggaagcccatattacgtagctccagaagtgttgttgaaacactatggaccagaagctgatgtatggactgcaggtgtcattctctacattttactaagtggtgtacccccattctgggcagagacacaacaaggaatatttgatgctgtactaaaaggtttcattgattttgattctgatccttggcctgtgatctctgagagcgcaaaggatcttataacaaaaatgctcaatcctcgcccaaaggaacgcttaacagcacatgaagttctatgccatccatggattcgtgatcacggagttgctccagatcggcctcttgatccagctgtcctatctcgcatcaagcagttctctgcaatgaataagttgaagaagatggctttgcgggtaatagctgagagtctctcagaggaggaaatcgctgggttgaaggaaatgtttcagactatggatgctgataacagtggtgcgatcacatatgatgagcttaaagaaggcttgagaaaatatggctcaacacttaaggacaccgagattcgtgatcttatggatgcagcagatatagacaacagcggaacaattgattatatcgaattcattgctgcaacattgcatctcaataaactggagcgagaggaacatcttgtggcagctttttcatattttgacaaagatggaagtggttacatcacagtggatgaactgcagcaagcttgcaaagagcataacatgcccgatgcttttcttgatgatgtcatcaatgaagctgatcaggacaatgatgggcgcattgactatggagaatttgttgccatgatgaccaagggcaatatgggagtcggacgaagaacaatgagaaacagcttgaatatcagcatgagggacgcacctggtgcactctagacttccacgatgtacagcttacggattttagcttcttcctgtcttcctgcccaacgaactcctgcgattttttagcgttgtcagatgtccgcggatgtgtttttctggtggttctgatttaacttgtcaattgattccatggaatgcataacaagatgtccatgccacgctcaaacgaagctgggttgtaaatctctcgtacgccattgctcaactctgaaggtgttcggtgaactagctcgtattctttgtgttgcaatggatgaacttatactggctgtgttgggtgtaattgcattgccaacatttacaggggcatgtgagatcccgctttatcc

SEQ ID NO: 15988 - DNA, 3498 bp, Oryza sativa
  ref <308>: DATABASE ACCESSION NUMBER: AK066496
  ref <309>: DATABASE ENTRY DATE: 2001-12-06
ggcgttgaccgaaaccctagaccgtcgtctcacggcgacgaggagggcgactcgaagggcagggcgacggtgcagggtcccggactgcgcaggtcggtcggcgacgccgcaggtctcggtcggatctgggtccgcgtggagcagcagtgtagggtaactgattggtgttatcatagacatcttagacaccctggttgtcagatttcatttcaatggggagttcatgttgtcgggagggcagaagagttactgtggcggccgtgaggcaatgtcattaatagatcgagataaggtatctctcccagaaattgtaggtcatcttcgggatcatacaaaggttttggatggaacattgctgcattggttgttcccagggaaagatcttaatgttggcttgagggcactgttggatgacacagattgcaagtatatgtctgattgtatttgtgaaggaggtgttgctgagatttatgctgaggaacctattgtagtagatgtgtcagaggatgatgaaggccgtgactatgagcttgagatggaagaggagggtaaaaatgattctgaagaggatagtcctgcaggcgatggtgctgaagtagctgaacaagtccaagaagttggcatagatgcaaccaatggggctgaggcaaggccaagaagttggcattgatgtaggaaatggggatgaacaggctgtggctgacaagaggatagttgtttggagagaggatagtgatgtggacccaaccttgccaatcttaactgagccaaatgatgggagtgattctgacaatgaatattttccaggagatgatgagccatctgatgatgaggaggaggctgccaacatagacaagcagtacaaagagttgaagaagaagataaaggcagggaaaatagctgatttggatgacattggttttgaggggttgcattgtttcccaaatgtgcaagctggtggtgatgaaggtggtaatgagacaccatatgaagacagtgattcagaacaatccatagatgagcttggcagtgatggagaggttactacaaaaaagagcaaatatcctaggtacaagaagaaggcaggagtgccaacatttgaattaggaacgaaatttagctgcgagaagttgttcaggaaagcagttactgcttatgctctgagtgagaggaaggtgatcaactttataaaaagtgatccaaagagggttagagcaaagtgtgactggcctagctgtccttgggtctgtctactgtccaagacatcaaggtcacacagttggcagctagttaccctggacaatttgcatgcttgcccccctagaagagacaataagttggtgacctcaagaaggattgcagagaagtatgagaaatttattgtggctaaccctggttggaacctgtctcacatgaaggcaatagtgcaggaggagatgtttgctgatgcatctatctccaagctgaaaagagcaaaagccttggtgatgcacaaagtaatggatgcagcaaagggacaataccagaaactgttcaattatcagttggagctacttagaagcaatccagggagcactgttgtagttaacagagaggtgggactggatccacctgtaatcaagaggatatacatctgcctagatgcacttaggaaagggtttaaggctggatgtaggaaagtaataggactggatggatgctttttcaagggtgcaactaatggtgagttgttatgtgccataagaagggatgcaaacaatcaaatgtatcatgttgcttgggctgtggtaaacaaggagaacaacgaagaatgggactggttcatggacttgttgagcagagacctacaagttggagatggagagggttggttgtttatatctgatcagcaaaagggtattctcaatgctttagagaagtaggctccacaggctgagcacagaaactgtgctaggcacatatatgttaactggaagaggcacttcagtgataagaagtaccagaaaaaattttggaaatgtgccaaggccccttgcaggatgcttttcaacttggctagggcaaaactggctcagcttacacctccaggtgcacaggctatcctcaatacacatccacaacactggagcagggcttggtttaaggtaggctcaaactgtgactctgtagacaacaatatgtgtgaatcattcaacaaatggatcctagaagcaagattttttcctattatcacaatgctagaaataattaggaggaaagtgatgggtaggatcagtgcacaaattaaaaactctgctaggtagaacactgctatttgtcctggaatcttgaaaaaacttaatgtgtacattgctgagtcagccttttgccatgccatatcaaatggagctgacaaatttgaagttaagcataatgagaatagattcactgttcagttgaacaaaaaagaatgttcatgtggatactggcagttggctgggttgccttgcccccatgccatatcatgcattttcttcaggacaaactctttagatgcatacattgctgattgctactcagttgctgcattcaagaaaacctatgagcattgcctagagccagttgagggcatgagcagctggcctgaggatgaaagggtacctctcaatgctcctggatatatcaaaatgcctggtaggcctaagacagagaggagaagagagagaggtgaacctcctaaaccaactaagctgtcaaagatgggcacagtcattaggtgcaggaagtgcaagcaagttggtcacaacaggacctcttgtgataaacatcatgcaggagcgacatcaaacacagctcctcagcaaggtagcaatccaggacacaatttggttctatcaaacacaccccaaagttgtgtccagggtaggaaaaggaaggctacttcaactgccaacacaactgctgttagcatgtcaaggacactggcaacaaaggagaaggtacctatggagtccacccaagttgtcagggtgaatgcaaaggccaagatatcaacacagcaaggtggatcagcaactctcaacttgcaagccatggtgccacaatcacagggatcttcaagtgcatcaatttagataacatctgggaaggcttatgtttctgtcactgctgaagagccactgaggaggtccaagaaaactgatacttcaggtccatccaagaaggccaaaaaatcaagtgctggagcactcctcgttatgccaccatggaaatctgacaaactttgagtcagattcctatgtatgttgctatgccagactatgaaggcttaattatcacctgtgatgtaatggagctgacaattaggcttaattatgtgtgttgagcaccagacttaaatgtttatgtgtgtgctgtcatgtaatgccataccatatggccttttgctacaactatgtttcagtgccagacctgaattggcctatgttcaattgtctgatttaatggagtcatttgtgc

SEQ ID NO: 15989 - DNA, 997 bp, Oryza sativa
  ref <308>: DATABASE ACCESSION NUMBER: AK066497
  ref <309>: DATABASE ENTRY DATE: 2001-12-06
gatatttacgtgcacttcgtcactttgctttttgccattgccattgccaaagctaagcttctcgccatggaagctctcctctcctcgccgcgcgctctcttctccgtcacgccaaccgcgtgctggccggcgtcagccaggaggaggagacgtgttgcttctcctgtcaaggcggccgccgccgccgccgagccggccggggaggagaaaaagcccgccaccggcggcgccgcggcggcggcgggagacggccaggcggctgcgccggcgccgaagaagatcctcaagaagaaacctgtctactcgagtaatgaatacgctttgcaactttgcatttcagctctgagttctgaacaagcatcaaagccatttagcttcttgtttgtttttttgtttatacttgattaaccaatccatttattttcatccaattgatttggttgatgatgcgccacagtgaagaagggccagattgtgcgcgtcgacaaggagaagtacttgaacagcatcaactatctgtcagttggacacccgcctttcttcaaggggctagactacatatacgaggaccgtggcgaggttttggacatcagaatctttgaaacaggggagtatgccctgatcgcttgggttggaatcccaactccaccggcatggctgccaacttacatgctcatcaagtcggataaactcgactacgagagaatatgatatgcacaggatcgaaggttgcgttcaagctagctcagcaatcgggtgggagatcggtccttggcctgccagactagcgttttttcagttgttttcttccctgcattgcagattcttcccctatttcggttcttccgacgattaatctgcagatgttttcagtcggttcgtgatatatgacaatgtgttgtatatagatgtcaatatgaggcgatttgctgttgcctgttgctccgcatctaaattaattatactgaactgaaaaatttaacaaaagttaagtgat

SEQ ID NO: 15990 - DNA, 3600 bp, Oryza sativa
  ref <308>: DATABASE ACCESSION NUMBER: AK066498
  ref <309>: DATABASE ENTRY DATE: 2001-12-06
gatcgctcgaagccggtcgtcgtctcctacagttccggcaagatgcctccgcgccgccgaccctcccctgtctccgcagcatagcgccgccggatccggccgccgcctcctaaccactcgacttctcgttgcccccgctgcctactccgcccaccgcctgcttccagcccgcggctccggcggcgcctccacgcaccgccggtcagccgcctcgctggcctcccgctaaacccggggatccaccctctccccaaaatcccccttccctaaccccaaccccacctgaaacctaatccggcgctcttgccgttgttgcacggccgccagagtcaagaatctcgccggagcacgaatctctgccggatccaaaggataaaaagggagggaggaaatgtgacactcagtgtattgtactccaaactgtagtggaagcatcctttttggtttcacgaaccatttaatgtcaaaagattaagggatagaaggcaaatggcagaaactgcaatatacctagctctcagaaaaataggaattgccctaggacgagagagaagtgctactgctttggaacatgaccttgaaggaagatcagctttggaacatggccttgaaggaggatcctttctaattagatctcttaccagagtaatatctgagattattaatagtaatgatatattagttcttaggcaagcagaacttcaaggtagattgaggcgaatagaaagtgaacttcgcatgatcctttgcttcctggctcaaatagaaacaagatatgataacaagcaagtacttcaaagttggattggggaagcacggaaactaggatgccttgttgaacaaataatggacgaatatattgtctatattgtacagagcaaacaatatcgacttaccaagagagtacaggttatactggcctcacatcgcttcactgctcagctgaaagaaattgaggtggagctggagcatctttccaaaatgaaaaaacgatgggttcaagtggacaaggaaacctcattagcttcttcatcatcaatgtttggtcctcatgtcaacaacatagatactaagcgatatgccgaaagaaaggaagaactgattgaatcgctaaagagtaaagatatgacgaaagatggagctctttctgtgattgcagtgtatggtcagcctgggtcagggaaaacccatcttgttaaggatgtttatgctagtgagaagaagtatttcagtacttctgcgtggatttccattgctcaatgtcccaatgctgacactgatgctttgaaaagaatgatgatggaagaactaggaaggcaagttggcacttccactgagagtacctcactgagagtaatgacggaaaatcaggatagcaagttcctgtttgtatttgacgatgtatgggtgccagacatggttcacaaggtacaccgtgcagcttctgataataaaatgggcagccggataatcataatcgctcggatgccagaggttgcttttgtaagaagtgaatcttcagtggagtcacagtcccaaacaccatctagttcgctggaacctgtaagaccctcggcgagagtccccaaggaattcatgaagcttacttgtttacatcctaatgacagttttgatatcttctgtacaaaggcttttggaagaccaagtgactgccctatagaactccgtgaagtaactttgaagattattggcttgtgcaattttcttccccaagcaattgtttctattggagcattgctcagctcaaagcaaaaaacagagtcagtctggagtgaaatggctcaacaaattgaagatattcaaaaaagcaagtcaagcctgaacaatgtgcaaaaagtactatatctcagttacaagaaccttccaatgcatctcaagaactgccttttgtattgtagtacttttccggctggttttctcctgttgcctgagagtcttgtccggttatgggctgcagagggtttcatcgagaaccagggatcattgcaagtggaggaaattggtgagcgctatataaaggagctaatccactggggatttctgcaggttgtagatgtggacgaacaaggtagagtagcaagttgcaggatgcctattgtggtgcatgagctggctgtatctatctctcaaaaggaagaatttggagctatctgccatggtggtaaactagcagagatggataccaatgtccgctgcctatttatctcggaaaaccctgaagatattggtgcattagtagattttccgtaccttcggactcttatggccagcagaaatgctgctgcaaatttgaagtccttaccggcatcactgacagccaaacttaagtatcttactgttctgaaactgcaagaatctccacttgaagaattgcccagaggtattggctaccagctgtttaatttgcgatatcttggcttgcgaaaatcacaaatacgatgccttccatcttccatggccaatctctacaacctgcaaactttggacctcagggggagcagaataaatgaactgccaagttggataggcaaactcataagattgaggcatctttctgctgacacattggatggccaaggcccagacatataccgagctgtgaaagccccgaaaactgtgaactacctgaaagaattgcggactctcgagacagtgcaggcaagtgatacctttgagaagcatgtggagaagctgacccagttaactactctatctgttgttattggagaaggccgatccagcaaaacattgttttcttcattgtcgaagctttcctgtctttctagtttgcatgtcagtgcaagtcgtgtggacgaggagtctcttgactttgaaaccctgaatcctactagtcttgaaaaacttgttatcaggggcgggttggctgagcagacattccaatatcctattttcaaatctaaacagattaaagttctggagttaagcttgtgcaagctaagggatgattcgctcgtcctactatctacaaatttgtgtaaccttgaatcgctccgcctccataatatcagtggcatctccaagctggtatttcaagcaattaacagttttgccaacttgaggacacttttactacatgaaattgatggagtggatgaacttgagattccaaatggttcgttgggaagtcttcaagttctccatgtggtaaaaataagtcagctgaacagtatccatgaccaggagagaatcatatccgtcagggacctatactttccacagttatggctatccagagagaaacgaaatgccagctagtagcagccagctggacgccccatgaggccatgatatcacagttcacaggcataagcattacacaagcttgtcacatcatcaagaaggcaggagctagcacggattctattgctacgagcctatataaacttttactggtttgttatttgcagacattcggtcgatcgtcgactgtttactggtttgttatttgcagacattcggtcgatcgtcaagttgtcgcgtatgttatttcttgcttgtactttcacttaccatgggatatcatttgtatcaaataatcgtaataactttgtgttgttt

SEQ ID NO: 15991 - DNA, 2018 bp, Oryza sativa
  ref <308>: DATABASE ACCESSION NUMBER: AK066499
  ref <309>: DATABASE ENTRY DATE: 2001-12-06
gacataaaccctcgcttccgaaaaaacccgcatcgccgcgcggagcaaagcagagagggggaggaagccgccgccgccgccgccgccgccgccgcacggcgggatggagtcgacgccggagccggaggacgggagggagctctacgcgctgctccacctctcgccggacgcctccggggaggaaatccgccgggcttaccgccagtacgcgcaaatctaccaccccgacaagtaccaggacccccagatgaaggatgtggcaactgaaaacttccaacgaatacgtgatgcatatgagatactatcagatgagaacaagaggcagatatatgacatctatggtatggaaggtttaaattctggcctggaacttggccccaagctaaacaaaccagaggaaatcaaagaacagttggaacggctgaagcggcgcaaggaagaagagaaatttttagcccatgctcgacccactggctcaataattgctaatttttccgtgccacagtatttagatggctatggaatcatgagaggcatgggaatgtccagtgaagttcagttgccagtgtccaagaaaaatactgttgttgttggtggaaatttggttgtcaatggcacagatggaactggtgcagcaagcgctgtgctgcgtcaccagttgtcttctgtggcatcagtagagtttatggctacagctggactacgttcccttattagcgtacaaacatttcgtcaaatttcaccacattcgacagcaacatctggacttgctctttctttgagagatggatctatcaatctatcaaatgcctggactcgccaactatctgacaatattgttgggaatatacagcttgcccttggtacagactcaagtatttctgttggatggcaaaagaaggatgaaaaaaattctgcagcaggggatgtgaagcttggtactaattattttggtgcatctgctcattacacccgttatttctccaccaagtctcatggtcgcgttgctggtcgagttggaagcacggcccttgattttgaaattggaggaggaaggcggatatctgagttcagtactgtaaggatgatctataatataggaatccagggggtctcttggagattcgagttgcatcgtgctggtcaaaaattagttatcccagttttgctttcaactgatttcaatgcattacttgctaccagcgtttttgctattccttcaacactatattttctacttcagacgtattttgtaaagccatactgtcttaagcgggaaaagcagaaggaacttgaaaaaatggaaagtttgtcttcacagctaactgaagccagacgcgcagcgaaaaaagcacaaaagttactagaacctgtctcaaatcgtaagaagaatagacagctggaggatgatggcttggtgattacaaaagctctgtatgggaatcgcaaaaaagttaaagagagcagcgaatcaaatgagttgaatgatgatgtggcttcgcaagtattagacgtgaccatcccactgaacttcctcgtctctgaggcaggccagctaaagcttcatgaggggatcaagaagtctggaataatgggcttctacgatccttgccctggtgatccaaagctgttacttgtagaatacacatttcatggtcagaaatacaaggtcatggtagatgattacgctgcactgttgataccacaagatattcatcaaatttgatctgccgctgatcccgaacaattttgagccccatagctctcttctcatagtttttcttcttctgatgaggcttttctgtttttcgctgtttttccctcacatggtccattttgttgtatacatgcgtggatttgttccacctagattgtagatacgcggggtgagatcccgacagtcaataagtttcagtcaatcaaaagttcgcgacattagttcaatcttcactggacgaaacatgcactgaactgataatttctttatctacgaagatgcagctgtcgcctttccactt

SEQ ID NO: 15992 - DNA, 2822 bp, Oryza sativa
  ref <308>: DATABASE ACCESSION NUMBER: AK066500
  ref <309>: DATABASE ENTRY DATE: 2001-12-06
gttcttctctccgctctatttttttcatcctatcgattttgcagtttagccctcgaagaagcaaggatttcgagcccggtccctaggctcgatccggccgtgtcctttgctccgatcgagcgcgcgaggtctcgtaaggtccatcctgagcttgttgctgtggagtgcgcgattccgcgctcgatttcgtttcttccggcgcagatttcgtgttttttggcctagatttggcttgtgggtgaccgcctaggcgtttctcgcgtgtttcggctttttgtctgggatcgatttgtggctggatttgcttgttcctggctgcggagcttggatcttagcattagaaaccctcagattggggatttcctgccggaggaagctttttggaggagctgcctttgggaggaactcttccagttctgagggtttcggtgtttgttgctcgcctggctcgagaagaagctgggaaatctcgtattttagggcgggttctagtagatttcgtgtagtggagagcaaaaagtttgtgtggttttggtggtcaagtctggtggtggaagcccctcaggccggagatttcctccttccggtggacgaccaaaggagccgcccttggaaggaatttcttgccatcccagaggttggggatttcctcacgcccaggaagccaagcaagggctgccttagcgaggaactcttccaattggacgggtttgcgcgtagcggtgcggctatataagtggaaatctgcatccctgggaaggatacaattgttttgaggctgggaactttggaattggtttgcataaggagttcttggaatggggaatcagtgccagaacgggactcttgggagtgattaccacaatcggttcccaagggagcatgccgttgggtacgttcagggggatagctacttggacttgaagaagttcgatgatacttggcctgaggtgaacaacttcaagcctactgctgctagtattctcaggcgggggttggatcctacatctatcaatgtccttgggcggaagacagcggacctaagggagcattatatcattggtcggaagcttggtcagggccagtttggcacaacttacctctgtaccgagatcaatacagggtgtgagtatgcttgcaagaccatcccaaagcgcaagctcatcaccaaggaggatgtagaagatgtgcgccgtgagattcagataatgcaccatttgtcgggccacaagaatgttgttgcaatcaaggatgtctatgaggatgggcaagcggtgcacattgtgatggagctctgcgctggtggggagctctttgacaggattcaggagaaggggcattacagcgagcggaaggctgcagagcttataagaataattgtcagcattgtggctatgtgccattcgctcggggtgatgcaccgtgatcttaagccagaaaatttcctccttttggataaagatgatgatctgtcaataaaggcaatagattttggtctatccgtgttcttcaaaccaggtcaggctttcactgagctggttgggagtccatattatgttgctcctgaggtattgcacaaacgttatggaccagaatctgatgtgtggtcagctggagtgatactttacgttttgctgagtggagtgccaccattttgggcagagacacaacaaggaatatttgatgcagttctgaagggtcacattgattttcaatctgatccatggccaaagatatctgacagtgcaaaggatcttataagaaaaatgctctctcattgcccttcggagcgtttgaaggcccatgaagtgctaaggcatccttggatctgtgaaaatggagttgccactgatcaagctctggatcccagtgttatctctcggctcaaacaattctctgcaatgaacaagttaaagaagttggctctgagagtgatagctgagcgtctttcagaggaggagattgctgggttaagagaaatgttcaaggcagtggacacaaaaaatagaggtgtaatcactttcggtgagcttagagaaggtttaagaagatttggcgctgaatttaaggatacagagattggtgatataatggaagcggcacacaacgacaataatgtaacaatccattatgaagaatttattgctgcaactctacctcttaacaagatagaacgtgaggagcacctgctggcagcttttacatattttgacaaagatgggagtggttatatcacagttgacaagcttcaacgagcttgtggagaacataacatggaggattcactccttgaagagattatttcagaggttgatcaaaacaatgacggccaaattgactacgccgaatttgtagccatgatgcaaggcagcaacgttggactagggtggcgaacaatggaaagcagtttgaatgtagcattaagagacgcacctcaagtacattgatgcacgaatgtatagattttgttctcttctcttgtccattcattcttcactacccaattcgggtctgtgacttgtatgagaagagatcaagtcaattcatttagttggtatttattccaagcaagtgtgagttgataagtagcgtagtctctatggagacaatagcatgagcatatagtggtggtatattggttgatgtagttgcaaggccgcctagcaattaaaaaagaacccaaaagaggtgcattcgctttgttggttgttctttcaacgacctgtattacgcaatgaaagtcgtcatgtttgcgtaactctaatctcaatgcttgcgttcctataatatctttaaagattataatattacatttccatgtc

SEQ ID NO: 15993 - DNA, 1094 bp, Oryza sativa
  ref <308>: DATABASE ACCESSION NUMBER: AK066501
  ref <309>: DATABASE ENTRY DATE: 2001-12-06
gctttctcctcactgaccggtggagtggggcggcggcgaccagaggtcggtggagcggggtggccggaccggagcagggcggacgcgggtggagcggcggcggccggtggagcggggcggccggatcggagcaaggaggctgcccggccgctccgcccgtgatgcccagccggacggcacgacccctcctcgctcggtagtcgcacgcaccgcctccctcctcgcccggccacctccgccgacgtcctcaatggtcacatccgggttggagctgcccttcgtcgcccggtcgccgagcgccgcttctcctcgcccggccgccgcgcgccacctctcctcgctgggctgccgagcaccgcctccctcctaaccgggccgagcgccgcctccctcctcgcccggccgccgcgcgtcgcctctcctcgcccggccgccgtgcgccgcctccctcctcgtcgggccaccgagcacctcctccctcctcgctgggccgccgcgcgtcgtctccctcgcccggacgccgcgcgccgcctctcctcgcccggccgccgagcgccacctccctcctcggcgggccgctgagcgccgcctccctcctcgcccggccgccgcgtgtcgcctctcctcgcccggccgccgcgcaccgcctctcctcgccgggccgccgagcgtgcctccctcctcgccgggccgccgtgcgccgcctccctcctctcccggccgccgcgagctgccatccctcacccggacaccgcccgctgcctcggggatgggagaagggagagagaggggagatggggagagaggaggaagaaaaggggtgagaatgacatgtggggcccacgtgggccccaccattttttttattaatttgtgtatgaaactgacatgtgggtcccacgggttttattattttttggatcaaattgccacgtaagcgccacgtcaatgccacgttagacaaagacctagtcaaattagccacgtaggcgccacgtcagccaaaaccaccctcaaaaccgccgagggacctaatctgagccggttttgatagttaagggacccgttgtatctggttttccattcgagggatg

SEQ ID NO: 15994 - DNA, 1423 bp, Oryza sativa
  ref <308>: DATABASE ACCESSION NUMBER: AK066502
  ref <309>: DATABASE ENTRY DATE: 2001-12-06
gatgtcgcggcgacgaggtgagcgcacgggcgcacagcggaggcgccgatctctctctccctcccagaacccgccatggggagcaggaagaaggcgaagccgagcaggagcaggaagaaggcgaagccgagccccgaccaggccgtggccctcgactacgtccgcgcctggggcatcccgctgcctccgcgccgccgccggagccctcggctgccgatgccgccggggacgacttcctgccgcaccaggccgcgcgcatggcctctggaggcggagggagcgtgctgttcgagctccactcccactccaaccacagcgacgggttcctctccccctccgagctcgtggagcgcgcccaccgcaacggagtgaaagtacttgccctgacagatcatgataccatggctggtatacctgaagctgtgtcagcggctcacagatttggcatgagaataatcccaggagttgaaatcagtgcactatattctccaaaggaaatcgctggtactggtgagcatgttcatattcttgcatactatggtatgtgtggaccttcaaggtttgatgatctggaaaggatgctatcaaacattagagatgggcggtacttgcgtgcaaggaatatgctggcaaagctagatagactaaaggtgccaataaagtgggaacatgtaactaaaattgctggtgagggagtagcacctggcagattgcatatagcaagggctatggttgaaatgggtcatatagagaacattaggcaagcattcaacaagtacattggtgatgatggccctgcatatgccacaggaagtgaaccattcgctgagactgtggtgcagttgattaatcgtacagggggtatatctgcattagctcatccatgggcattgaagaacccagatgcagtcatccgagcattgaaaggtgctggccttaatgctctggaagtctacagaagtgacggaaaagttgatggatttagtgaattagctgagaagtatgaccttttgaagatcggaggttcagatttccatggaagaggtggaaaggatgaatctgatattggaacagttaagcttgctattactactttgtgttccttcttgaagatggctcggcctatctggtgtagtgccatgaaagacattctactgaagtttgcagaggaaccatctacgactaatctgggaaagatggttttgtttggagaactcattaattttaatggtttttcatcaacgggttctggtatggatattgttaatctgtgcttatcttcctggttaagtaacaatggcatggaagaagtggaacttgaggaggtaagattgaagcttgcccattgcgtacgtaaaagataatctcaaatgcatgactaccttgaacaatgggtgttccctttatctggaatgtgttttgc

SEQ ID NO: 15995 - DNA, 3421 bp, Oryza sativa
  ref <308>: DATABASE ACCESSION NUMBER: AK066503
  ref <309>: DATABASE ENTRY DATE: 2001-12-06
gcatttggcattaatatttcatccacaacacaaggcgaagcgtacgaattccaattcccacttgctccggtctcgtgcgtgcatggaactctccggcgagaccgcctcgccggcgccggagccggagccgccggggcagccggaggtgtcgccgcggggggcggggatgtttgaggatgcagtggaggggtcgtcgactgccacggagtcgccggtggcagtggcgcggccagacggcgaggccaccaccgagtcctcttcgccatcagcgtcgaggacgctggccggcgacgagccggcggccgcgggcgcaggggaagtggaggcctacggcggggatgagtcgccgtcggtttctgaaccgcgagaggagtcgggaagtgtggatacgggaagcgccgcgtcgccgtcggttttgcgatcggagcagcgtgcgaggggggcggaggagcaggagaattccatggccgcgcagttgggggaaggatcgccagcgagggaggagacgaagtcgaggatctcttcggcgccgtcgtcgccggttctatcgggcacgtcgacctcgtcgtcgtcgccgctgtcacagatcaagcatcaggcgcggcacgtgcgcaccggcagcttccagcgtttccggcagcagatgcagcgggcgtggaaatgggggccaattggaagtggaggcggcggcgagaggagccccagggagcagctgctgcgtacgacagtgaactttgaagctatggcgcatcagaagcggcagtggtatcaaatccaatccaagtcacgggacaataagcagtataaggaaccaacaacactctttgaacattttttcgtagtcggacttcattcttatgcaaatgttggagtcattgaggatgcatttgcaaagaagaaagcttgggaatctaatgtagaacactcggagattgtagatcttagaaaaattcaatatcatggacctataccaaccatggaaccacagattcttttcaagtatccacctggaaagaaagcggaaattagggaaattgatttgccgtcattctgttttcccgagggtgtaaaggcccgcttaatagagaggactccatcaatgagtgatctgaatgaggtggtatttgggcaggaacatctgtgtcgagatgacctgtcttttattttctccatgaaggtatcagataatgcaccactatatggtgtttgtctgcatgtccaggaaatagttcagagagcaccgggtatactaggcatggtttcaccactaaaccctacttcctacaagccaagtcgtttcttggtttctgcaccacgatgttactgtttactcacaaaagtgcccttttttgagctgcattatgagatgctaaacagcataattgctcaggagaggcttgacaggataacacagtttgctagtgaaattgctctggcagaaccaatcccccgctctatgaaagagcaaagtcaagtaaatggggaggattttgaatccgcaaatgagctttcttacaatgattggacagaatatgctgtacctgtcaacagtatatcaggtctcatctcttcatcaggacttccatcagagggagagattccttcatatttgttcaggagttgggagcctaattctcctgaaagtatgtcggctagtgagacttcagattctagttacataagagaactcgagaaggaaggcaggcatagtttccaacaatatgaggattgtatatcagagaacttgggatcccgttgtgatagctttggaagaacaagttatacttatgagaatggacatacttccccagatcttctctccacacattcgcctatctccagaagaatcatgcgtgcacagagcatggagtctttacacagttctgtgaaaggtgttgggtcagatgaagaagaagaactaaatatgaagcaagaaatagttgttgatgatgaaaaagttatgggatgggctaaggtacacaacaatgaacctctgcagattgtttgtggctaccatgctcttgctctgccacctcgtggaggtgaacttgttttccacccccttgaacatctgcaacctgttaaatactcccggcctggattgtctttattggggttaggagacacaatttcagacaatggtttgacttcagtagaaaaaactgaggtcaatgcccgtttggcggctgcagaagaagctatcgcattatcgatatggactacagctacaatttgtcgtgctttgtctctcgaaagtgtgctagagttatttgctgctgctctgttggagaagcagattgtggtaatatgctcaaatctgggtgtactgtcagctattgttttgtcagttatgccgatgataagaccattccagtggcagagtttattgcttcctgttctaccaagaaaattggtggattttcttgatgctcccgtccctttcattgctggtgtccaacataaaccccctgatattaagatgaaagcatcaagtattgtcagaatcaatgtagataaagatcaggtgaaggcatgctcattacctcaacttccacgattcaaagaacttgtttctgatctcagtccaattcatgctagactttcatgtgagaatgccctggctaagagacatccaatttacaaatgcaatgaagttcaggctgaggcagcttggcagttcttgaacgtcatgagatcctatctggagtcgctttgttctgacctgccatctcataccatcaccaatgtacagtcaaataatgacagggtttcgttgcttctaaaagacagttttatcgattcattcccctcaaaggaccgaccatttgtaaagctttttgtggagacgcagatgttctctgttctatcagattctcgactttccacatttgagaatgaactaacataaaacggtttgctctagtcagagatcaaagtaatcaacttccccggtttgtggcgaaaatttccctgtcattagaacgatcgggcaatgggaagaaaaggcagtccggaccgagaattgagggttagactgcgcaagccccagaagtttccgttcaatgctggagcttaaaagacggatgaatcggatagtctggacatgaaaaatgtgtgatgcaacccagtcttttaaatgggatgcacctgtcctttgggtttgggaaggtatacatgggatggaaaagaaatgtttcaatgctgcattacagttatatatatttttggttcctagtattctcttcgttatacaaatcagcgtatatagtgaaaagaatcctgtaaataagatagcttattcattgcagtgcgcatatacccggagttcgggttaggtccctagttcgggacttcgggtgcacaagaacgtcatcacagttattagttgattataatgtattcatctttcgtagctttttcg

SEQ ID NO: 15996 - DNA, 2433 bp, Oryza sativa
  ref <308>: DATABASE ACCESSION NUMBER: AK066504
  ref <309>: DATABASE ENTRY DATE: 2001-12-06
ggatatcgtaatttcctccttcacaaatcccaaaccgccggtgccctagctatcgacgactcggcggcgacgcgcctccctggctccctcccgtcgctcctcctccccgacccacgaactccccccaatagggcagaaaggaagttcaaatttgctcctgatccgagcgccaaacgcctagattccaccacccaagcctcctctcccaatccgatctgccgttccctcttcgaatcggctcccccttctcgccgattaccgacgaatccgaggccctcctcctccttcgaatccatggatccgcgcgccaggtaccctcccggcatcggcaacggccgcggcgggaaccccaactactacaaccgcggcccgccgctgcagcagcatcaccaccacaaccaccaccagcagcatcagcaacagcagcagcagtggctgcggcggaatcagatcgcccgcgaggccgcgggaaccgacaggaatagcgagccgaaggctgtggcgcaatccccagccgtcgacggcatcgattcgagttcacaagactggaaggcccaattgaagcttccatcacaagatacacgatacaggacagaggatgttacagccaccaaaggaaatgagtttgaagactattttctcaagcgtgaacttctgatgggaatatatgagaaaggatttgaaagaccctctccgatccaagaagaaagcattcctattgcattaactggtagtgatattctagccagagcaaaaaatggaactggcaagactgctgcattttgtatccctgcactagaaaagattgatcaagagaaaaacgctattcaagttgttatattggttcccacaagggagctggctttgcaaacgtcacaagtttgtaaagagcttgggaaacatctgaagatccaggtcatggtcaccactggaggaaccagcctgaaagatgatatcattcgtctctatcaacctgtccatttacttgttggaacgcctgggcgtattttggaccttacaaagaaaggtatctgcattttgaaggactgctctatgcttatcatggatgaggcagacaagcttctctctcctgagttccagccttccgtggaacagctgattcgttaccttccagcgagccggcaaattttgatgttctcggcaacgttccctgtgactgtgaaggagttcaaggacaaatacctgcctaaaccttatgttattaaccttatggatgaacttacactgaagggaattacacagttttatgcttttgtagaagaaaggcagaaagttcattgccttaacactctcttttccaagcttcaaatcaaccaatcaataatcttctgcaactctgtaaatcgtgttgagcttctggcaaagaagatcacggagcttggttactcttgcttctacatccatgcaaagatgctgcaagaccatcgtaatagagttttccatgatttccgtaatggggcatgcaggaacctggtttgtacagatcttttcacaaggggaattgacattcaagctgttaatgttgttatcaattttgatttccccaaaaccgctgaaacatacctccacagggttggtagatctgggagatttggccatcttggcctggctgtgaatttgatcacctatgaggatcggtttaacttgtataggattgagcaagagcttgggactgagataaaaccaattcctcctcagattgaccaagctatatattgccaataatttgacagagttccagcgtgtattcactttctctaagggtaataagaagacaattcttgtaaataccagctcatcaggttttatcatggatctcctgtggcatatgggaacattcatttttggagttttatttgagatgagacagactactcttccgatggacaccttgtgcttatatcattttggctaactaaattcaaacgccctcactgaggcacacagtagtgtatattgctaggtgcctgttcatgtgcctgtcctggcctcttagctcttatgataatctctccccttctctagatttcgttatcggctatttctcacaggacattttaaccctgttagtggttaactggttgtgggctgtgccatgtcagtgcacacattccagttgacgtgccatcgggtgtggacaagttcatccaacttgtgctctgaactgtcaatgaacagtaagcagcacaacaagcgtcttcagatattagcgaataaatctgtcgcaagccgcgtttctgcatccgtgccatgcagctcttctcttgcatgaggcttgtgccattatgtttagattctgcctcttataattgagtctaatggttctacaaactgagtttacctgtcctgagaactgggtaaaacatgtggtgaggcacatgcaacttgataaataaattttttacttaagtg

SEQ ID NO: 15997 - DNA, 1746 bp, Oryza sativa
  ref <308>: DATABASE ACCESSION NUMBER: AK066505
  ref <309>: DATABASE ENTRY DATE: 2001-12-06
gaggtaggagtaaagttcaaaaaaaaaaaaagagtaggtaggagtaggagcgattcgacggcaatcccgattccgattccgattccgattggattggaagcacggcggcggcggcatgcgcggcggcggcgggggaaggctccggaacccttgcctgacgatgcaccagccgtgggcgtcgctgctcgtccacggaatcaagccgtcgagggccgctcatggccatcgcccctcaccgggcggctttggatccacgcggcttccaaggtccccgaggcgtacaccatcaaggccatggaggagttctacagggagatttacgccctcgacggaatcaccaacatcaccttcccgcaccactaccctgtctcccgcctcctcggatgcgtcgaggtggtaggctgtgtcacctctcaagagcttgcttcctgggaacatgtgccccaatctgtcaggctcgaagcattgaccgacttctgctggctttgtgaaaacccacaggtcacctcaactcactagtatttcacgctgcacttcttttcattctaaatttgcttaattgtattattctttttttttgctgcaatgcgaattatgcaatgcaatgcagaaactggtggttccattcgacatgcgtggttaccagggtgtttacaatttagagagacggatctatgagggagcagtcaggggtctttcacctgttcaaggtccactgcctgtcaatttcccactccctgaccccaccaatcccctctctctcaaccctggatctcttcaacttcactcctcaaggtccgccgcactagacaaatctcccagtgtcactgccgccatagccggagctcgagctgccgccactcagtattcacgcaacaatactgctattactagtactccaaccgaagaaactcgacaaagattttctagggaaaaccatgcagataacacttcagggccatcaattgtccacgacagatcacccgttttgcaaaaccagaatctaccatctcttgccctgaccaatccaccctatttgaagaaccagaccatgccatcctttgtccagaacaatctacccaatttgcaaaatcacaatctgtcctatttgccgcaccagaatctgtcggctgatgtctcgaacaggagggtatcgcttttgcaaaaccagagtccatcgtctcttctccaaagtggtcagtcctatttgcaaaaccagaatgcagagcctcggagaagtcccagactacaaaatgaacctcccagtaggtggcactgaggggattgaagcgaatgaatgttagtgagggggagagcaatcagctccgaaaagatggcctgagtaaatatctgtgaaattacaggaacttcctgcccttttcggaggttccccttataaaagaagaaagatgagagtagcatgtgctatcacaagacgaaagcaatgtgattgtgattttttgtgaaggaagcaagcatgcaaaggggaagtttcatgttggcagccagcaagcatgcatctctctgtgaccctggcacgaaattgctttgctgtggcgggcgacaatgaggtcccttccaggaagcgattgtcatactagtactactgccgctgctgtagtaaagcatactagtggcaaagccaagcccaagggattcactttttgttactgtaatgcacgtaattatagtactaaatcagaagattctccgggggagggggaggggatcaggggagaagagccc

SEQ ID NO: 15998 - DNA, 1407 bp, Oryza sativa
  ref <308>: DATABASE ACCESSION NUMBER: AK066506
  ref <309>: DATABASE ENTRY DATE: 2001-12-06
tacctgagcacaggagaagccgcagccactgagatttgaccttctgtttctaccagaaaaacacaaacagtgaagatgtcgcagcctgctgagctttcccgtgaggagaatgtgtacatggctaagcttgcagagcaggccgagaggtatgaggagatggttgagttcatggagaaggttgctaagacagttgactctgaggagctcactgttgaggagcgcaaccttctatcagttgcttacaagaatgttattggtgctcgccgtgcgtcatggcgcatcatatcatccattgaacagaaggaagagagccgtggtaatgaggatcgttgcacgctcatcaaggaatacaggggaaagattgaaactgagctctccaagatctgtgatggcatcctcaagcttcttgactcccaccttgtgccttcatccactgctccagagtccaaggtcttctacctcaagatgaaaggcgactactacaggtacctcgcagagtttaagactggagctgagaggaaggatgctgctgagaacaccatggtggcatacaaagccgctcaggatattgccctggcagagttgcccccaactcatcctatcagacttgggctggccctcaacttctcggtgttttattacgagatcctcaactctcctgaccgtgcttgcaatcttgcaaagcaggctttcgatgaggctatctcagagctggacactctgagtgaggaatcctacaaggacagcactttgatcatgcagcttctgcgtgataacctgacgctgtggacttccgatatctcggaggatgctgctgaggaattcaaggaggcccccaagggcgaatcaggagatggacagtgaacatgatcgaatgcgtgcgcccacaaactagaatagtgacgctgcaaatgtgctgtgggttatcgtttcattttatagattgtaatgtctcgtgatttgtcggaaacaggaggcgctccccatttatgttgtgctaggaaaccttgcagctgactcgctgcttggctggtggattctcgagctgcactttctttggggggagcctcagggtggaaccttcatgtcacttattggatcgattgttttcggtatgtcagttgtgagccttatctccagagtccacagtcctgccaagtgccctgcttgagtgtttttggtttcttcgatgtaaatcccgttgtgtgcacgatggttcttgattcaccacacattgttgtctacattgccaaaacgtatgcttcaagtgcccaaaaggccgaagcggtccgagaaacattattctgtcaggtatgtgtgataagcggtttcatatgcaacaatgctgtagggacccaaatgttcactggcatcatgtacagatacttgtagtaccaaaattagttt

SEQ ID NO: 15999 - DNA, 1201 bp, Oryza sativa
  ref <308>: DATABASE ACCESSION NUMBER: AK066507
  ref <309>: DATABASE ENTRY DATE: 2001-12-06
gcccgcctcgcagagtcgcagcggaggagttgcatagacgaagcggaggaggaggcagcgaggcgaggcgagcccaatcggaaggcatggatagataccaaagggtggagaagcctcgcaatgagacaccaattagtgagaatgagatcaggatcactgcacaggggaggatgaggaactatatcagctatgggatgtcgttgcttgaggaaaatgggcatgatgagattgtcatcaaagctatgggaagagccatcaataagacagtcatggttgttgaattgatcaagagaaggatcggtggtcttcatcagattacatctactgaatcaattgacatcacggacacttgggaacctttggaagaaggccttctccccctagagaccacccggcatgtatcaatgatcgccataacattatccaagaaagcactggatacgttatctccagggtaccagccacctatcccagctgaagaagtgagacccgcttttgactatgaacacgaagaatctttccccactaatcgtggaagaggccgtggtggtggcagaagaggcaggggcagagccatgagcaatggtccccccgcttatgattatggcgaggagtgggaagaggaaggagattattacaactacagaggcagagggagaggccgatttagaggacgaggacgtggaagaggccgtggtggctactacggaggtggtcgacgtggtggatatggctatgattacggttatggcggcaggggggactattatgaagatcagggcgaatactttgaagaaccagaggactacccccctccaggccgtggacgtggcaggggaagaaggggcggaggaccgggaccattccgtggtcgcggccgtgggcgtggtcgattctaagatgaaatcaggaggaggtgcccttgaagcttgagaactcgtgtgcttaaattatctgataatgctgttctgtatgggggttttcgacatgaatccgtatgccccatcagtatgtttttacttcccgtggcggtgtgactgattgggcaaattttgtggctggatcttggttttgtagctaggcctgtcctgtcagcaaaagcaacaacaaacaaacaaacaccctgtgctgctgtttatttatcagcaacctaggtttccttcctgcgtgtgctctgaatgccatgaattctgtttcgtcc

SEQ ID NO: 16000 - DNA, 1365 bp, Oryza sativa
  ref <308>: DATABASE ACCESSION NUMBER: AK066508
  ref <309>: DATABASE ENTRY DATE: 2001-12-06
gggttgatctctgaagagttcagaattcagagcagaagtagtatgaagcttcttgacacatgcatgccaaaacatggctccgtttggagaaggcttagcaattagcatgtttgaggatgtgcaagaggaggtttatccaggacaatctataaagtgcacaccatggaacctgacaacttgaagctcaccgaatttcttggtttcactcatcatgcataagccagcaaagtagccaacacaatcgaaaataccaaaaccgagagtgtcaatggttgttttgtcagaggacttgcattaggcaaccatggatatgcatccggaggtggcatgacacaattatcaccattgaagtacacgcggtgtgggaaggcccatcccttgtcaaaggtgaagtccttggaatccttacgcagaagaagttctgactgtgcatttccaagtggaccagcttgcatgagcaaatcgttatagaacttaactccccagaacatcgcagtatcatctaaaatagaaggaataaacttcatcagagaaagagagagagagagagagataaaggaacgtattacaagtgcactccaattttcttaaataaaggagaacagtttgtaaattgacttacttatcttgcttccatatggagtaagtggcttgtagttgaagctaaacagctgggtgatattattgaagttaggatgttgagcgaccaaattccactgtgtgtaattcatgcggtagttgaagttcgtaatcgtgatcttcactctccaatattccttatagttgagtttcacatgccagtggattctgatcgggcacatgtgagaagtacattggacaagaggctgaccggtccatttgccagggccatcaatggcagattgtaaataaggtgaattctcactgtggaaatgcatggaacttgttagcaattttgcagaaaagttgggcctcaacaagaagcgaagtaagagttttggttttattaactcactttacacagcttccaggacttgtcccattgttttggcagccacaagagcatgttgggcagttcacaattgtgtcattataaaatgatgagagagatacacagcaggaaggagtcttctgagcaagaaattgggagtatgtgcaggtcacattccatgtcactgcaaacagattttatttttgttaagaaacaaaaaacaaaaatgaactttatggtataagattttgacaaatttaacttctatatggagccactatgatgcatgtctgcatttgacgaatattatttgctagagaataatattaactgaattagctgtattctattaggccaacatgccaagtaatataacctattatcaactattattc

SEQ ID NO: 16001 - DNA, 1640 bp, Oryza sativa
  ref <308>: DATABASE ACCESSION NUMBER: AK066509
  ref <309>: DATABASE ENTRY DATE: 2001-12-06
gacagagaggagaggggagagagagagagagaggggggagggggggggggaatcgtgcgagggaggggagggttttttgggcgagatttgagttttggcaccctcccgcgcgccatggtgtccgaccaggagatcgccagctgcgtcgagtccgtcctccgctcgtcggggggcgccgccggggaggcctcgctcgccgccgtgctgtcgcaggcggaggccaagctcggcgtcgacctcgcacacaaggcgaccttcatccgcgaccagatggacctcttcttcggcccgcgcctccagccgccgctcgtcgccaaggcccaggcggcggcggcggcggctcctaatcctcctcctctggtcgccgctcccgcgcctgccatgccgcaggtgcaggtgcaggcgcagttgcagcagatgcagcagcagctcgcggtgctccagccccagctcatattccaggccatgccgcagctccccgctggtgtaccaggcggcgccgctggggcggtctccccgcagcctcccgtgccggccatggcgttctacccgccgcctcctctggccttccgcgtcaccggcggcttggctggggtcgccactggtgggaccgtctccttccagcagccagcccctggaaccggcggcactgcttcccccaccgccgcagtacaggccgcgggcgacaacaaggaaagtgcttcaaagcggaaacgaggtgggcctggtggtttaaataaagtttgtgcaatctcacctgaacttcagactattgttggtgagactgtcatgtcaagaactcagattgtcaagcagctttggcaatatattcggcagaataatcttcaagatcctgatgacaaaaggaagataatctgcaatgatgaacttcgtgtggtttttggaactgacacaactgacatgtttaagatgaataaattgttggcgaaacatataactccacttgacccaaaggatcaaattcgggaagcaaagaaatttaagccctccaatgtagctactcagcctatgcctctgattaatcaaccctctgtggtgatttctgatgcactagccaagtttattggaatggaaggcacagtgcctcaagatgatgctttgaggtacctttgggattacataaaagcaaaccaacttgaggatgctattactggatcaatattatgtgactcaaaacttcaggagctgttcggctgcgagagcattcctagttctggattatcagagttgcttgctcaccacttcattaaggaaacatagcatatcctcattaactgatctaggattgcagtggtgccagataggcctaactttacaatatggtgttcttgacaaaaaaatggacagctagcttatgtatcttttctatgctctggattatgaagtttgtcagagaaaaccagattatttgtggtagcctgtaattttaattctacgtagtggctactgccgcagtactttggtgtaacctctacagaattcgtagcgttagtttctaaatgtcaaaatgtctttggctgactatgtaaagttaagctttttatttgagtgccaggttgaactttttaaaaagctgtaatggattcacgacctcttggttattgaatgtgtgccccctg

SEQ ID NO: 16002 - DNA, 2865 bp, Oryza sativa
  ref <308>: DATABASE ACCESSION NUMBER: AK066510
  ref <309>: DATABASE ENTRY DATE: 2001-12-06
gatgtgaaccggctcgatcgctccggcgatgatggctgccgcatttcctctgtccaccgccgcaccgcggtggccgtgtgcgggtccttcgagttcggcacctgcgtacgcatcccgctcccagactcctccccatggcttgatgcctcttgtgttgctgcactgagagctcgctaaatctcaagaaaaaacataaggcgtgcggctactgcttgtgttcatgtgtgtgctttgatggaatgtacaaattcaggtggggtattcggcgccagcgcaagctggaatcgtgaacgactttgggctctccaattcagagtacggcgtatttgggtctgtgttgacaattggagcaatgattggcgctctgactagcggtcgccttgcagacagtcttgggcgcaaaacggtgaagtgattgaattcatgactagtttaagttattcccattcgttctcgtgacatgtcttccattgcatctgctgcagaccatggggttggcagcaattattggcattgttggttggtttaccatatattttgccaatggtgctacgatgctctatcttggaagagtcttgctcggctattgtactggagttctttcctatgtggtgagcatctctaatttctcaatgcatatctgactattcatactgtaaaagaaaagatagagtttaatgtactagtgtaatgtgtcaagggtactagtgtactaccatctaagtatcaagggtggttatgttatctcattttgtatggtttaatctcataatccatatatagccttttggctgagtaatacaatttacggtctcagttatgttcccacatacatcttctgtagtaacgtatcattcgtgtcttgtcaacatagcattagaatcttacaggcacttaaattaccatggaatggcacaggtgcgtgtgttcatatctgaaatagccccaaaggatcttcgagggggtcttgcatcttcaaatcagttgttcatctgctcaggatgttcagctgcttacattattggggcacttctttcatggcgctcgttggttctagtaggattagtgccttgtgctttcctccttgttgggcttctgtttattccagaatctcctaggtggctggccaatacagggagagtcaaagaattcaatgcttcactgcaaaagcttagaggggagaatgctgacatatctgaagaggctgctgggattagagttaattccattctaaattcattctagtactacctccgtcctttaatataagggatattcactattttcttgtaacgtttgaccactcgtcttattcaaaaaaaatgtgcaaatataaaacacgaaaagttgtgcttaaagttctttggataataaagtaagtcacaaataaaattaataataattccaaaatctttagaataagacaaatggtcaaacagtgcaagcaaaatgtcaaaatctcttatattaggggacggagggagtagtttgtagtgaagatgtttataacaattgttttatgcaggaatatatcgaatcacttcgtagcttacctgaggccagggttcaagatttgtttcagagaaagaatttgtttgcagtcattgtaagaagtttcaagctgttgaaaggcattgcattttaccctaaaagatctgaacttgatgatgcgaaatgctgtttttcagaaataaaataatcatcaaactatgatgcttaggtgggtgttggcctgatggtctttcagcagctgggaggaataaatgccttgggattttatacaagctatatcttttcctctgcagggttttctggaaagcttgggaccaccttgattggaatttttcagattccactcacattgtttggtgcccttctcatggatagaagtggaagaagagcccttctactggtatgaacaatacaaaacctgagccaattgaataaaacgaaacagatcaattatcattctctgggtctggaattatcaattatgtattgtgagattcttctgttattaaggtctctgcgtctggaacatttctgggctgctttctgactggattatcgttctacttcaaggtaagtaattaactatacacttctgttttcagagttgcttaccttcaaattactcaactctttgcacgacttatatttggtggttggagaaacaatgacaggacagcatcactccagacaacattaaataaccaggtggaagtatgaacttgcagtaaaatgaaactgaacaaatcaacaattctgaagagttttgataaaccttaattaatttactaatttaaataatatgtaggttaaggaacaaggagtctatccctgtatacctgtaccattcttagcagagtatttacttttccgtccaatttgattgatccgcgtttcatggtcttacaggcacaaggagtgtatgcacaactggttccaacattggctctttatgacatatcggtatattacgctgcatactcagttggaatgggacctgttccttgggttatcatgtctgagatattctccattgaaataaaagcaatagctggaagcttggtgacgctggttagctggattggttccttcgcaatttcctactcattcaatttcctcatggattggaactctgcaggtaccttctttctgttctctgcggcgagcttggtcacggtgttgttcgtggcaaggttagtgccagaaactaaagggaaggcactcgaagagatccaagaatcgttcacatggcagctcgaggaggatttgtatgtagaacgctcgttatcctctcaaattatttgtatcagtgtgttcatattactatatatatactaacttctgttttctgttggt

SEQ ID NO: 16003 - DNA, 940 bp, Oryza sativa
  ref <308>: DATABASE ACCESSION NUMBER: AK066511
  ref <309>: DATABASE ENTRY DATE: 2001-12-06
tggcgtgcactccacccaaaaaccctagcccgccgccgcctctcccctccgctcgccggagctcgcctcctcctcctaatcttctctcagtaacgcgttggttcgatcttcttcggctcccgatggctatggcgcagaggggattgggcctgctccggcgatccctcgggctcgggcccctgtccacgcagagagccctgagcagcaccagccccgcggcgtccgcggaggggggagcggcggcggcggcggcggcggaggtggcgaaggagtcgaaggggaggaagaagaagaagaacctgttcgacgtggtgcagttcctgccgtcgtggggcgtgggctacaaggtcgccaagaccacctggcgcgacgtctcctaccagatcaccaagatcaacctctacaaggatggtcgtcatgggaaggcgtgggggattcgctacaaggccggtgttcaagctgctgaagcgccaacaaaaatcagtggggtaaacaagcgtgggtggaagtatataaaagaatcgcagaagaagttacaagatacccccaaagtagaaacgccagtcactgcttaagctgaaactgtggatgtcttgcttgtcttcactgctgaaagtgttttagatggctgttgccagatgaacagagcgccactgtagaatggatgggttccttttggttgatcgatgatgattaaatttgccaaggtgtttgatatccttttcttttcatttccataatgcacttggaaactagtgacaatggcatgtagttgtagtcttctaattcatctttgtttctgtcatatgtttacaaggggctggacattcagactgatgtccactggtaacacctgaacttttgggctggtgttaaactgttgggatcattgatcggcacatgtactctctaatacttaactgttaatctgttctgctcg

SEQ ID NO: 16004 - DNA, 1344 bp, Oryza sativa
  ref <308>: DATABASE ACCESSION NUMBER: AK066512
  ref <309>: DATABASE ENTRY DATE: 2001-12-06
ggctcttcctaaccttccaaaactctgaagagtttctccattatcgttggcttgttacgctccaaagctttcaacattccagactccagccaaaatttccatattattccaggtaaatgttaatccttgtgtttaccatacccgtgctagcttaatcttgtctaatttcggggtagaattgaccgttctctgacctaggggataaggagaaaaaaaaaaacaagctttctagtgttcttcaggcttgttgctgtgagatcttgtttgatcgtttcgctcagcacaccattttgtttgattttgaagcctttgaatggatcgagttttttggtttccaaagatgcatttctttttctcttctctgcagatggttcttagccctgcaaaataattctcgtttcgtcaatcgtcgtggcgattagttgttagttttcgctgctatttggatgtggaagagggaatggttttttaccatatatgagatgcagggcataacgaactggaacttaaattttgatcattttgtttagttcaaaaaacatatgtggttttgttggttatgttttcgattttatcagcgagagaagatgccctgacgatctgattctcaaggtcttaggctacgaggcttcctttttaatttgtgattgattgtataggctttgaagtatcaaaaattatttaacatctatgtaatgtaaccaccaaactgtggtgttttctctactcctctttaagtgaatggcttgacaaatgttatccttagaagaaacgtaatatgttcattagattagcatgaactagcattctaggaaaaccattctagtagtatgttttatggtgtaaattgttaattactcctagtccctaaaggctttgacatgaatacaatcagtaaagcatcatggtgagcaaagaaatttctagcgtactccctccgtcccgtaaaaaacgaatctagaactagatatgacatattctaatactacgaatctggaacatatgtatacccagattcgtaagactagatatgtcacatccggtattaagttgattttttatgtaacagatggagtatgtgctaacgatatcctaacaatcaaaaatggtaaaaaaaaatatatttattaatttaactatccactgtcaacttcaatgtgacgctgaaaaaaattaaaagtacgaaattttgaaacaataatattattatattagttttatgaaaatgatatcggtatatcatgtctagaacttccagctcatgagctttaactgcctattgttgggtgatttctaataaaaaatcacccagattttttcaactcttagatttacatttaacgg

SEQ ID NO: 16005 - DNA, 2212 bp, Oryza sativa
  ref <308>: DATABASE ACCESSION NUMBER: AK066513
  ref <309>: DATABASE ENTRY DATE: 2001-12-06
gatcgatctcaaacacattcatagcccattagccgacgagagctctcagtgtacgtaagtcgagagctcgaggaggcatccatggctatctcctaccttctccgttcctccatcctcgccgtcgccgcgctactgctcttctccgtcaacctggccaagggcgacattagggaataccaattcgatgtgaaaacgacgaacgtgacacggctgtgcagcagcaagagcatcgtgacggtgaacgggcagttcccggggccgactgtgttcgcgagggaaggcgacctcgtcgtcatccgggtcatcaaccactccccctacaacatgagcatccactggcacggcatccggcagctgcggagcgggtgggcggacgggccggcgtacatcacgcagtgcccgatccagccgggcggcagctacgtgtacaagtacaccatcaccgggcagcgcggcacgctgtggtggcacgcgcacatctcctggctccgcgccaccgtgtacggccccatcatcatcctccccaaggccggcgtcccctacccgttcccggcgccggacaaggaggtccccgtcgtcttcggcgagtggtggaaggcggacacggaggcggtgataagccaggcgacgcagaccggcggaggcccgaacgtctccgacgcgttcaccatcaatggcctccctgggccgctctacaactgctctgccaaagatacgttcaagctgaaggtggaggccgggaagacgtacatgctgcggctcatcaacgctgcgctcaatgacgagctcttcttctccatcgccgggcacacgctcaccgtggtcgacgtcgacgcggtctacgtcaagccattcaccgtggacaccctcctcatcaccccgggccagaccaccaacgtgctcctcaccaccaagccgtcgtaccccggtgcgacgttctacatgctggcggcgccatactccacggcgatgtccggcacgttcgacaacaccaccgtcgcgggaatcctcgagtacgaggaccccagctcccactccaccgcggcgttcaacaagaacctcccggtgctcaggcccaccctgccgcagatcaacgacaccagcttcgtctccaactacaccgcaaagctccgcagcttcgccacggcggagtacccggcgaacgtgccgcagcaggtggacacgcggttcttcttcaccgtcggcctgggcacgcacccctgcgccgtgaacgggacgtgccagggtcccaacgggagccggttcgcggcggccgtgaacaacgtctccttcgtgctcccctccacggcgctgctgcagtcgcactacaccggcaggtccaacggggtgtacgcctccaacttcccggccatgccgctgtcgccgttcaactacaccgggacgccgccgaacaacaccaacgtgtccaacgggacgaggctggtcgtgctcccgtacggcgcgtcggtcgagctggtgatgcagggcaccagcgtccttggcgccgagagccacccgttccacctgcacggcttcaacttcttcgtcgtcggccaagggttcggcaacttcgaccccgtgaacgacccggccaagtacaacctcgtcgaccccgtcgagcgcaacaccgtcggcgtgccggcggccggctgggttgccattcgcttcctcgtggacaatccaggggtatggttcatgcattgccacttggaggtgcacgtcagctggggcctgaagatggcatgggtggtgcaggacgggagcctacccaaccagaagatcctccctccgccgtccgatctccccaaatgctaaccgatcgacaccggccgaccagagacagagattgcgtcttgctcatcagcttccctgtaggatactcggatactcctctgcttttgctagcttgcttctgttgattgctcgcggttggtgctatggaatgcttttcttgtagtggtgtgcctttccgaagttgtgtcgtcatctggttagctgatgtacgaatgatcatgggcaagtttcttgatcagacgcaaggcctttaatattgggcttctcattattatttgtcaccttttgtaacatatgagggagctggatcataaatccacgttcatcccaataatttgtaccatcatttgatgtacggcaaaggatttttttatgtactatttcatattaatcaatgtttgttatattgttttggagc

SEQ ID NO: 16006 - DNA, 1479 bp, Oryza sativa
  ref <308>: DATABASE ACCESSION NUMBER: AK066514
  ref <309>: DATABASE ENTRY DATE: 2001-12-06
tgggatgatttgacctctccttcctctccctctgcttcgtccgtcctgtagccattgttgactaggaggaggaggaggaggaggaggaggagggattgattggtgagctcgtgttggtatttttgtttgtttgtagggaggagaggtggttgctgcggcggcggaggacggcgatggcgcggccgccggtgctctccgtcgcgcttccctccgacacgggacgcgtgctcagcatccagtcccacaccgtccagggatacgttggcaacaaatcagcagtctttcccctgcaactcctgggctttgatgtggatccgataaactcggtacagttttctaatcatacagggtacccaacatttagaggacaggtcctcaacggcagtcagctgtgggatcttattgaagggctggcggaaaacgatttattgcattatacccatttattaacaggttatattggatctgtttcctttttaactactgtactacaagttgttgacaaattacgatcagtcaatcctgatcttgtatatgtttgtgacccggttctaggtgatgaagggaaactatatgtccctcaggatttaatatctgtttatcaacagaaggttgtcccagttgctacaatgcttacacctaaccaatttgaagttgaactactcactggtttaaggattacctgtgaagaagatggcttgaaagcttgcaatgcgctacatagtgctggaccgcgaaaggtggtaataactagtgcacttattgaagataagctgctcctcattggaagccacaaaaaagcaaaggaacaaccaccagaacaatttaagattgagatacccaagatacctgcatatttcacgggcactggagatttaacaactgcccttctactaggatggagtaataaataccctgataaccttgagagggcggctgaactggcggtatccagtttgcaggcactcctaaggagaactgtggaagactataaaagagctgggtttgacccctccaccagcagcctagagatccgcttgattcaaagccaggatgaaattcgaaggccccagattacatgcaaggctgtgaagtatagctgaaaccatatcacaaccatggcaagcatcatcaaacatcaattagtgaatagtgactggagggagagtaccagtgttaaaaacaattttggtattctgcttgtatgcacaatattcatcaacatgcttcctggcttcaactctggggataccattttagttgatcatagtttcaaaacaagaaagggtctgatttcaaaaacaaaataatacacatgctgccttctctctctctctctctctctctctctctctttaatctcctttacaatttgtcatgtttttgtgcctatgagactgatattgtacaagggatagctccatcttggaaagctttattttgtgtaaaatctacaatgaataaacggcagttccgttg

SEQ ID NO: 16007 - DNA, 3519 bp, Oryza sativa
  ref <308>: DATABASE ACCESSION NUMBER: AK066515
  ref <309>: DATABASE ENTRY DATE: 2001-12-06
ggccgcgcagtcgtgcaggcgtacagtcttaccaggcgtacggccgtacagtcttgagtccttaccagatacagatagccgtacagtcttgcaggcgtgcggccggggatcatgtcggagggagcgatgggaagaacttccatcattgtgtagtgaaacttctgtgtagcttatgatgagatcgttgtgtagtcgatctcatcgatagacacgaaagttggcttatgatgctgaagctcgagacgagggacgccatagatatagtgaaacttctgtgtaaacggcaccgagaagaagcacctcgctcgctgctgcgaaaaccacccatgcggtgcttccgccgcccaatgtctttcaactatgacactccgggtaaggcgtactatctctaccgtgtgttctccaatgatccacgcctcaagctcccaagctcggagctcatgccatcactgcatcaagcagcccaagtcgaggctgctgccgtccatgatcatcttgttggcatcgacggcacggcaaacgagctgctcggatggctcatggccgccgacaagagcctccgggtcatggccattgctggacccgccggcattggcaagaccactcttgccatggagctccaccgtcgactccggtgccaaactcatttccagtgccacgttgtggctaaattatcccgcaggccagctcacaggagcaagcagcttcttcttcaaaccatcctcaagcagatcatggagcaactggaggcaccatcatcacctaacagctcagaaatcacgatgttggaggacgacccagagctgttggctcgcaacatatcagaatgcctcaaggataagagatactttgctttgattgatgatatattcgacggatcagatttggaaatgatcaagggtgcatttcctaataataactgcagtagcagaatattgtttacagctcgcgatgagcaggtttctgggtggtttttgtctaattataatggggttgtgcatcagatgaagcctctcaatgactcggattcagagaagctgcttcgcacaaaagcttttagttccatggatggttgccttccagacaatcttaggctattatgtgatgaaatcttgaacatgtgtagaggaataccattgttcataactagtatggcagattggttgaaacaacatcaacagcaatacggcagctctgcagttcctagggtggaacaagttcgcttgctgctgaaacaatttgaacacttgctatcatttgattacagtgatgagctgagacaaccgtcactctacctaagcatgtttccacagggatatgtgtttgagaacaaggatcatcttgccacgatattggaatacgaagggttcatccctgagtgggatcttagtccagattttggaaagcggtatttctcttggttgctcaacaggaaaatcatcatcccagcagcagagaactgtggactcaatattgatgaagatgacttgtgccagtggcaggtcaatcctttcatactgaggtttcttgcctccagagcagcagagatgggtcttgtttttaccagctcaacgctcaccttagcaccgagcggtggtggcaacaccactcggatagcacgccgtctagctctccaccatcctgatccgcagcttccagctatgctgcagcaaatgggtttgtctcagactcgttcactactcatatctggtgcagtcgacagaacaacagtccctctagacaagtttgcctatctggtgttgttggatcttcaaggctgggagaatttgaaggatgaggacctactgcaaatatgcaaaatgtttatgctgaggtatctgagcgtcaggaacacaagggtcagcaagctcccacctcagatcaaggagctgcacatcctggggacattggacgtcagccacaccaccataagtgagatcccatcagaagtgtgggagctaaagcatttgaagatgctggacctaagaggcacatggataagacatcttccagagaaagtcaaggaattgactagcctagagagattggatataagccacaccaagataagtgatctcccctctggagtgtgccggctacctaatctggagacgctagacctaagaggcacactaataagccagttgccagatcaaattgtgcggataaagtggttgagaaatcttattgttggtgctgctggagctggatctggaatgattgattccgaccaaacagtgctaacaaagatacccgagacgatccaccaattaagatatctaaagatgctagcaactatcgatttaagtgaattctctgtaaaatcagtacagtctcttggtgatctgaagcagttggaggtcctcacaataacatggtcctttcaccagtgcagtgacaaagactaccaacaagccctacgatcatccatagaaggatggtgggagcttaagtccatgactattcattgtgggctcggttgttccatggagttcctcggttctctaacagaaccacctgaaaatcttgagaaatttaaggtaatagctggaaaattttcccgtgttccccaatggatcgaaaggctcgaccgtcttactttcttgcagatcacggtctgcaaacaagtggcagatgatgtcaagatcctcgcgggcttgatcaaattacagcgcctggtactaggcttggagttcattcctgaaaatccaatagtgattgagaaagaagggttcaaagagcttgagagattctcccttgattgccctgtcccatggctgaccttcgaagaagaggctatgccgaaactcacatatcttcgactgaatttgcacgcatcccctgcaagcgagatgagtgttccttcaggtatcaacaaccttaaagagcttacagaggtaacactatgctacaacatacggtacatcaacagccccaacattaagatgacgacagacgcagttagcaaagaggttgccaagcatagcaacactattgaccttttcatcaaatggcatcagaaaagatgttattcggtcaagtgacaagaaggaagagagtgcaacaggatccgaagtcgatgcagcggaggatggtgctcaagcggccgatgaggccacactgaggacaacaatacaggttcaaagcgagattgaagttgaaggtgaaacagagagccatacttaactctaagcaaccaaggtcccaaggaaatggggatgatgtcctcctctcctgactcctaaggggacagagttaataaaggaggacggcctgcactgcttcagcttcgattaggatttaggagcagacaagaagaagcttctgtacttttgctggcaaatggcataaaactcttgcatctcatggtcgcttctgtattgccgttggccagtttgtatctgtacattatctaaaaagtttgtatctgtaatttctgtgtgtagttgctgttggccacttgtatctgtaagttctatttctgtgtccatgttttcgttcaaacataattatgcgagt

SEQ ID NO: 16008 - DNA, 2900 bp, Oryza sativa
  ref <308>: DATABASE ACCESSION NUMBER: AK066516
  ref <309>: DATABASE ENTRY DATE: 2001-12-06
ggctttggagattggaccccgccgcatctccacgtctccttccgcccccatctcgtccggcggcggcggctttaaccgccgggccgaccaccggctcggcgactccgcctctccccgtaggccgaaatggagacctcgccacctcaccgcaaaccacgcctgccgccgccgccgccggagggggatccgactgcgtcggcggtgggggcgagcctggaatccctcccgggggagctcctcgagaacatcgtctcccgcctctccctccgcgacgccgtccgcacctccgcgatctcccgctcctggatccaccggtgggagtccgcccccgacctccgccactactggccccgccgctcgcgccccgacgccatctgcgccgtcctggcgcgctactcccgcagcgtcggccagttctgcacctgggggatccgcgcggacgcgttcccccacatcgacgagtggctccccctcctcgccgccaagggggtccagaccctcaccctctcgttctgggactacagcgatgtcaatgtggagtactacaccctccaccccgccatcttcgcctgcggccagctcaccagcctccacctcgagcgctgcttcctccccaccgcgcccgagggcttcggagggttcccgaatctcaccttgttgagcctcgtctacgttggcctcccggagaatggggagaggaaattggaggccatgatccgcatgtccccgtcgcttgtctcgttggagcttagcaatgttgaggttactgatgacgactttgaggattggataattcaggctccgaatctcgagaggctgactattacttccgatatcgattacggatggcagatccaggatcttccatctatacaagatgctaatatcaatattgaagactactcaattgatcgcgatttcgtcaagcttctcacatctttggcccaagtcggggagctcgagttgtttataccgtccgcagatggtaatgttctagagggaatttcatgttcttttcagaaattaaggagtttaactcttcatacaaacttctacaaagcatctagcattttatctacatttggtttactcacgagagctcccaatcttttacatctggaaattgagatcacagatcatgagaatcagagcgatgaagtagatatagattttttaaatgcactgtggaccaacagtctttttgcaaatcttgattttgttagcataaagagtgccacttgctggtcaaatgagatgcgctttattgaatttgttctatccaaagcaagattacttggtgaattttatatttatcatgatgatactggttcatactcgaagcctagagaagaggcaattattgagttagcaaaatataaaagagcatcaccaaaggcaaaagtattcttcagggatatggaggtgagtagcctgttaactatctgttgattatttttaagccttttcagaggctcgttcttgaaagtcctgttccatatacttgcttgtgttatatgctctcagatcaatttgacatatgctctgtggcagtcaaaatgaaaaccatacaattttctatttcgaattgggaattaggatgcaaggaagcaattaattatgcataaactatttgttctaaggtgaatataacaagcactgattactaatactaggtagtgactgctatgtcattatctgaaaggaatgagtccattttacagccctgaacttatgcaaaatgttcacataactcattagctataaaactgattatcagggcctgtttgttttatttctggccagagcttcctactcaggttcgagaaggtagacttttcatgtcacgcgttcagtttgtttccacaattgcagtatgtcacactttgttagccatacaatccatatgtcgaggtacactaattttctagccaccaatggaacacatattttgttagctacaaaaaattagttatgacaaattttggcagctaacccgagtgctattaaaagcacccaaacccacaaaccagatttttgcctccccagcatctatagtggttctgctggccaaaaggatgtggaacgagaagggtgagacaactggaggtagaggaatgtagtgattgttaggtctctgttgaggttgaggagtgccattgcgctctcatctgtatcagtactgtatcaaagaaacctttttagtgtcgtctcgaaattttccactttgcattagcacatatctaaataactcttgttacaaaaatgccatgctggtgaatgtcatgttagctgggtcttcaaggtagaacaccttattcccccttttgcaccctaattgtgatcttaatagttctgtagtatcaagtaggtcaaatatttgaatacaacattttaactgaccctcttatatttctgtaagtaccttcagaaaatcatgatctgatatttattattttcttctggtggacaggatacatggctgtactcatgagaatcgagactcagagaagcactctttgcacctttgatccacaggaggttcacatggtcaattataccaagttactcatacttccgtacattcctgaaaatgcttcagataatcatggcgtgattattcattatctttctcaatggaaagtcgtctcttgaataaacatgagtaattacagcactcagcttcgatcgattggcaaatctgtatatttactggagatggggcattccatcctcctcgtcgtagttgtagcacaatcttacaagtcgcatgagttgaccctataccgcaaactatatactatatgttggttgtgtgcacttgcgcagtgcatatgcattgtgattaatgtttacatgcttcatgtcagtattttacaaatgaaagtatgatgaatcttggc

SEQ ID NO: 16009 - DNA, 1788 bp, Oryza sativa
  ref <308>: DATABASE ACCESSION NUMBER: AK066517
  ref <309>: DATABASE ENTRY DATE: 2001-12-06
gagtgagatccatatatggtccagcaactaccgctgcccatctctctggtctccaccctccctttctctctctagtcctctagagccgagggttgctgcgaggaaagcgtaggagagagggttgctggctgcagccccggcgagaagcgccattgttgtcgtcgttgggccaagaaccaagaaaccaagaagacaagaggaggaggaggggggaagaagacggaagggagagaggaagaggcactggataggtgcatcctttgcctctagccgctttctctttctccttcctggaggggggagagagagagaggagtgggagaggaaaggagagtagatgggcgagatggtcttggccgggtatggcatggacaaggcggtgaggagcagcgtcagcttcgagacgccgtgcggcaggctgctgcgcgagctcgagcaaatatggactgagattggggagcgcgaagaagataaagatcgcatgttcttagaacttgaaacagagtgcatgcgtgtgtaccgtcgaaaggttgatagtgccaatgctgagagatcccagctccgtcagtcattgatggccaaagaagcagagcttaaagttttagtggcttcaataggtgaaattaccccaaaatttaaggtggatgaaaagcaatcattgaaagagcaacttgccaaagtgacgcctctactggaagatctcaggtcaaagaaagaagaaagaataaaacaattctcacttgtccaatctcaaatcgagaagataaaagcacaaatttcggatcacaataatcagcatgacaatggtccggtcaatcattccaaggacaatcatgatttgtcaaccagaaggctttctgatcttcaagcggagcttcgcaatttacagaaagagaagtctgatcgccttcagaaggtcttcatatacgtcgatgaagtgcactgcctatgctctgtgcttgggatggattttgcaaagacagttaaagatgtgcatccaagtttacatggggccaactcagaaaattcaacgaatatcagtgatagcactcttgaaggtcttactgagaccatccttaagctcaaagtagaaaagaggactagagtttcgaagttgcaagaaatcgtcggaaagctccacaagttatggaatttgatggagtcaactgaacaagagaggagacatttcaccagagtagctgctgttcttggatctactgaggaagagatcacttcatctagtgtcctgtcgctggagacaattcaggagacagaagaggaagttgagagactaactaaacaaaaggcaagtagaatgaaggagcttgttcttaagaaaaggttagagctagaagatatctgcagtaatgcgcatatggagcctgatatgagcacagcacctgagaagataaccgcattgattgattctggtctagtggatccttgtgaacttctttccagcattgaaacacaaatagcaaaagcgagggaggagtccctaaccaggaaagatatcatggagaaagtagacagatggctatcagcttgtgatgaagaaacttggcttgaggaatataaccaagatagtagcaggtatagtgctggtaggggtgcccatataaatctcaagcgtgcagagaaggcaaggatacttgttcaaaaaataccatcaatgattgacaacttgatagctaaaacatttgcgtgggaggatgaaagaagtgtgccatttttatatgatggagcccgtcttgttgccattttggaggagcaaaaactcagaagggt

SEQ ID NO: 16010 - DNA, 1006 bp, Oryza sativa
  ref <308>: DATABASE ACCESSION NUMBER: AK066518
  ref <309>: DATABASE ENTRY DATE: 2001-12-06
gcgtttctctagtgatcttctttttcttttcttttgttttctgtctctagcgaactactagttcttggatccgatcgaccgaccctaccacccttgatttcatggagtgcatggcgagtactgaagagtctctcccagcttcttcctccatggatagttgcagcggcgaactgccgacgacgacgacgacggcgccggcgcaatccacggcgtcttccggctgccgaccgccggcgacggcggcgaagcggcggagtctgatcagcacagatcttcgcctcgggctcaccctctcctccgtcgtccacatcgacggcaacaacccttctaccccaaggagttccctcacgacggcgacagtgacagctgatcgaggcggcggcggcggcggccatggacggcgacggtcactgttcgtgaaggtgtacatggagggcgtccccatcggcaggaagctggacctgctgccgctagacggctacaaaggtctcgtcgcacggctcgcctccatgttcagagcatccatcacctatcatcattgccatcgacagttcgccgtcgtcgggatgaagacgaacaaggttcatcatgttctgacatacgaagaccaggagggagactggatgatggctggagacgtgccatgggagctgttcctgacaagcgtgaagagattgaggattgcaagagcggatgacaagtactgctatagctgttgaataattggttaaccaggatggtcaattaattcttccagagttcttggatttcattcattcttactttgctcattttggtggagcaatttagatttgagatgattgttttcgggagcggaaatttactagtaaaagcatagtgatattgagcagaggatattgtacaaaatatattgtacacactagtaaaagaaaagaaacatatatatagaaataccattttacttctcagtctagaataatttattccgaactggcaattttactgtatgaaaaataattttctc

SEQ ID NO: 16011 - DNA, 3603 bp, Oryza sativa
  ref <308>: DATABASE ACCESSION NUMBER: AK066519
  ref <309>: DATABASE ENTRY DATE: 2001-12-06
gatctccccacgttgcatcccgtcatccccatcgagcgatccccttcctcctgatttctgtctagaggcggcatcgatgctcctcgcctcctccaagatcttccatcgtaggtcgtcacccacgacggcttgccatctgctatcccgtgcccagatgttggatgcatgatctcctccgtcggcacaatccgtgtagccgcatccatcggcgttcgtctccccgtacggtggcgaccggattggccactgaccagtgcctcatctccgtacacgggagtggggttttcttctgttcaagctccctcctcggctgctccgttcatcttctctggatttctctgtggctgcaagcctgcaagatggagctgagttgggaggctgagcaagcagcaacaggaggaatcaaggaacaagggggaaaatgtgagggaggaggaaactgggatacctaagtaatttgctaatgcgtttttaggctacctattccaatccctcatcgtatggtgtacattcagattcagatatgattggcttgatatttaggagaggccaaatcaaggaatgcaaataactatagagttgtacagggttccttaagccctctattaagttcaaccataactcgagctgtcaacttgcaagggttttcatcctgtctatatggtcaaatattgccactctgtaactaaatgttgtaaggtatgtgatcctcaatccaatgtttgcgtattaatttacttattgtatcaagcttttctattaacagagttgtggtttcttgtttttcttgttctgtatatattgcaattcaatatttttatatcagctactggatgacaatgattttcgaaaactgacatggcacctcacttggtcgcattaacgaatctagagtcatgttctacttaatttcagcgatatgtgcagttcattatgattttctctaatatatgatgtgtctcagcctgtgagatagttgccagacacttataatcggtaggtcatccaagatacaagtacaaagcaagagatattcatcaaagggtacacaacaattttgtaggtaagtggctttcagttttgttgtaaaaaaacttatgggaaattttagatgtgctactttattcgctgaagtgttatctgtatagattagtttcacctcattatacacgagttcatgcaggaccaacacaaattattgccttgcattctctatattcttcactgtgtatgatacataacgatataagtgatatgatggcattaaactattgagaactgcggtttggtattatgtgccagattacccatttcaaaattatacaaatgaaacatcctattgcaatagctattgttcggctttaaatatctgaagaggattttaccaaattgttctttcgtccaggacagccatggtatctgattattctcaattgttcttgatcttcagacaagtgaaaaatcgttggtcagtttgaaggaacaaatttcctcttgcaaaatacctattcctgtctagagggccaatgcactatcctcagctcaggaaaacataatggatgaagctgtcaattgttccactgagaaacaaacacaagataagataatagtgaacattcatactgcattgatctctgctctgagttctgagcaagaggtaaaccttatgaactttcttatttgatttatttctgagatgtgcttattaaatttttgcatggtggcattagtaatgttatatggactatcaggtcaatcttgacgcttcttgaattgaatcaatgcaaaaaaaacacgataattatttttgccctttgtatcatggagaattagtagacattttatgttcagatattatagtcatatgtgtttacttaaaagccgtgggattggttgaaggttagggccgccacgtcagcaaattttacaaaaaagaccctgtgtttttgttaattacatactggttcccaccaacatcgtccgttcgatctcgcggtagagccgatctaaccgtccacgtgtccactgtggcggccctttctcagccgtgggatcgtcgaattggcaatcaacggcatagatttcgtccggccggaccaaaccctagccccatcgcccgtctcggacgcagcctggcgcacgcctctcccttctacgcgactacgccgccacgccgtcgcctctcgccgccgcctcgcccttcttcctttgcgcgcgccgtcgccgctgcatcctcgccctcctccggccatcctcgccctagccgcactaccaagccccgcgtgtgtgacctcgcctgtcgccgccgccgctcgactgccgcctccgccgccgatcgcctgccgccgccgccgccgccgcggctgctcgcctgccgccgtgccgctcccctcgctccgcacaccaggccaccttctcccctcttctcccctctcatctccaggccacccaccgcctccctcttcctctccctatcctcggtgagctacagatccggttcgggggtcatcggaatcgatggtctcggccattggtctcctcgttggtgaatcattttgatacccctttcagccacaattgttttgtgcatacatttagcacaaaatccacaaggtaaggcaatggttttgactcgccattgagcatttccattgcgtttgctggtgtttttacatgatcccacatcttgccttaggttctgtggagaaattgatgggctaggatgaggtgttggtcgcagattacagagaggacgacttttatgctgcgcatctacagtcatactgagcaaatcctctcttaagcagggctgcgatatttagattatgttcaacaaagaaagttggtaggatcatggaggaaatgaatcttatggttattttttcattgcttggtggtgtttcagacaactcagtctgctgccatatatccataaaacaaaacgttccgacaggatctgtcgagtgactgatgaattacgatgaggtgttgttcatagataagagagatgtcttgtgtggtaccactctgttgtgccatcctgccgagggacccatctagctttgtcctcactcttaagcatgattcatgttcatgctcagttttgtggattcaagtttgaagaacacaaacaatatgcagtttcagcagggagattcatcttgcaggacacaattcatcttctttaccacagagattcctttctgatgtatataatggtgaatagagaaactcatgtaagagcaataccacctcagttactgccaaaagatcagagaatcgcctttcaaaagctgagccagcattgctgctcttgaaaaacacatctatttctactatttttgtttggtgatatttgtatcccaaaacctatatttagactatatcatggtgtgtatttttgtgccgttttggtaattgagacattttttctctattggtcatgatttatgctacataaaagagactgtacatgggaggcctctctatatacgatattacttctcttattttgtcattaaaatcattagtacagttgtaagttactccttggcaaactccaatggtttatcggctttacaaacactgtacaacaaacattgc

SEQ ID NO: 16012 - DNA, 2571 bp, Oryza sativa
  ref <308>: DATABASE ACCESSION NUMBER: AK066520
  ref <309>: DATABASE ENTRY DATE: 2001-12-06
ggacgggcgaggttttttgaaagcatcatcctctctctctcctcccccatcgactacccccgacacccaacggaagccgtagaaggagagagaggggaaaagcttgctattttataccctcatctagggttccgagcccaccggctctctccccccttgctggcttcgagccatctctcccgccaccgcctccccccctccccccctccgcctccgatagattcgcgctcgccctcctgacccacggattcggttcccacgaaaccgctcgatctgggggatctgctagattcgtttgtggtggtggtggtggtggtgaggatgtgcttgtgccgttagatgggggccatggcgatggtggagcaggaggggtgcgtcgagaaccggcagcccctggcggcgtcgagctcgtcagtttccgacggaagcagctatggcggcggcggcggcgggctcgcgcagatgtcgccgccggtgtctagctcggcgaattccatctccggtcttaggcggacaagcgggccaataaggagagcaaagggtggctggacaccagaggaggacgagacattgaggaaggcagttgaggcttataagggtagaaactggaagaaaatagccgaatgttttccatacagaacagaggtacaatgcttgcatcgatggcaaaaggttcttaatcctgaacttatcaaaggtccttggactcaagaggaagatgatcaaattattgatcttgtaaagaagtatggaccaacaaaatggtctgtcatagctaaggcattacctggccgtatagggaagcaatgtcgagagaggtggcacaatcatctaaatccagaaataaggaaagatgcttggactactgaggaggaacaggcactcataaatgctcatcggatttatgggaataaatgggcagagatagcaaaagttcttcctggaaggactgataattctataaagaatcattggaatagttctctcagaaagaagcaagatatgtacaataccagcaataatatggtagttccgaaactgcttgttcatgataagttcaaggataaaccaaagctgatggctatggagggtcatcttgatttgaacaaggcacccattatcaattcaaaagaccaacctggaacagctcatcggtctaattgctcagggtttctatctcgttcctcattaccaactgctcagccacttacttcccgtgaggcatctgtagttgatggttccgctgtcactttagtggcgcaagctctggaaagtgattctgtccgtggtaagggcttggaaattgattctgttcatgagaaaggtcttgaggttaactcggcacctgatcataccgggaactcttggaccattcaactagaagctgcaccatccaaaggtgaagcagaattatctttgaagaatgaggcacgctctcttggtccactttgttaccagatccctaacatggaagatgtagtccctgtgagttcctcactcttttctgaccatcttactgggaaccatacatctgaacattgtgggggtgatatattgtcacctgctggctgcactactccccctccaacaaagggaaaattaacaagccagcttagtgttgattcaattttgaagagtgctgctaacagttttccaggtactccttcaatattaaaaagaagaaaacgggataaatcaacacctgtttcagctagtgagatgaagatcagtggatcaaatactgatagattttacactcccatggggatggaacctgctacagctacaccagagtcattcaaaactacatcttttttgtcattgggttctcttgatggttctgtaaagagctttgatgtttcaccacaataccgggcaaggtcaaaaagaatggctctcacgaaaacagttgagaaacagctggatttttcatcagatggattagatacttgtggttctgagattctgaactcttcctgcaataattcccaaagcacactttctattaccgaagccccaaaactgaaagaaaaggaacatgctgttcaattggaaaatttaaccaagaactttgcgcatacaaccaatttggatgtaacctaatcttggaaaatgcaggaactgacatcaatctgatgaagtaggacagatgagctgaagtgtctttctgagctgatgagctttttctcaaagtatcacgattaaaccacaacaagatcaaacaaaaccggtggagaagaattccagaattgaagctttgtactgagtacagaaggtccaccaatcattctcccatctcttctaaccaaggtgtacaaaagatgagcgacactctgtagaagaatacattgctcgctgcactttgtgaatttacggttagaaaattcagattgtagaagccacaggtgtgtacaaaacaacaacgaaaaaaaattatagtgttagaacgtcattatagctgaataagagtattcctcattggattgtcagatttattttgtcttgtgctttccctttgtcgcgaaacagccagggtctgctctgtgtaacaataataaaacccgtttttgc

SEQ ID NO: 16013 - DNA, 2019 bp, Oryza sativa
  ref <308>: DATABASE ACCESSION NUMBER: AK066521
  ref <309>: DATABASE ENTRY DATE: 2001-12-06
gagtgcggaagaatggaggcgctgcgggcgtggagggcttcctccaatctcctcggcttcgcggcctctcgcgccgccaaggccgccccagcggcgaggcccctccgcccccacgtccgctgctgctccccggccgccgcctccaccacgaagccgcccccgcccccacctcaggaccgccgccgccgaagcgcctcctcgtcctcgtcctccacctccgaccgcgaatccatccgcgccattcgcctcaaaaaggttgaggagctgagagggaagggctacgagccgtacgcgtacaagtgggacaggactcacactaccaaggagcttcaggatgggtacacccatctcgagaatggcgaggtctgcgcggacgtggcggtgtccattgctgggaggattgtcgcccgaagagcgtttggaaagcttgtttttatgaccgtaagagacgattccgggactattcagctttactgtgagaaagacagccttactgaggaacagtttgaacaactgaagacaattattgatattggtgatataataggtgcaaatggttccataaagaagacagaaaaaggggaactatctgtttacgtgaaaaactttgaaatccttacaaaatccttactcccactacctgataagtaccatggcttaactgatgtggacaagcggtatcgccaaaggtatgttgacatgattgcaaatcctgaggttgctgatgtattccgaacaagagcaaaggctgtatctgaaatccgcaagacaatggaatcatttggcttcatagaagttgaaacgccagttctacagggagcagcaggtggtgctgaagcaagaccatttataacccaccataactcactgcaaagagatctttacttgaggattgcaacagagctgcatttgaaaaggatgctggttggagggcttgagaaagtttatgagattgggagaatatttcggaatgaaggcatttccactcgccataatcctgaatttaccacaattgagatgtatgaagcctattcagactatgaaagcatgatgaatttggctgaagaaattgttactagatgtgcaatggctactcatggcaaacttagggttgattatcagggaactgaaatctcccttgaaagaccatggaggagggaaaccatgcattctcttgtcaaagaagcaactggaattgactttaatagctttggagaagatcttgaatccgccaaaaatgctgcaagagggatcaaaacagagagcaatgagaatatctcattgcaagcttgttcatctgttggacatgttctcaatgaggtctttgagactgttgttgaatcaagtctggtacagccaacatttgttcttgactacccagttgagatatcaccattggccaaaccacataggaggtatgctggtcttaccgagcgatttgaacttttcatatgtggtcgtgagattggtaatgcattttctgagctcacagacccaattgatcagaggggtcgttttgaaaatcaaattaagcagcacaatgctaagcgtgctgcaatgaccaaggaggtcaaatctactgagggtaaacacgaggaagatgatttttcgtatgaagttaccttagatgaagacttcctgacttccctagagtacggaatgccacctgcttccggaatgggccttggaatcgaccgactagtaatgcttttgaccaactcggcgagtataagggatgttattgcctttccagtcctaaagattcaacaatagcacttctgctcggatagctctaccattactctctttctaaaatttgagtggatacaggcgagggtcaatagtccagccagatagtcaaaataggtatcaattatgaatttcattttgggtttccattttccaacagccatttttcattcaggaatactatataaatctgtactttccacccactttcaggctaatgaactcttgctacatttcagagatataaagtatttgcacattgcacggatt

SEQ ID NO: 16014 - DNA, 1373 bp, Oryza sativa
  ref <308>: DATABASE ACCESSION NUMBER: AK066522
  ref <309>: DATABASE ENTRY DATE: 2001-12-06
gaaaccgaaacgacaccaaccaaccaaacagacgccaccggataaacaaaaacgcacgtagcagcagcagcagcagcagccgcgatgctcctgacgcgcgcctccccaccttcctcccctccacctccgccgcctcgccctcgccgcagcaggcgccgtcctccccgaccttcgggaggagccagtaccgccggggaggtggattggtctccgtttcttctccggtggccggtcagcgctgtgctgccaggaggaggtccgtgatggcggcggccggcgcggtccccgcggcgaagctggagaacgccgacgcgctcatcgactccgtcgagacgttcatattcgattgcgacggtgtgatttggaagggcgacaagctgatcgacggagtgccggagacgctcgacatgctcagatcaaagggcaagaggctggtgttcgtgacgaacaactcgaccaagtcgaggaagcaatacgggaagaagtttgagacgctgggactaaacgtcaatgaggaagagatcttcgcttcgtcgttcgcagctgccgcgtacctgcagtccatcgatttccccaaagacaagaaggtttatgtgattggagaggacgggattctgaaggagctggagctggctggatttcagtacctcggcgggccatctgatggagacaagaagatagagctgaagcctggattttacatggaacatgacaaagatgttggagcagttgttgtgggattcgatcgctattttaactactacaaagtacagtacgggacactgtgcattcgtgagaatccagggtgccttttcattgccacaaaccgggacgccgtcacccatcttactgatgcccaagagtgggcaggtggagggtcaatggttggtgcaattcttggttcaactaaacaagaaccgctcgttgtcgggaagccgtcaacattcatgatggactacctggcaaagaagtttgggatcacaacatcccagatatgcatggttggtgaccgtttggataccgacatcttgtttggccaaaacggaggttgcaaaactcttctggtcctttcaggtgtcacttctgtacagatgcttcagagccctgacaactcgatccagccagatttctacacaaaccaaatttctgattttctcaccctcaaagcagcaactgtctgaagaaatgggaagtaaatgtgttacagatgggcgaggccccttacttttgtataggcggcatccgccaatttttagcaactaaggtcacaaggatgctttttctttccacattgttttgtaaccatgagacaaatgtttatacactattatatgtaacacaagtgcatatcacaatggatactattgaccact

SEQ ID NO: 16015 - DNA, 2061 bp, Oryza sativa
  ref <308>: DATABASE ACCESSION NUMBER: AK066523
  ref <309>: DATABASE ENTRY DATE: 2001-12-06
gatgcgaacaacgcttttatgaatcgtctcatcttcatgtcctattactcctaccactgagagagggccactctttcccctcgagttcttcaccggcttctttcccctcctctccggaccagggaagcagctaactgtctgcgcaagaaaggtggttcaagcacgatgggacggaaccatctttgcctggtcacttgcttgtggattctgtcatgcgcagttctgcttcatgcttctcctgatggattgctgagaattagcctgaataagaagagattggacaagaagaccttggacggtgcaaaattggcaagggaggaaagccatcgtctgagagccgacggtttaggtgatgacatagttcctttggacaactacctggacacgcagtactttggagagatcggcatcggcactccaccacagaacttcactgtgatattcgacactggaagctccaacttgtgggttccatcagtgaaatgttatttttcgatagcatgctacttacaccacaggtacaagtcaaaagggtcgagcagttacaaaaagaatggagaatcttgcagcatttcctatgggtctggatcaattgctggtttcttcagtgaggatagcgtgctagttggggatcttgctgtgaaaaatcagatgttcattgagacaaccagggaaccgagccttactttcatcatcgggaagtttgatggaattcttggacttggatttccggagatctctgtgggaggagcccctccaatttggcagggaatgaaagagcagcaactgatcgagaaggatgtattctccttctggctcaaccgcgatcctgatgcaccgacagggggtgagttaatctttggtggtgtagacccaaatcattacaaggggagccatacatatgttcctgttacccgcaaaggctactggcagtttgagatgggggatcttcttattgatgactactcaactgggttctgttctggtggttgcgccgctattgcggattcagggacttcattgctcggtggcccaacaactattgttgctcaaattaatcacgcaattggagctgagggaattgttagtatggaatgcaaacaagttgtgcgggactacggggacatgatcctcgagatgctcatagcacaggcaagccccatgaaactgtgctctcagattggtctctgtgcatttgatggtactcgttctgtcagaaacaatatagagtctgttgttgataaagaaaaggtgggctcagatctttcctgcactgcttgcgagatggctgttgtctggatacagaatcagctccgacataaccaaacaagggagctcattttgcaatatgctgaccagctctgcgagcgtctcccaagccccaatggcgaatcggcagtcgactgcgatgagatctcaaacatgccgaacctttcattcaccatagcaaacaagaccttcaccttgacaccagagcagtacgtagtgaagctggagcagcaaggtcaaactgtttgcatcagcgggttcatggcgttcgacgtgccacctccacgcggcccactctggattcttggagacgtgttcatggctgcataccacactgtcttcgactttggcaaaaacaggattgggttcgccgagtctgcttgaattgcttggctagggccttcaggatcatacaacatatcaagtattgtaatgtttgttaggcagcttgtttactcggtattgtaacctgggaatgtctaaaggtatagtgcattagtagtagcatgcaaaaccttgtagaggaataaacgttttcacgatggagctgtatcagctatggatatgcagatatggatcttggatggtgcaatgcagatgtaatgagcaaatgagcacgatgagaattagggctttttaatctgatctcatcatataggtaatggtttgtctggcatataatgatgggcctaaaacttctggcgaggttaataatggctgtactgactgtttatgcaccttaacattcagagttcaaaatctctcattaaccaatttgtgatggatgcagcc

SEQ ID NO: 16016 - DNA, 2246 bp, Oryza sativa
  ref <308>: DATABASE ACCESSION NUMBER: AK066524
  ref <309>: DATABASE ENTRY DATE: 2001-12-06
gccacttcccccctcctcctcctcctcctccttcggtagatctctcgcggcagcgcagcctccacctcctcctccttctccggccacggcggccggcattagaagcagcggtgggggtcccggggcgaagagcggcttgcggtggcggtggcggcggcggttgggtaggtgcggcggccggcctcggctgcggcggcggcggcgatgtataagaaccagctccaggagctcgcgcagcggagctgcttcaacctgccggcgtacacctgcctgcgggaggggccggaccacgcgccgcggttcaaggcggcggtcaacttcaacggcgagcagttcgagagccccgggttcttcaccacgctccgccaggccgagcacgccgccgcggaggtcgccctcgccgccctcgcccgccgcggcccttcctactccctcgccgcccgcatcctggacgaaacaggggtttacaagaaccttctccaggaagtagcacagagggttggagcaccattgccttcgtatacaacagagcgatctgggcttggccaccttccggttttcacatgcacagtagagctagctgggattacatttacaggtgatcctgctaagaacaagaaacaagctgaaaaaaatgctgcttcagcagcttggtcttctctgagacaattggtacgtcaggaagcgagttcatcaaatgaacctgagagcaatgatgagcaggagcagatcaggattgctcgagctcttctcaactatcgcctgaaggagaagatggcgatggccaataatccacatgcttcacccttcccaaagaaatttccgatgcagcccgagaggaggacagcatttcctcaatcctctcactccagctactcgaagattctccctctatttcgccccaagtctaattcaaggtcaaggccagagtcgccagcagcgtctgatgcagcatcacagactcctttccggccaactgaaagtccaaatccaaggtcaaggttccccgctgcagaggcggctccttatgtcccagttgggcacttccgtatgccttgccatagcatggctcctccagtcacagtcaggacttctatccctgttttctctgctccacctctcccacccccaggtgcgcggacacaacagcttcctcctctcatgagccacccgccgccaattcgaatggcttccccggttcgcatcaggccagctcctcctctttttactccttcagcagtccaagggccgaaacctatgatgcctgttcagataaaggatgtgcaacaccaacaaataaaggaaacccggtcacctgtgatgcctgttcaggtgaaggatgcacaaaaccagcttcttaagggatccctttcacctgtgatccctgttcagataaaggatgtacaatcccagccaccgaaggaagcgctgtcacctgcgatccctgttcagattaaggatgtacaactccagcctcggaacgaaccagtgtcaatcggtaagggggtggttccattgccagcgattaggcctccggttaaggttgaggctccagctgaagtcaaggaagcttcacaacctgttgctggttcttctgtggtgcaatgcaaggctgatacatcgccggactctcttccgaaaacccagttgaagaccgccaacgccgacaacgctgacgccaaggatgatcatctcccggtggatgctgaagaagtggaggacatcatcaggcatctcgagctcaaataatttcagaaagcgtcaacgaacgaatggggcgtcatcttctgtcagattttgtaattagctgcctcctcctatgcacatcccttttctgttttagttttgtttgcctttggttcggattaggggcgctgggcaagctgcatttctcgtaggggacacctagcttttttttttttgttcagaagagagggaaaaaaatggacaagacatacatgcagtggtaggcggtttgcccgttgtttggagatggatggttggttatacttccctggatatgcagttggtggtctgcttttacccccaatgatgaggtggatattgttgttgcctctagggaaggaaattatgtggcggcagttttacctcctaaaatttctcctagtcattctcctaatcctcttattactattatactcctgctttgccatgctgatgtttagaagttggtgatagtagagctgtagaggtaactatcttttctcactaatttttgtcctttc

SEQ ID NO: 16017 - DNA, 3173 bp, Oryza sativa
  ref <308>: DATABASE ACCESSION NUMBER: AK066525
  ref <309>: DATABASE ENTRY DATE: 2001-12-06
gacacgcctcggccccgacccaaatcccccgcttttctcctctctgtccgatcgcctcctcttcctcctccatccgccgcggccgccgtaaaccctagccatcgccaccaccaccgccaccgccaccgccacgctcgcgctccagcttgaccgcggtgagggcgacgtcgctccccgcctcgaccccgaccccgcgcgtgcgggggagagatagggacccccaaaaccctagcaccccccgtcgcccagatcccgatcccgcttgtggggggaaggggccccgcgcgcagggatggacgccgcggcggcgcgcaaggagtggcgcgccgtccccgacgccccgctccgctccaatggcgccgacgatcccggggagcatggcaagatggggcaatccgaggacagagccatgtacgaggacgggggtggaagactggatgattactgctcgatcaccatcgacggaagcgggggcctcagcgaggacatcatccagcagcgcctgcagagcgtcgtgcatcagcgggaggagcttcagcggcttgagatggagctgcgagctcaggtcatcgcccacccgcagatcatcgaggcgcagcgcagcttcgaggctgctgccaaggagcatgtaacggccgcggcaaagctgaaggaacaactgcatgaacgggaaaagtacatccttgagctcgaaatgaaattggatgacaaggacagggaactggatgctttgaagattgaccatcaaacggtgtgggcaaatcaagatcttcttagagaacagacaaaagagcttgcaacttttagaagggaacgtgacaattctgaagctgaaagggcacagcatcttaaacaaatccatgatctccaagaacatctgcgagaaaaggaaagccaaatgcttgcattagaggaacagcatagggctgctcaagataacattatttacaaagatgaacaattgagggaagctcatgcttggatggcacgagttcaagaaatggatactttacagtctcagacaatgcaagctgagttacgtgatcgtactgagcaattcaatcaatattggattagtttccaacaacagtatgttgagatgcaaaggggttttctgcataccatacaacaacttcagctagaactaaatgaattaagagaccgaactggagcaccaaaagatggttcacaaactgcacaggagagttcggccgagtcaacacttggtcagaacaaagggaacaacatggctgcaaatggtagtggaacaacagatagtagtcagtcagtgaaaagtaatggagttccagattgttccacaaagggaaacagtaatgcctctcctgtacctgttgttccttcatcactgttgggtataggtggttttgttccttctgcgcagattgccgggatgcattcttatatgatgcatcctcaaggtgttcctccatctttagcatcgcctaactccgctgttcctcagtttggtagtttccagtcacagtcgacaattcaaccaaacatgcagtggcccaatcaacaggaagctcagaatgcctctcagacaccagatgaaacaaactatcacacatccccaccagatcagaaggcattgcaacaagctgctggtaataatgatgagctttctttgaagcagaatcaggcaacccgtgcagaacatcttacagctacagcccatgggaaacaacagcaacaacaacgtttcccaagtgtggtttctgaatccactcatgaacaaaagttacaggttgtggaatccaatgtaactgaacatttagtttacaatgagcaacaaaaggcccaggattcatcttcaattgtcagccctattcgaaaatttgaacatcaagagcaaacaaatgaattcaaggatgaaaaagttgcatcgggcaaccagtcggaggagcaggtagctaggcatcagcataaagcttcagattttgatgcatcaactactcaaatccacttgaaaggtggtgcagcagagttcactgctaacgttgggaatcagactgacacgcatacttctgctggtggtggtttgggttcactcttacctcgcataccaaaggagccttcccttctagatgagagatcccttctggcttgcattgtacgtgcagttcctgctggacctgatggccgaatcaagattagcacaactctaccaaataggcttggcaaaatgttggctcctcttcattggcatgactataagaagcactatgggaagctagatgattttgtggctagccatccagagctctttgtgattgaaggagacttcattcaccttcgggaaggagcacagcagatcatttcagctactacagctgccgccaaaattgccgctgttgcatcttcggctccttactcattgttaccttcagttgctgtcactcccgtggcacaaagcactaggcaaaagagaggacctgttgttgattccagatcttcaaatgtaatgccatctagaaatgggtctaccactgctagctttggagatcagtttgacaagggtggacatatcccaaaacccaacgatagtgttggttataacattgttcaggggattggtgatgtaacaattgcaagtaaagtaaaagacatccaggagaatggcttttcagatgaagttcgacctgggcagtcatccatgcatgctgtttctgcaaatggagtcagacaggaacgatctggccttcctgcaggtaataccaggcatggttatggtgggaagcaacagggaaggtctacggggcctgcatacatttccagaagatgagcaagtggcttgtcgttcggtccagttggtttgaagggcagtgagcaaatcatgtgaagctatgttttggtttaaggtttaaaagggttgaagtcgaagatgaccagaatgaattgttgtgaatttaattccgcaccaattgcttttcgcagcgcctgtattgggccatgttttggcaagttgtactgaaactagttcccgatcagaaaatactgaggaagttttgcaaccattgtaacttgtctatgcctgcgtgccgtggcgtggggcacccgaatgatagcatctgtgcccttccatggtgttacgccacattttaaactgttgaattttagccagcatctatacagtaccagcgttttttagc

SEQ ID NO: 16018 - DNA, 1533 bp, Oryza sativa
  ref <308>: DATABASE ACCESSION NUMBER: AK066526
  ref <309>: DATABASE ENTRY DATE: 2001-12-06
gattcacgcgattgacgcgagcgagggacgacgactccgacgatcttactccggcgaggcgagacgacggcgactgccgaccggcgagttcgctccatcttccccagagaaccccctcattctccctccggcgagctttcttcgacggagaagacgagacgcggacgagcgacctccctccggcgacgacaacagcctactccggcgagccccctcctccctacggtgagtccccttctcctccctccggtgagccgctaccgcctcgccgcgcgcccttgtccgccgcccaccgccggtccgccgcctcccagaccatccctctaagccccgatcccccacttccccctcccaagcgccaccctccccccacccccacatccccttcgcactcacgcgcagcgcccgttgaccgcgccgctgtcaattcgccgccctcggctgtcgcggggtcgcgcggtcgcgggatcgcgccaccgcccttggccgtcgcggggtcgagccgctgccgtcggccgtcgagctaccccgagaggccgagaaaccctaagatattaggatggataaggtgactcaagctgttgagaacctaaaggaggaatggaatcaagctgttgcacagcttgaagggtgcattgctgcaattgaatcatgtgggaagatgggaaaggggacagaggaagcaagttcacttcctaggttaaacggttctgcacaggatgcactgcaattgctcaattcactacagtgcagacttgatcctctggcagagcagctacccacttttgaagaagtacagtctggccaagcaaccctgcagtcatggaaggaacagtatcagaagctgcgcatgaggctgagaaatgctaacttacaagcaaatgcaaacattaaaaaagctgctcaagaagagagggagcttcttctagggggtggagaagaatctaccatccgcaggcgtaatctacagacaaaggctgggatgacatcggctgcagaaagtataaccgagagcctccgccgatctcgccagttgatggtccaggaagtggaaagaagtgcaaataccttggcaacatttgatgaatcaacaagtgttcttcgtaaggctgaaggtgaatatcaaggacaccgctctttgctgatgcgtactcgtggtttgctatctacaatgcaacggcaagatgttcttgataggatcatccttaccattggttttctcattttctccttggcggtgctatatgttgtctcgagacgtattggcctgttgacactgcaaaggaagctggccgatgccatcagatcaggctcaatatcagctgaagacgttgtagcaaaagtcaagaatgtgcctgtcccagcacctgctgctcctgctcctgctcctcctatttatgatgaactatgatttacttttgtgtattgtttgtacatgtagattcagaagaaaatattcaccatcattgtcagttttatatagtaaactttaaaaattctgattaaggtctctattaactttttttaccgagt

SEQ ID NO: 16019 - DNA, 967 bp, Oryza sativa
  ref <308>: DATABASE ACCESSION NUMBER: AK066527
  ref <309>: DATABASE ENTRY DATE: 2001-12-06
gttccccttctatccacccacaccagcaagccgctcaggcgcgctctccgctccaccgccatggcgtccatcaccctcctctccctcgctcccgcggccacattgctccacctcccggcctccacttcgctctccacctccttcgtcgccgctccaggccccatctccggccgccggtccgtcgtcctccgcgcccgcccgcgccgctgcgtcacggtcgtgtgcagcgccgcggcggccgaggccgcggaggcggagcccgcggagaagttccggctcgacaacctgggcccgcagaaggggtcgcggcggcgcccgaagcggaaggggcgcggtatcgcggcggggcagggcgcgagctgcgggttcggcatgcgtggacagaagtcgcgctcggggccaggcgtccggcgcgggttcgagggagggtagatgccgctctaccgccgcatccccaagctgcgcggcattgctggaggaatgcatattggcttgccgaagtatgtgccgttcaatttgagagacttggcgcgtggcgggttcaaggatggtgacgagatatcattggaatccttgaaatcgaggggtttgattaatccgtctggcagggagagaaagcttcctctgaagattttaggagatggtgatgtatcagtcaagttgaatatcaaggctggggcattctctgcttcagccaaggagaagctcgaggcagctggttgtactttaagtctggtaccaaagcggaagaaatggctaccacaatcttatctgaagaaccaagctcgtgcagaagaatactttagcaagaaaaatggtggtgctggtgaatctgatgaagcatctgcatagaattcatatacactgtacttctcctttacccttttctttaacatatacttatttctcttaccttgttccaaaagttccacgttcaacgaattttgaatccgtgcgatatgcaagc

SEQ ID NO: 16020 - DNA, 1785 bp, Oryza sativa
  ref <308>: DATABASE ACCESSION NUMBER: AK066528
  ref <309>: DATABASE ENTRY DATE: 2001-12-06
ggatgtgctatcgcagagatactcggtatgttaccatttcaacgaatcacaatgctccatatgtagtgaacaaatatttcattacaaccacaaaattgacactacgcgacagtgatgaaactgttaagtatagtagtatgtcaagggtattagagtactttcccctctcttgtgttccccctctcttgtgtacatatatgtcatttagggccaaatcaatacaagattgaaatcccctaatctctctcttaccttgagatggtatcagagccttactgctaatcctacccaccaagttcccatcggcggcacgccggcggcggtcgccgccggcgagccattgtctcgtactaccgtcgtcttcgtcaagttgttggtagcatcgttgttcgtcgtcccgtcctcaagcctgtcaagcagcagtcaggagcatcgtccttcctcatccacacgcatcagtgcacgccgccggcggcaaccccgtccaagctgtcagccatgtcgtccccgctgcggctcgtcgtcaatcgcgaagccgtcctcaccagccgtcgtcctcgctgcccgtcgcagcgctcgtcaacggcatctgtcactgccgctcgtcgcggcgtgcatctcctcaccagctccacacctcgctgcctgtcgtaaccccttgcgtggcgccggtcctctccgccaatcaggccctgtcacccgtttgtagcagagcaagcagctgccgctgccggcagatccttcagtcttggctattgcctgtaaactgcacaagtccatatgctgcacacaaggtgctcgacaaaatgcttcaaagagttgctcccagcttgtggtcatgcttttgcctttccaatttggtgctttactgaaagtattcgtggtctctcattaccatctcctgtccatcttcatcagctacttctctctgctaccaaattggatagaattaatcagttaatatgcaattccttggcagccacaattatgtcttttgctagcatatcaatgtcctctacaaattgatttcctttgtttcctatgatcctatctagtttatccattaaagccttgctgcatatctattagtatcattgtgtcatttactagttgccattcaatccatccaagtccattgcatattcttcaatccgtccaattgatctccagcttcatatcagctctccgtcggaattggtctatcacttcaccagctccacatcggagctggtctgtcatatcaccatctccccatcggagttgacatcatcatcactcaatgaaggactgaagaacaatttgtgaaggtcctttatcagatctatgaaggtccgaagaacagtttgtgaagggccttccatcatcgtcaacgtctctgaatcaatgaagagccgaagaacgagtcgtgaaggcttcaaggtaccgagggccgaagaacagtttgtgaaggctccgaggtccacttcattgaagaggagatggatctttttcttcttcatcgtcatcatccaagaattggcacactttgacgacatcatcaagactttggagataggctaatatttagtttgtgtcctagtgtttagtttacccttcaaatgcaatgttattgcatacacattgcatttgagtgggggtgttaagtgtagtagtatgtcaagggtattagagtactttcccctctcttgtgttcccctctcttgtgtacatatatgtcatttagggccaaatcaatacaagattgaaatcccctaattctctcttaccttgagagaaactttgtcc

SEQ ID NO: 16021 - DNA, 1892 bp, Oryza sativa
  ref <308>: DATABASE ACCESSION NUMBER: AK066529
  ref <309>: DATABASE ENTRY DATE: 2001-12-06
gcgggctcggatcggagcagttggctgcagccgcagtttgttggagcggttggccctcgcactcgcactaccccccgccctttttctcccgccatatttctacttctcccggcccaccccccctcagctcgccctcctcccgccccccacctgctcgatctccactccgtctccatctccatccgatccaagatgccgccgaggcagtggaggccgatgctggcgtcggcgaccaagtgctgcgcggcggaggacgcggtggtggcggtggatggcagcggcggcgggggcggcctcgcgcggtgcaggccggcgcggtccgagttctcacggaggctggcgtcgttccggaagctgtcgtcgatgaccaacagcccggcgtcgtccgtcgcgggggcggcggagggggggaaagacgacggcgaggaggggggcggcggcggtggcggcgtgtccggcccgctgcagctctactccttcagcttctccgagctccggtccatcacgcacgacttctccagcagctacctgctcggggagggcggcttcggcgccgtccacaagggcttcgtcgacgccggcatgcgccccggcctcctgccccagcccgtcgccgtcaagcagctcgacatcgccggcctccagggccaccgggagtggctggcggaggtgatcttcttggggcagttccggcacccgcacctggtgaagctgctgggctactgctgcgaggacgaggagcgcctcctcgtctacgagttcatgccgcgcggcagcctcgagaaccacctcttcaagaggatatcggcgacggtgccgtggggcacgcgtctgaagatcgccatcggcgccgccaagggcctcgccttcctccacggcgcctccacccccgtcatctaccgcgacttcaaggcctccaacatcctcctcgactcggagttcacggcgaagctgtcggacttcgggctggcgaagatggggccggagggttcggagactcacgtgacgacgcgggtgatgggcacgcacgggtacgcggcgccggagtacgtgatgacggggcacctcaacatcaagagcgacgtgtacagctacggcgtcgtgctcctggagctcctgacggggcggcgcgccatggagcatgtcagggggaggagcctccacgccgaccaggtggtcaagatcgtcgactggacccgcccctacctcggcagcagccgccgcctccgctgcatcatggacccgcgcctcgccggccactactccgtcaaggccgcccgcgccgtcgcccacctcgccgtccagtgcaccagcccgcagccgcgcgaccgcccgcgcatggccgccgtcgtcgacgccctcgagcgcctgcagggcttcaaggacatggccgtcaccgtcggcctctggcccaccaacgcccccgtcgccggcaggaacgccatctccgccaagatccgcgccgaggtcagaggcgccggctccggcggcggcgcggcctcgcggcggcggagcgcctccgccaagctgccctgatcgcccgcgtgcgttcgtgggcgcgccacgtcatcgcgagtacgtatttgtatacgtgtacgtgtgtgtatatactttagctgctgtatgagatggcacggccgatgtattgtacgtggtgatcatcgagcttgattgatttttttttagccatatggattatggattattgcggaattaatactgatctgtatcaccatatgtacgtacttagtaggagtatttagttttaggtgccatgatgctggtagatcatgcatgcatgtatgatgaattgtactttcatccaccgattgctgattgcaagttcgtgcatcagtaatcggtcatttcgatattatctttttttttccttg

SEQ ID NO: 16022 - DNA, 1110 bp, Oryza sativa
  ref <308>: DATABASE ACCESSION NUMBER: AK066530
  ref <309>: DATABASE ENTRY DATE: 2001-12-06
gtatccacaccctcctctctccatcctctcggattcctccctcgctgaagcacgtggcagtgcccatccgtcgagctcagcagggcttcttcctcctcctcgactcagcaagtaggccgtcgcgccaccgctctccctccacatgcgcttgcctcggagtcggtggcatcttacctgccgccaccttgcgttggaggttgatgactgcctcctcaagctcgagcgctgcagcttcctcgcgtcgaaggccgaggaggatatgcgcaccaacggccgcctcctcaagcacgagctctgcagcttccctgcatcggaggccaccaaggtcaggaggacggggagaagcagcggaggttgccacgagacacgcgacggtcgccagccttgatggaaggggcaacggtgttggaggtcgacgaggatatgtgcgacggttgggaggggcaacggcgaggttagggaggatgggcagtactagcaaagatcggggaagagagcaagaagtcactggatcatcccagccggctaacctattcttttcccctcttcttatttcttcattctctatttccttctaaagcgacggtcgatggcggtggtctaggctaagaacgcggtggcggaacagttggtagccttaaggagtgcggtggatgatggaggaagatggtgggcggtgtagcggcgaggccacaacgcttgggcaacggtgacgcgcatgcctgcgtcgctcgggtaggacggaatcgccggcaccatccccgtcgagttgctgaggtatcacagggtggggtggtcaaacccggcgaggtcgtgcatcccgttcaacggccgttcaacgggcagctcctcaccggcagcggcgagcaacgcttagaatttgaccaccaccgataggtccaggtcctcctccgccgcttagaaggaagaaagaggcatgacatgtggacctatgttatgttttactagattgccacatgtaccgtcttaagtcaaaaccattcaaaatagtgtttagggggttatggatctggtttgaaatgttcgggctgtagaatgtctggtttcatagtttatggggtaacttgatcgatctaatagttcaggagt

SEQ ID NO: 16023 - DNA, 2452 bp, Oryza sativa
  ref <308>: DATABASE ACCESSION NUMBER: AK066531
  ref <309>: DATABASE ENTRY DATE: 2001-12-06
gatcaccaccaccaccaccatcgctttcttcctcctcgccttctgcttctgcatccatccatccatccattactcgccgaagacttcgcgcggggagagaggaggcaagcttggtcgcgggaacgcgggaagaaaggtccgagcttggaaggagaagaagaagtagccaagaacgcgagagcttggaaggcgagctgcggtggtgtagctagccaatgccggcggggaactggtagggagggggatggggggagggggcacgctcgtcgacggattccgccgcctcttccaccgccgcacggcgtccggctccaaccagtcgtccaacgccggcgaggaggccgcctcctccgacctcgaggtcgccgacgacccggatctcgtcgccctccgctccatccgcatccgcgtgcccaagcgcaagatgcctctccccgtcgagagccacaagaagaacacagtggaaatggagttcttcactgagtatggagaagcaagccagtaccagatccaggaagtcattggcaaaggaagttatggagtagttgctgctgcagtagatacccgcacgggtgagcgggttgcaatcaagaagatcaatgatgtgtttgagcatgtatcagacgctacgcgcatattgcgtgagatcaagctccttcgtctgctccgtcacccagacatagttgagatcaaacacattatgcttcccccttctcgaagggagttccaagatatttatgttgtttttgagctcatggaatcagatctccatcaagtcatcagagcgaacgatgacctcaccccggagcactaccagtttttcctgtaccgacttctccgtgctctcaagtacatccatgcagctaatgtatttcatcgcgatctaaagcccaagaatatactggcaaactcagactgcaaattgaaaatatgtgatttcggacttgcccgagcatcattcaatgatgccccttcagcaatattttggacggattatgttgcaacgaggtggtaccgagcacctgaattatgtggctcatttttctccaaatacactcctgcaattgatatttggagtattgggtgcatatttgctgaacttctcactgggagaccactatttcctgggaagaatgttgtgcaccaattagatattataacagatcttcttggaactccatcatcagaaaccttatccaggattcgaaatgagaaggccaggagatacttgagcaccatgcggaaaaaacatgctgtccccttctctcagaagttccgcaatactgaccccttggctcttcgtctgctagagcgtttactggcatttgatcctaaagatcggtcttcagctgaagaagctttggctgatccgtacttcgcaagtcttgctaatgtggaacgtgagccctcaagacatccaatctcaaaacttgagtttgaattcgagagacggaagctgacaaaagatgatgttagagaattaatttatcgagagattttggagtatcacccacagatgctgcaagagtatatgaaaggtggagagcagattagcttcctctatccaagtggggttgatcgcttcaaacgacagtttgcacaccttgaggagaactacagcaaaggagaaagaggttctccactgcagaggaagcatgcttctttaccgagggagagagtaggtgtatcaaaggatggttataaccaacaaaacaccaatgaccaagagaggagtgcagattccgttgcccgcactacagtaagccctccaatgtcacaagatgcacaacaacatggatctgctggccaaaatggtgtgacatccacagacttgagttcgaggagctatctgaagagtgcaagcattagtgcttccaagtgtgtcgctgtcaaggacaataaagaaccagaggatgattacatctctgaagaaatggaagggtcggtcgatggattgtctgaacaagtctccaggatgcactcctagtgcacaacgatgacgatgatcagtgcaagattctgtgaggcgcaccagatgctgataatttccaagcagaatgctgcactgcaagtttggactttggacaatgcaagtatgcaacagccagcccgagatgattggcatcttcttatgctcatccatgttcacatattcttcttgccattgtgctgtctgtcactacaggacccctgcatggattaatgtattatccctctgatgtaacactagattagtccatctgtccatggaggaatgaatagcaagcagccagcttgtgcatcatgtgggcatgttcattttccagtgagatctagtcatatccatgctttttttgtaatggtatatgaaacagtttatcagtgagactctggtccattcctctttgaagaactgctgagacagtgatccattcctctttgaagaactgttcattttcagtacattaagcct

SEQ ID NO: 16024 - DNA, 3297 bp, Oryza sativa
  ref <308>: DATABASE ACCESSION NUMBER: AK066532
  ref <309>: DATABASE ENTRY DATE: 2001-12-06
ggtccgtgtctctcttgactctcctccgcctcccctcccgtccctccgcctccatggacgcctacccccaccaccgccgcttcgccgtctccggcgacgcccccccgccgccgccgccgccgcagccgcagcctccacctccctcccacgcgagcccgcactggtaccccgggccgtccccaccgccgtaccctccccacgccaaccaccctttccctccccagcaccaccagtggggaccaccccaccctccgccgccgctgccgcagcagccgccgccgtatgggtaccatccctccctccctccgatgccgatgcagccgccgcctcctgcggcggggaatccctggcctcctcaccacgccgctgcccagccaccgccgcccagctacccgccgccgcctccgggccagggctgggccaatcattcgtgggctcaaagtcatggatacgcagggcatggaaatgaggaagattgggctacaaaggcgaaggcatgggctgctgctaaatctgttacagaaaaccatcatattcaacagcatgccatatccgcaaataggccagaagttcataattacggttaccaggatcagtatcagcaaccagctggtctgcccgcagaacctttacgcccgccaatccctcagtcaagtaatgaccagttgccatttcaaatgacaggacagcacagggaaacaaactatctgccagatggaggtccattggcgccaccagcaaagaactttggttcatttccatccgcctatgagcaggaggtatcttataattatccttctactccaggtgttgggaatgctatgattcaatatccaagctcgcagactcagctacctccaactgcctcagcaatgcaagacggatttccacaagcgccttccagtatgcatattgctccctcactggaacaacctcattttgggcatgatgggcagtcttccaagattgcagttgatcccagtgatcaacctttagaatttaatagtaggaaagctcctgatatggcagtgcacagaacagcaaatttcaattctaatattccagcagctccaatagcagcatctgatcatgatgcacattcagcaccagcgcaatcatggattccatctactacagtactttttcctcaagcttcagtaccaccacaagcagcacagatggacccttcagttcatgctgcaccactctttggagcagtttctggttcaagctatattccacctgcagcatttggagttggtaatgtgacagaagcattccctgtggatgcaaacactccttttaatgtcacagaaagatcaaagaaacctccagtgcctaactggcttcgcgaagaacttttgaagaagaaatctacatcagtgagtgcttcggtgcaacactcaacagagttccactccaagggatctgaagatgctgaaaaaacacttaaaagttctgatcaggctgacagcagaagcgtagattcagctaaatctactgatgatgatgaagaagatgaggacgaaattgaagcagcccggatggcagcaatgaaccaggaaattaagcgtgtattaactgaagttctcttaaaggttactgatgatctttttgatgagatcgcgacaaaagtattgaatgaagatgatccatcagctgaaccaaatgagcccactagagtttctagtgtgaaggggcctggtctgggagaatcaaaaccaaaggtctcagctaaagttgttgtccctgctaagccaactaatgttagctcagctgatcattctgatggtactgggttaagttcccctaaaggcgctcttcttggccttgctagttatgattcagatgatgaggacgatgagggtgataatgaggataaggttccagtttcaaacttatcgtctgaaactaaagctggcgcagctcgtccaggagaaggtgaaaaagccactgatggtgaacagcatggaaatcataatgaaagaaattctgtggtccaaaatgcttcattaggcgaagatcgtaaatttaatgatgaaatgtctcataggaactcaagtgcagaacttaaacaagagctacgtgttcatgacacacatagtagggaatttccttcagatgccaaaatatcaagtcagccgaaggatgtggctcctaccctggatgagaaggcacatggatattcccaaaatggaaaagttccaccttcaggcaataatgttgaaaattttagcaatatggagagcagtcaagggcatttagggaagagcagcaatgaggaagattttgtaaaggagccaaaggctgttcgaagaaaagaatccgaatcttcttccaaaagatataatgatgatgataaatctagcatgtatggaaatattgataaaaagggtagcttcaaggaggaaaaaggatctgacaggagtgtgagacatggagctgatacaagggaaccccgttccagaggaaactctaagcaggatgatgcaaaaggagagagaaaagattatcaaaaggacgtaagagagaaaagcagggattctgcagatagaagagagaaagggaaacatgaaaaggaggataggtcgaggcaaactacaaagggctcaagtagtcatagcagtagaaggtcaagatcaccaagtgcgagaagtcggaccaagaaggagagttcttcacatcgagagagtgtctcaagtgatgagccttctgataattcgaaaaggagaaaacttcattcatgtaaaagcagcatgtccccctcacccccaaaatctaggaacagacgagtttcgcggtctccacatagcaagcattctcaccgcaggcattcgccttattcatctgcggaaaggaagaagcgttccagatccagaactccagtcaaaagaagatagaagatacttttgatttcaagatgcctcgacatccttgtgaggcgatgtgtggcatatcgctgcatcttctactgattcattgaacaacgcattcccacggtagcaagatgcccgcggatcaccagtgtagataagctggaggtttgcccatacagaggatattaaatcttctgtgctagcagcctagcagagagcaatgtacttaattattttgtaggcctagcgacccacgcaaatatgacatgtaccacctttcgatttcatgtattccatcttgattgtggaaaattggcaacgccaacgcccagtaggtgtgtactggcttgcgattatttttgtagttttgaagattactgttatgtttttttcttgaaacgcagattgttcgtattattct

SEQ ID NO: 16025 - DNA, 1345 bp, Oryza sativa
  ref <308>: DATABASE ACCESSION NUMBER: AK066533
  ref <309>: DATABASE ENTRY DATE: 2001-12-06
ggtgcaaatgacgccgaagagagctgtgcattgcggtcggatcaaatgatggctagccatttctacggcatgttccggcaagacgacccagcgccggcgccggcgtggtggttccagtcgctggccttcctcggcgccgcctacgtcgccggcgtcacgctgcgcctcctcgcctacgtcgcgatctgcctcggcgggcccaaggacctccgccggtacggcgcgtgggccgtcatcaccgggccgacgtccggcatcggctgcgccatggcgctggagctcgcgcgccgcggcctcaacctcgtgctcgtcggccgtgaccccgccaggctccgggagatctccggcacgatccgctcccgccacggccgggtgcagaccaaggccgtggtgttcgacctgtccctcgcctcgaccccggacggcgaccagccgctgcggcggctgcgggaggccgtggcggggctggacgtcggggtggtggtgaacaacgccagcgaggggaggcccggcgcggtgtacctccacgaggcggacgtggaggagtgggtgaggatggcgcgggtgaacgtgtcggcggtgacagaggtgacggcggcggtgctgcccgggatggtggagcggggcaggggcggcgccgtcgtcaacctcggctcagcggcgtcggaggccatcccgtccttccccctctacaccatgtacgcctccaccaaacggtacgtggctcagttctcccggagccttcacgtcgagtatgcgaacaaagggatccatgtgcaatgccagacgccgttcttcgtggagacgacgatgttggcgaagttggaggaggaggtggggcttagcgtgtcgccgttgaaggtgagcacggacacctacgcgcgcgcggcggtggcgtggatcggacgcggcgggccgctctgcacgccgggtggactgctgcaccagctgatgtggtgcatcaccgccgccgtgccggagtccgtcctcgactggatcgtcctgcgcttcaccacctggaacagaggacggtagctgttgcagccagcggagcagagtgtcaaggacgaggggcatgcaagttcagagagctgtggtggctcgctaagttaccatcctggccgctgtcgttcgattaccctaacggcgatcagccgtacgtcgtgaccacaagtcgcgcccgatgtgtgtatctcgagcgagtcaggggtggagattaggtttgtaaaaactatgtcaaaatgtaattttactttcaagtattgatatggagttatggacagtatgtaatcaacaacttaattagcactatttaatctatcgtgatagatatggaattcaatgc

SEQ ID NO: 16026 - DNA, 2760 bp, Oryza sativa
  ref <308>: DATABASE ACCESSION NUMBER: AK066534
  ref <309>: DATABASE ENTRY DATE: 2001-12-06
gacagccgcaagcacagtgaggctgaggcaagcggagcgcggcggagctagggtttgcctcgccccgatccggcggtgcgcggcggcggagtccgccgaggtcggcggccgcgtcggagcccccccgcggcgcggttggtggggtgggggggggagcggatttgggtgctgggggttggggccgggcgcggcccggggagggggctcagatctggggatggccgacggggtggaggaggggaatgcggtggcgcccaggggccccgcgcggcggaggggcaccgtgcgggccagcctcgacgccgacgagttcatcgcgctgatgcacggctcggatcccgtcagggtggagctcacccgcctcgagaacgagctgagggacaaggagagggagctcggggaggcgcagacggagatacgcgcgctacggctgtcggagagggcgcgggagaaggccgtggaggagcttacagatgagttggagaagatgtttgagaaactcaagttgacagaatcactccttgacagcaaaaatctagaagtcaagaagattaatgatgagaaaaaggctgcaatggctgctcagtttgcagcagaagcgactttgcggagagtacatgcagcccaaaaggatgatgacatgccaccaattgaagccattctcgcaccgcttgaagctgagctaaagcttgctcggcaagagattgcaaaactacaagatgacaatcgagctctggatcgtctaacaaaacaaaaggaggcagcactactagatgcagaaaggactgtggaaatagcaatggcaaaagctgctatggttgatgacttacaaaacaagaaccaagagttgatgaagcaaatagagatctgtcatgaagaaaataaaatattggacaagttacaacgccaaaaggttgcagaagttaaaaaacttagcctaaccgtgaaagaactggaagaggctgttcttcgaggtggcgcaactgctaatgtagttagagattaccagcgccaagttcaggaagtgaatgaccaaaaaaagacacttgaatgtgaacttgctcgtgcaaaagttacagcaaacagggttgctgttgtggttgccaacgagtggaaagattctaatgacaaagtcatgccagttaaacagtggcttgaagagcgcagattcctgcagggtgaaatgcaacaacttcgtgataagcttgctgtcgcagagcggacagcaagatctgaggcccaattaaaggaaaaatatcagttacgcctgaaggttttagaagatggactgagagggccaccaagtggctctagtcgtctgcctaccgagggaaagagcttcagcaatggcccttctcgtcggttatcactcggcggagctgataatatgtctaaattgtctccaaatggtttattagcaaggagatctccatcttttcattcaagatcctctctttcttctagcagcagcttggtcctaaagcatgctaaaggcacttcaaagtcgtttgatggtggtacgaggtcattagacaggagcaagattaatgggaatggagctcatttacttaaccgttctactgatgctgtcagagattgtgaaactaatgatagttggaaaggaaatgcagatgagggaaccattgaaaatacaaatagcaacactgacgagagtaataaagaaactgcaaataacaagtcagctgagatggtatctggttttctttatgatatgttgcagaaggaggtaatttctttgagaaaggcatgccatgaaaaagatcagagtctaaaagataaagatgatgcgattgagatgcttgctaagaaagtagataccttaactaaagctatggaagtagaggcgaaaaaaatgaggcgggaggttgctgccatggagaaagaagttgcagctatgcgtgttgataaggaacaagaagtcaaagccaggcggcttggtagttctaaagggactggaagttctcaagtgctttctggaagccggagctcatcacgaagtgggcttactcgcaactaccaatgacagcggcactaacaccaggcggcattcatcgatacgttccatttccatttcaccctgtatttgttccattcacttccctattgattttgtgaccaagatcctagcacctgcgatgtgatacctagattggggaaaagagtaggctcgggtctgatctgacgtgattgctattgcaccgtggaggaatcggtcttttgcagaggcgaggccctaatcccagtgtggtctggtgccccctctctttgtcaagcagtgcagcgcatctggtgatgtataggctgggcgatctctgcgccttctcccatctgttaaaatttatgtagcttagcgtgtttgtttggttctgcttctgcacgcccatcatcgcccaggttgtgaatatcgttgttctcacatgattattattgccttttccgttctgttatgttcggtttgctctgattcgggttggatgattgtttcatcccatttgctttgctgtgtgcctgtgttcattgttgttcgttgacagctaccgcctaccggcctatgcgaatgtggtttatcgacagagcaactgattgattttctctcattgattatttttatttttaagtggatggagtagcataatattagtaaacgtgatggtcgctggcagaaatgaagtcaaaataggaattcgataataaaaaaaaagaaggggcaattttgtttttacccttactttgatgtcc

SEQ ID NO: 16027 - DNA, 914 bp, Oryza sativa
  ref <308>: DATABASE ACCESSION NUMBER: AK066535
  ref <309>: DATABASE ENTRY DATE: 2001-12-06
gtcattcgatcgatcgatcgatcatatatatatatggatgagctacctacactgatatgatccaccacaattaatgtgctcgagacgacgcagcaacaaccgccgcgccattgatgactaattgagatcgatcgatagatagtataagagatcgaccacgagctctcgatcagcctagctatagctatagatagatatacaatctctctctctctctctctctctctctctctctctgattgttctcttctgcttgcctcttccatggagtgggctcgaggtccagccatggcggcagcggcagcggcagcggtggtgatggtcgccgccgttctggccggccaggcgatggccgccggcgcgacgacgtacacggtgggcgcgccggatgggctgtgggacatggagaccgactacaaagagtgggtcgctcgccggacattccaccccggcgacaagctcacgttcacgtactcgcgtgagctgcacgacgtggtggaggtgacgaaggcggggtacgacgcctgctccaacgccaacaacatctccgccttccgctccggcaacgacctcgtcgccctcaccgccgtcggcacccgctacttcctctgcggcctcaccggccactgcggcagcggcatgaagatccgcatcgacgtcgtcgccgccgcctcctccggccccgcagccgccgccgcgccgctgccgtcgacgtcgtccgtgaccgccgccgtcgccggaagccgcctagtcctcgtgctcttgtatgctcttctgccattgtggtagcattaattaattagtctcttgtgtgtatatttttgtaattgtaagtttaagtacacgtatatgctttgatttagttaatattttgtacttctggttttaatttgtggttattgatcggattttag

SEQ ID NO: 16028 - DNA, 2756 bp, Oryza sativa
  ref <308>: DATABASE ACCESSION NUMBER: AK066536
  ref <309>: DATABASE ENTRY DATE: 2001-12-06
gatagtcatttgcccgctgctttacaatcaactgagtcaagccagcccacagaatatgctgcccccacacaagatgatggcaatggtctgcaatgtgaaggtactactgttgatgtgtctggttctaaggaagatattatggaagttgaggagaagctgattgatgatatttccggaagcccttctagtcatttgcctgttgctttaaaatcaactgagtcaaatcagcctgcagaacatgctgtccccgcagaagatgatggcgatggtctgcaaagcgaaggtaccgctgttgatgtggttgattccaagaaagatgatatggaagttgaagaaaagcagattgatatctctagaggctcatctagctttctgcctggcgctttagaatcagctgaattaaatcaacctgcagaacatactgcccccacagaagatcatggcaattgtctccaaagtgaaggtactgctgttgatgtgccttgttccaaggaagataatatggaagttgaagaccagtttgacggtatttctagaggcccatctagcttttctcctgacactctagaatcagctgagttaaatcaagctgcagaacatgctgcccccacagaagatgatggcaatggtccgcaaagtgaaggcacttctgttgatgtggctggttctaaggaggacaatatagaagtcgaagagaagattgatgatatctctagaggctcgtctagtcatttgcctgatgttttacagtcgactccaaatcagcgtgcagagcaagagtgtttagataatagtgatgacgtgaacacatctgttgtttcctcccatgccccattaagtggccccaaatttacatgtgtgaaagaacttgaaaaggcagatgaaaccttggaaacgagtgatgcccaagtagcagatgaagtctgtttacagacaaatgatggtgctcacaatatggcttcaggaagttgttccactttagaagacaaaaacgaggacagttctgcccaaatagctgattgtgaagatttattgctaaggaaaggaactactgttgatgaccttgatggctgtgtcgaaggtcacagtggcttgtccacccattccaatgatgaagtgcgcaacctggtagaaattgtcaagggtatgaatgatactactgctggcagtgaagtgcatgtggatcctgaaagtcatgtatctgatgaagtgtcaatgccagttgcaccatcagagctcaaggtagaattgaagaaccaatcagaacctgcctgtcagtttggggcagtgatcgtcgaggaatcaaatgtcagcttgggcattcagactcctgcattagctgaatcagaagaaatgacatcaggaggtttcatgcacggtaaagaagtttgtgcttcagaacaaacgaatataggtgcggctgcagaacctgcatctacaaaagatgatcatgatatgcatgaagttgataaagagattgttcattgtacaatatcttcccccataggggatcaggaaaatctgcaaggtaacattgatggcaagatggacgttggcctggcggcttgccagacagagtcagattttgtgagtggaaatgaccattctagggagactgatttagcaggcagccaggcaccttatgatgcctcggataaggaagatactgctgctgatttgattggtcctaagcaagccactctcgagatcgaaaaaatgcagattgatggtattcctgaaggtccttctagcgtgcctgctgttttgcagttaactgactcaaatcagccagcagaacaagagagattagagaatagtgactctaaatttgcatcaacaaaggaccagggcagagtggatggaacttccaatttgagtggaggtgataatgcaaagtgtagtcttaccaatgatgattctcaaactgtgaatctagtaggatattcaccatcagaagactcgaatgatgatgattctgtccaagcagctgatagtgatggcgttctgggaaataaagaaggtactgatgatgttatctctgctgcatgtaccgatgatgtatccatgctgaagactgaatcaatagatcgtcatggttctgacgaagttgatcattccactgccccgtctgctgccatcaaacaagagagtggtactgaagttacgtgtgacgcttctgttcctgtttctgaaagctctatatcaaaggaaatcggtacatcgcctgagtgtgatgatgatcaagtggctacagcagcacctcatccaccaacgccattatctgatgctactgatgtatctgctgatgtgcaaatcccagcaggaatatcggaggcaaagctagagcagccgaacgaaacgactagcccgtcgggtgctgctactgaagaaaataatactgtcgtgagcactcagattccaacattagctgaatcagaagatagaacacccgccgatactgctattcaaggtactgaggttgacagcgctgagccagcatctgtaagtgatgacgaaaacaaggttacagcagctgatgatagtgcactcccgtctactgggccagaggatacagcggacgataaaattgatagcagcgctgatgctagtgagaagtaggttatgacagactgagtatgtaagtgatctctctcaaacctagttgtaaatgttactgctgaactgatacagcccaactactatagtgccttagttataattattattgcatcttttgctaatattatgttaattcc

SEQ ID NO: 16029 - DNA, 3437 bp, Oryza sativa
  ref <308>: DATABASE ACCESSION NUMBER: AK066537
  ref <309>: DATABASE ENTRY DATE: 2001-12-06
gaatagtgtgagagagagagatgtggcgttgctgcagcagcaacagagcctctgggcttctcgtgtggctggtgcttgtgtgctcatggcagattgcagctgctcagcctcaacaagcagcaaaaactgatccaaccgaagtggcagccctgaacacgattttgggaagatggagcaagaaggcatcgtcggagtggaacatcagtggcgagccctgcagcggtgtggcctcggatccgagcaactgggataacttccccaacatcaaccccctcatcaagtgcgcttgcacttactacaacaacaccgtttgccacattaccaaactacgctgcagcttcggaagatccgctcttcgtggaagttgaagccggtgtttgggaaagcgagcaaggaaggtatataagttggacgtggttggtcaaataccagcggagctgcagaatctcacctacctagaggacctgaacctaaattttaattacttgactggcgccattccgtcattcattggaaaatttccttccatgaaatatttgggtttggctttgaatccactatctggactacttccaaaggagcttgggaacctcaccaatcttctttcattgggcatcagcttggacaattttactggtgaacttcctgaagagttgggcaacctgaccaaacttcagcagttgtacattgatagttctggattcagcggtccattcccgccaacattctcaaagcttaagaatctaaataccttgagggcatcagataatgaattcacagggaaaatacctgattatttggggagtttgactaatttgatagatctgtaagattatttaatattaaattctttatacttcatatgatgtaccttattcggagagatggaaatcatgaaacataaatcttctgtttccatttgaactcagataatatcatttttcacattggagccctttgaataaatatacacttctccatgccattatactagtttgcatggcatgtcgatgcggagattttcataaaaaatgttgatacacatggattactttcttttaccattttatgaaattatgaacttgtagggctttccaaggaaattcttttgaaggaccaatcccagcaagtttgtcgaatctaacaaaattgacaaccttaaggattggtgatatcgtagatgggacctcttctttggtctttatcagtaatctgacatctttgagcaccctaatactaaggaactgcaaggtatcaggtaatcttggaccagtagatttttccatgttcacagcattaatcttgttggacttgagttttaacaatattacaggcgaagttcctcaatccatcctcaatatgggaaagcttgaattcctagatttctcctacaatcagctcactggaaactttccttcctgggctacccagaacaatttgcaattgaatttggtagcaaacaaatttgatgctggtagcaataaccgcagaactcttccttctggattaaactgccttcagcaagacactccttgttttcgtggatctccagaatattattcctttgcggttgactgcggaagtaatagttctacacgaggatcagataatactatttatgaagcagagcctacaaaccttggggatgcatcatattatgttactagtcaaacaagatggggtgtcagcaatgatgtcaccatcatcgctgagatactatggccttggacttgagaatggaaattacaccattcttcttcaatttgcagaggttgcttatccggactcacagacttggcaaagcttaggaaggagagttttcgacatatatatccagggctctttaagagaaaaggattttgacataaggaagatggctggtggaaaatcttttatagtggttcacaggagttacacagctaccgtgtcaaacaacttccttgaaattcatctcttctgggctggcaagggcacttgttgcatacctactaatggttactacgggcctatgatctcagcattgagcgtctctccaaattttactcctactgtgcgaaatggagtaccaaaaagaagaagtaaagtacacacaattgcaggaatattgattggtgcatcaatttttggattggcagccttatttggaatttttatgatggttaagaagagaagaacaatggcacaacagaaagaagaactgtacaacctaattggacggcctgatgtcttcagtaacactgaactaaggctagctacagacaatttcagttctcaaaatattcttggggaaggcggatatgggatgctgtataagggtaagctatctgatggaagagttatagctgttaaacaactttctcaatcatctcatcaagggaaaagccagtttgtggctgaggttacgacaatatctgctatgcagcataggaatcttgtgaaattgcatggcttctgcatcgacagtaatacacccttgttggtttatgagtaccttcaaaatggaagcttagacacagcactctttggacatagtagattaaacctagactggggaacacgttttaatatcattttaggcattgcaagtggcctaacttaccttcatgaggagtccagtgtacgcatcgtgcatagagatatcaaagccagcaatatcctacttgaaaccgatctcactccaaagatatctgactttggactcgccaagctctatgatgagaagcagactcatgtaagcacaagaattgcgggcacactgtaagaacatttcaacatttctcttcttatgattgtaacatcaaaataaaagctacttttaacttgtgtggcctttgtcaagtggatatcttgctcctgaatatgcaatgagaggccgattgacggaaaaagttgatgtttttgcatttggggtggttgtgctggaaattgtcgccggtcgatccaacaccaataattccttggaggaaagcaagatctatctcttcgaatggctctgggacctgtatgaaaaggagcaagttcttggaatcgttgacccttctctcaaggatttcaacaacaatgaagcttttagggtcatccgtgttgcgctcctctgcacacagggctcaccgcaccaacgaccaccaatgtcgaaggccttggcaatgttgaccggagaagttgagctgtctgaggtggtcgtgaagccaagttacatcaccgagtggcagcttagggatgtaaatagaagctatgccactagcagctactcaggctctaccaaccctgagtttagcacacagaaagagatagagcctcttacccaatcatgatctctagagctagtcaagtcggaatgcgaatgaagaattgaactactgcagatgatcttgcaatgcgtattgaaccaagatatatacaaactaatgcacaaattttaagtttttcttggagcc

SEQ ID NO: 16030 - DNA, 799 bp, Oryza sativa
  ref <308>: DATABASE ACCESSION NUMBER: AK066538
  ref <309>: DATABASE ENTRY DATE: 2001-12-06
ggcatcaaggctaggaccaccgtcgaacacctgctgtgcgcaccgccctgcgttcctttgcttcaccaccgtgtgtgcacagatcccagggtgtgcacagcagcatagataaatacagttgtagcctgaaagatagaacttataatctattgcttaaaagtttaaagaaagttgttcagagaaggaatataagatgacggatacagtactcagcattgcaaagtctctggtgggaagtgctgtaagcaaggttgcttcggttgccgcagaaaagatggtcttgctgctgggagtgcagaaggagatatggtgagcatctgaattgcagcctaattaattttatttgtcatttgcattagatttattgggaccacacttatgcagagtggtatggtactcagtttatttttaatgatttatttatattttttattacatatcctggaggaacgcatatgcagttttttttataagtatattatttgcaacatcttcgggagatacatgtagaggaaagtgaaagtaggatgtactggaagtccctctatatgcccaaacacaagtggacacagtttcctcatggtaaccatgttcaatgaaggaatacaaacgacgcagctattatggacctggtgataatctaatttagacagaaacatggttgccttcgagagtaaacaatgtagcatggcatgcttaagtcaaatgcatgtacaatttgacatggaactattacgttcagtgctgtgcaattttgcttttgaccatggaatcaaagatttaatgcaaattaatcttc

SEQ ID NO: 16031 - DNA, 1758 bp, Oryza sativa
  ref <308>: DATABASE ACCESSION NUMBER: AK066539
  ref <309>: DATABASE ENTRY DATE: 2001-12-06
gatgtctgcaccgtcctacgaccggccggcgagggcaggccggccgccggggacgagcagccggtaggcggagtgccctctggcggcgaggccgcacctcctcgccgccacgtcgccggcggccgccgtctcctcctcctcctcctcgatctgctccagcaccctggcgaacacggcggcgtcgcacggcagctgcagcggccccgccgccgcgtacccgaacgcctcctcggcctcctccagcagcggccggaacagcgggtggttcacgctcgccgtccggacgacgaaccgctgccgcgccgcgccgacgtacaccgagaggcacccctccgccggcctcctccacgccggcggccggcaccggtccagcgtcttcatgatcaggcccctccgccctctctccgccattgccagcttcttctcggccatgcccacgctcacgtctaaggctgagatggtgatgcttcttgggaaggcgggaagcggtagaacggcggcggcgcggagcccgccggcgccggctggtacagcgtgaatggcaagaacggcggccgcaggaatggcaccagccagtccggcacggggaacggccacgggaacgacaccgtcccgccgccgccgcccgggagccggtacggcggccagaagagcggcaagaacggccagaagaagagcgacgagccgaacgcagcgcagccgccggcgccggcgccatcgccgccgtggcagagcgcggcgtcgcgcttggcggggcggaagttgagcgcgttgaggttgaggaagcaggcgttggtggcgcgggatcggagggcgatgtgctgcgtggatccccggaggcccgggacgttgcaggcggcggaggagctccggacgagcgtggcgcggcacgccgaccggaggtcgtggccctcccggcagtcgaagccgccggcggccggcacgtcgagcttgtacacgccgttctggtccgtggtgcgctccgcctccagggacagctcctcggccatggtggagttcaccttgaagctgcactggatcagcaccctggcccctgcacagcatccatcaccatggtggccattagtggtgtggcttcagcatctcagttcttgccaaagatgaagacaatttcatatctggtatactaccatttctactcacccttcaagaagaagctgtgcttggagaaagtgttgttggagcaggcatcacagtagacagagccaaccacagtgatgttgttggacaggaacctggcctcagtgccactcaacaccagcgccattgccaagaacacggccatggctgctgctgctgctcctgagctcgccattgtcgccattgagatcagctaagctactaggaaggtgagcaatggagatcagattggagtaagagagaaagagagagaagatgagaaatggggaggagaggagaggagaggagaggaggaagaggaagcatacatgcaacagaacaaatgcatgtgaatcggcttggactggagtggagacatgggagagaggctggtcaagcactagctgctgctgtgtggtctcgtctttctttctcttttttttttttcccttttaaaattttatgtgtagaaataaattgggaagtctaaaatagtgcatgtgattttttttttctggggcctcatggtcataagattattagcaaacagtctgcttggatagaatactgcctccccctgcaagatcactggagtacttattgtttctgatttgtttg

SEQ ID NO: 16032 - DNA, 1761 bp, Oryza sativa
  ref <308>: DATABASE ACCESSION NUMBER: AK066540
  ref <309>: DATABASE ENTRY DATE: 2001-12-06
ttcttcccgcgccgcgacgtccaggtcacacaggttctttggaacgggaaagggagcaaaaggccgaatcttttccgctgttgctgctcctcctttctcgctctcgctctgtccgatcggagccatgagtaatacgctgcttcgtgtgcacccttccgagctcaagatcccctatgagtacaagaggaagaggtcttgctgcatgcagctgacgaacaagaccaaccagtacgtggcgttcaaggtgaaaacgacgaacccaaggaagtactctgtgcggcacgcctgcggtatactgccgccccggagctcgtgcgatatcacagttacaatgcaggctcccgttgaaatgctatccgattaccactgcaaggacaagttcctcgtgcagagcgtggcggttggatatggggcgaccatgagagactttgtccctgaattgtttactaaagcgccaggcagggtgatcgaggagttcaagctgcgggtggtgtatgttgctgctaatcctccctctccagtgcctgaggaggaagaggaagaggaagaggatgcatcccctcagtcagaggtcatgagccatggagtgaaaatgacatcagtgtttgatgctgtaactgtaagtaatatcatgcattgatgtttattcggtgctacagagaaaacaatatcatacatgtttccttctcaggtatccacactcaccgataggtcagcagacaaagtttcatctgctgaggtaaccatttgctcggttaaagtttttttagtcactaagatgagtgatgcatagtcttgttggttgcattgtcataatggcatccgggttttacattttttaaaaaatattgagtgtactctgatgctttttctatagtaaaaatgcacattgcacacgagccgatgtccgattttaaaagaaaacaaaaatttcaggttcatcacaatcacatgttagctaatgtaatactaaaaattttcatgtcaaagttatctctaacgtgttttacctaacaaccttgtgatgcttctcctgcagaatgagactcttgatgtcattatcaaaagtttagtagtcaacttctttcttcagtttgttttgtctgggtagataagtgaccttgtttggtaccatgccattgtcagtacagcagtatgatacctaaaacaaagaacctgtatgttataattaagtgtattgtcttgtttggttggttgagacaatactatttagcgggttatactcagaatttttttgcagtaaactgacgctttaatctatcagtttgctctgccttgctcatattgcatttgcgtgtggctgttcagggtgtctctgtagaatcaatgctggttgcagagagagaatatccagtagaagaaaatcagaagcttcagcaacagatggaactacttagggcagcaagatcatctcaacagggcttctcagcaatgtttgtgctgctagttttcatgtcatctgtctgcattgggcacttcatgaagcagatcaaggtttagtcatatgtttacgcaaaaaggatctctgtttatttccaccaagctaacgcaccatctccgctatctataatactgtcacaggcaatagagtagtagtgtacgcatagaaaatattcaataggttgtacattttcagatagaagacgagctatttgcattttattcatgtaaattgtatagcataattgaagtacttgtgatctgtaatgccgtgatagatagagaaaacaaagttttact

SEQ ID NO: 16033 - DNA, 3761 bp, Oryza sativa
  ref <308>: DATABASE ACCESSION NUMBER: AK066541
  ref <309>: DATABASE ENTRY DATE: 2001-12-06
gatcgtttttggtggctcctgattcgtttcctccgtctcactcctactcctcggctgcccccattcttctctggatatttttctttttcatcttctttgagttggagggcttgattttaggggggactgctcgatcggcagggttaattccgatctctttaaccttcccggatcagagccgggatcagtattaggctttttgctagaagcacaaaacaaaaggaatgctggaagatgtgcttctatgatagagagctaccttgtgtgggaattggaaaggtagctcaaaatatttatgctttgtgtgctcttgatgatagtgaagtacgggtttatgcacagcaagtgctccttgtgcatttgcacgatggggctagatgtggcagttcaaccatcatgttagattaccatcttgttggggacggttgaaattatttttcatttattgcctctctcatctgatactccctcatcaatcatcatcactaagttacatgattagtgctttctgaatacataaggcatttgataagatggtagaacaaaaggggaatattttgatgaagagatatgagataggaaaattacttgggcaaggaagtttcgctaaagtttaccatggccgtaatattaagaattcacaaagtgttgcaatcaaggtgattgacaaagaaaagatattgaaatgtgagcttatggatcaaataagaagagagatttcagtgatgaacctagtaagacatccgtgcattgttcaattgtatgaggtgatggctaccaaaactaagatatattttatcctagagtatgtgaaagggggagagttattcaacaaggttcgacgtggaagactaaaggaagaagttgcacggaagtactttcagcagttaattagtgctattgacttttgtcatagcagaggggtttatcatcgtgatctaaagccagaaaaccttcttcttgatgaaaatcgaaatttgaaaatctcagactttggtttgagtgcacttgcagaatgtaagagacaagatgggttgctccacacaacttgtggaactcctgcatatgttgctccagaagtgattaacagaaaaggatatgatggtgcaaaggctgacgtatgggcttgtggagtgattctttatgtactattggctggttatctcccatttcaagataaaaatgtgataaacatgtataagaagatatgcaaagcggaattcaaatggccaagttggttttcttctgatatccgaaagcttttgcgacgtattcttgatccaaaccctgcgacacggatctcagtttcagaaattatggaagatccttggtttagagtaggtcttaattcagatctacttaacaagaccataccaacagataaagttgataaagttgtgcatgttgacatggattcaacatttggtaatttaagcaacaatataaatgaaggaaaacaagaagcagaaaatcttactagcttgaatgcttttgatattatttctctttcatcaggatttgatctttctgctatgtttgaagatgaaaacagcaaagaggaatcaaaatttacatccactaacacagctacgacaatcaccaaaaagcttgaggatgttgcgaagaatttacgattaaaattcttgaagaaaaatggtggtttgttaaagatggaaggatcaaaacctggaaggaaaggtgtaatgtccatcaatgctgaaatatttcagatcacaccagattttcatttagtggaatttacgaagataaatggtgatacacttgagtatcaaaaggtcaaacaagagatgagaccagcactaaaggatattgtatgggcttggcaaggtgagcagccacaaccacaatcattgaacgaacagtcttaatgttaaatattttgacaagtgaaatgacagtagagattgtggcaatgtgttgatgtgttgtatgtgctattagtaatcaataatgtacttttctaaaaaagtttgtcatttgatttttcattatcatgtgttcagtatgaaacgataattgtattgaccatttaattgaaaacatgttttattcactttgccatgtgttctaaaataagtatggaagtcactaaaataaaagcttgagtatttagagtttgggttatatagaaatcataggtgaacttttgtatcagtacaaattgtattctttttgtttgagtctaatctctttgctacaatattagctatagctgtaatgacactgacaaatatcatagtccgttcagtaatcatattttgaggaaatttttataaatctcctttggatggctaaagatgacctatggttttttttccttgggatatttcttttccattacttacattagaataaacctagacagtatgtctatattccaaataatatatgtatgggacaagttattaaccttggtgctgaaataattagaatggtgctaaattattgataatccacattttgctatggttgcttttaaattcaagctggcaagcataattcatgctgcaaatatatttatcccgaaataggtgatataatataatactacactacgctatacacaaaatctagttgtcagattggacaatcaccaacataaccaatgatttgtatgtttcattttgttccccctctttcaatcgatgttgtggccagccgtttgttccaatcttacaaactgatgctgcatttaactattgatttcactgagctaaactgatgcaaggctagacccataggcaaggaatgactattgaaatgtgattgattcatatgcaaggttgaagcttcatcgaaatgccaaacaaatactgaatgccaaacaatgggcgattcaagcagtctgatgtactacctccgtcctaaaataagtgcagtcgtagatatttgtgctcaacgtttgaccgtccgtcttatttaaaaaatttgtgaaaaatttgaaaatatttagtcacacataaagtactattcatgttttatcatctaatagcaataaaaatactaattataaaaaaaaataaataagacgaacggtcaaacgttgaacgtgaatagtgcaaaactgtacttattttgggacggagggagtattacggtacaccatttgtttcagcatttcattctgctagcgacgaggaacactctagaagtatctagaattttacagcttgctgaaattacaagctactaattccttcgaatcccggatccatctgtgtgttacagccactcgccaccttgattagtggcgggggcagaatgatttgggggatttaatgatatgcaagtcagctgaaaatatcaagcttttgatggtggtggttgctgcttagctaattgacaatacatttgttggtgctcaaaagttgcagcaaaagccaagaagaggcatgtgttgatgggtgctgcactggcccaggtcaggtgagctacagcaatcggaaaatcctcggttgctggctggaaagatttttgttgagctcgccctgttgtccatggctaaaaagatggttgcaatttcggttggctggagcaacttgcttcctgatgtatgcctcatagtataacctttgcttctccggtttgtacccaaagatattgtgtgcaggcaaaagcaaatgagagtagctggttagagtgtgtatggtttatcttaactgaatggtcatttttcgtcgagaaatttaaccacttgaaacctttcattaacgagactgaactcgacgttttcgggcttg

SEQ ID NO: 16034 - DNA, 2734 bp, Oryza sativa
  ref <308>: DATABASE ACCESSION NUMBER: AK066542
  ref <309>: DATABASE ENTRY DATE: 2001-12-06
gttgattatacgctttggcatgatcttcaagggatgggccagtaaatgaatgttttgaaagctgcttgcgggctgtgcagatacttcctgtaagatagttcatttgtatcatacttgttgtcagtataacattaatgatttggttagtttttctccttcaagtttgttttgatttcattatagcgatgtttttgtattagcttccagagttccagattggtcttggaacaattgctgctcgttctggtgaacttctatcacctcaggtattgatggctgtaaggcaagctgttcaacgggcacctcattaccctgagtcgcacaacataaatggcttggtttctgaagtgcgatcagacttccaatctgcaattgcatcgtaccgacaagcaaaatttgctttagatatgatgcgcaactccaaaacagactgcagatgtcatattgctgatatttccgtgaatcttgcccggtcactatgtaaggtaagagtattatcatccgctttgatgacaacaaaaaaaaatccatatcaggcagctgaaagatcatgttacttcaaatgttttatgcgcaataagtttgcattttctgtcacattatttacaaatgtttatggaacagttatcctttaaccgttgctttgactgtagactggtcttgcaactgaggcagtgcgggagtgcgaagaattgaaaagacaaggttttttttttatttcatgtagcaatggaaggatctttttttcctattttctcctgaattgccatgcatggcaaataaattcctttaagttattttcttatgctatccaacacacaggctaacaagttatctcaaatttctaggatttctgaatgatgacggattgcagatatatgctctttcattatggaaacttggtcggcatgatgaagctctttcagtatcaagaaacttggctgaaaacttatcgagtatgaagcaggagagtgcaactgcagctttaggattcatatgcacgttgacatacaacatctctgggaaggactctgcagctgcggtcattcataaactgcctggtcaactcaattacagcacacagctgaaatttattatctctgcattagatgctttacagccaaacaagcgttttcagttaccccagctgagtatgcctcctaggcttacatcgtatgaagtcatgagtgaagtccactcaaatattgctcttggaaatgctattggtggggaatcagacaagtttttaagggttgatggtggcctgtcttacctgaaaaaggttctacacatgtatcccgactgcagtttagtaagaaaccaacttggatctctgctactgtcaagtgaagattggatggcttctcataaagcagtaagggttacttcattgtcccggggatatacatccaataggggcttaagatctccacaccaaattcaagcatgtgcagcagtttcttgctatgctacctgcacttcttacccaaagttctcttttccaacatgtgaagatcaatacctaagcggatacaatgcaatatgccgcctgcaaaggtgggttcatctagaaccgtggaaccaagatgcacgtcgcctccttgtacttacccttttccaaaaagcacgtgaagaaaagtatccgaaacatatctgcaccattttgaagaggctgattttgcaagttctctccagtggtagcaattcacaagacaataaggtggttcagtatgggaactacttgttacttcttgtggcttcagaggttagtttgcaatctggtgaccatggcaactgtattgctcaagctactgaagctcttggagtaacttcttcgagcgtggattctttctttgcacacttgcaactgtgtcgggcctatgtgatgcaaggcaatcttttgaactctaggagtgagtacatgaaatgcctgcaaaaccgtacagatactgaaattggctgggtaatacttaagcaacttgcatctatatgttcactggagggtacccctgatgaaatagagatacatctcggaggatgcgttgaaaggaaaggtagcaatgcatccaaatggatgtctcttttttatctagcatgcgctcagtgttcagtatggaatgaggactttgcaagtgctgaaaaagctattgctcaggcatgtgctgaaggggatcctgacagctgtgtcttatttctcaacggcgcaatttgtatggacattgcttggaggttcgcggcccctcaatttatagcccgtgcagcttccagcctcagaaaggcacagcagaaatcacttgcttctttacctattgtgtccctcttactggcccaagcagaaggcagccttggctccaaagccaagtgggagaaaaaccttcgtctagagtggttctcatggcccccagaattgaggcctgctgagctctatttccagatgcatcttctggcaacgcagtcaagtgcagcaacttcccagcagaaccagctagtggaaaccatgcaaaccccagagaagtggcttctcagggcgatacacctgaacccgtcgtgctctaggtactggacggctctgatgcaactcgtgtacgtgtaacccttcgaaattggaagcactgatctttggtgaaaccaaccacaatgtagcgcatttcttgactcagctgtaagcatatggattggctggatgaactgccgacctgtctgtgataagtgaaaaacctgcatatgcttgctt

SEQ ID NO: 16035 - DNA, 3552 bp, Oryza sativa
  ref <308>: DATABASE ACCESSION NUMBER: AK066543
  ref <309>: DATABASE ENTRY DATE: 2001-12-06
attgagccaaaccctcctcagcaaccgcacgtttcaggctctcagccgccgcatcccatccgtactcgccgccgccgccgcctcgcccgtcggttcatatcgattcctgagcctcccgccggtgagcacccatgacggaggaccgcgcccccaaggtccccgacgagcccgccgccgccgcggccaagcagaggaagaaaaggaagtgggatcagcccgcggaggatgtcgtcgccgcggcggcggctgctgctgctgtggcggggttgcccgtggtgaacatcggtgccctctccggcgtgtcgatcccgggagccgccggtccgttggggaatatagtcgctgtgccctatactttgccggtgcatctggcgccttcggtgctccagaccgccgcggcagcggtccagaaattgagtcaggcaaaaatgcctgatgagctaatagcaagagaaattgttataaatgacgccgatccgtctgtgcgatataagcttacgaaacggcaaactcaggaggagattcagagatgtacaagcactgtcatcattactaggggaagataccatccaccaaatggacaaactgatggtgagaagccactctacttgcatatatctgctgggtctcagctaaaagatactgctgagcgtatcaaagcagttgatcgtgcggcttcaatgattgaggaaattttaaaacaaggcccaaacccagaaggcactatccagagcaacggacagatccatcacttgacgttgcagcttgggttcgtggtccaaatgtatgttctcgtattttgtaaaatattaagcgttattggataattcaaccatgccattgttgctattactgtcagtattgttttatgaattcagtccagttctgtttacccgtggaaaagaaaagaaaactaatcttgaagctttctctggcatcccaattgggatgggagaaactgtttttgtgctgctggtgcttctgatttctttatgcaggatcagtacataaatcacatcatgaatgaaacaggggtcactgttgtactcagaggaaaaggttcagggactccggtcaattgtcatgctgaagcatcacaacaacctctacacctctacatctcaagtatgcatgtgaagaacctagaagctgcaaaagttttagcagaaaaccttctagatactatagcagctgaatttggtgcttccagaatttcttcttcaaaagtatatggtgctgttccacctccgcagcaattattggatggtgtacaaacgtcaggaacaataccagatgtacaccctactttaggccctaatgtgttaaccggagcatcacattcctttgcatctactggagctaatgcttccttagttgctccttcagtgacatctcaatctggggccccgtcttattctgtggtttcaccacctagtaacctgatatgtcctagtcaaccagcaaatggtgggacattttatggtggctatgggggcatttatccccaggcaactccattgcagcaggttgcattaacactcaagcatgcttcatcatcatcaacccaggttgtttcagcgacgtctacatcaacaagcactgtggcaatggtgaacccttgttcacacgcagaagcagataaacgctcacaaaggaggaaattccaggaattaccagtttcacagggcgcaaccacagaagttcaggtattttctctgaccttgtctgaagctcacagggtggtaatagaatgtgaatttttcacagggcttgttacaagctggagttttcaccaatggagtttaactgacgagagtcttctgcttctgaattggattattgcttgtattttttgatactacatgagtttttcaacccgtaaattgaattagcaaggcacagtcttctgcttctaaagtggatgactgcttgtactatcttgttactaaccctttgtgttcaagctgttgatgcccacaagaagacttcgtaaaggactgcatttttaccattccttgaatttgaaatttggtagtttcttaataggtttaggtacaatttggtcaagttttttccttccttttcagttggagaaataggttcaaccattaaagttttgcacgttaaagagttctcactcagtgacattcacaagtagtcctagaaaagcagaaacttcttagcctaatgaaacaatagtattaatgcagtaccttttgctttatttctttgtagacactttttatgaagtttccgttatgctctttagttatatgaactttagaaagatgtaagttaatctctataactctgcatggttaactgatatccatgtatgatgcttaccagtcataatgctttcaatttatggatttgtgctgtttatgcacaaattttgttgatttcatcctttatttgtatttcattgtgtactatttactctaatgcaaaggaatttgatggagaagtctttttgtttcatttttccagaactcacaacagaggtccaaatttgttaagacaggtttagacggtttaggtaacatgaccaattcatcgattgaacctccaattaaagttcagcctggatcaaatgggatgcttcttcaagatcaaccgcatgtttctgcacatccatctgcatccaagaacatgctgccgccaccaccaccaccacccaggaacatgctacccccacctcccaagagcatgcctccgccaccacctaagtttccttcaaatgagatgtcaagaaatgaggataggtgtgcagatttaaacaagccaatggcacctccgaagagcatgccacccccacctcccaagagcatgcctccgccaccgcctaagtttccttcaaatgagatgtcaagaaatgaggataggcgttcagatttaaacaagccaatggcacctccgagatccttggacgtgagttcagtctcaccaccaaatttgtattcagcacaattaccttcaaaggagcctagagtggtcaaacctggtggggcatctgtttctgatactctgctgaagcttatggattatggagatgacgatgaagaggacaacatcgatgagacgaatagcgtgcttggagggaacccaacttccatttctgggcagaaaccgttttgggctgtgtgaaaaattagtttgttctgtactccaatgcaagttgagtgcaggtagagaatgttgcctgacctgatgcatcagctcaatgccattacgctaacagttcatcgctcaatgttctcagtgtgagctatgtacaatatccagttccttttcttttggggtggttcaaatgtcgacgtgatggtcatttttcttttgacatataatcctgtagaagctagtgtgatcaggcagggcaagggcacttgtctgcacgacattcagagtgctgatgatgcttaagccaatttttgctagcttctcttggatgctgtatgttgctggttttgttagtttggtgaccttgacttgtaagatcaatgcaacaaaaccatgtgttgatacataaataagatcccattttgacttcgc

SEQ ID NO: 16036 - DNA, 3153 bp, Oryza sativa
  ref <308>: DATABASE ACCESSION NUMBER: AK066544
  ref <309>: DATABASE ENTRY DATE: 2001-12-06
gatatataggtagagagcagagcatatgcagagcaggggaaggggcgaagcgtactccttccctgcagctgcttccatcaatacaatacaactagtgatttcgttgcagtgatcctttctgtcgatggcgcagcagcaggggcagggggcgggtactactacagtggcgatgatgagccggaacccgagctactactactccggcgagggtgagctgagcctggcggtgcagcggcaggactcgctgtacagggacgcgagccgcgccgggcagcatgagcaggcgcatggcgaggggtgggcgcgcacgctgcgtctggccttccagtgcttcggcgtcctctacggcgacatcggcacctccccactctacgtctactccaccaccttcgacggcggcatccgccacaccgacgacctcctcggcgtcctctccctcatcatctacagcttcctcctcttcaccatcatcaagtacgtctacatcgccctccgcgccaacgacgacggagacggcggcactttcgccctctactccctcatctcccgccacgccaaggtcagcctcgtccccaaccagcaggccgaggacgagctccacctccacatcagcaagtcctcctcgctccgccgcccctccgtccagcgcctcgcctccaccgccgaggagcgcgcccagtgggtcaaggacctcctcgagaacagccgccccgtccgcatctccctcttcctcctcaccatcctcgccaccgccatggtcatcagcgacgcctgcctcacgcccgccatctccgtcctctccgccgtcggtggcctcaaggacaaggcgccacacctcaacactggtggtgtgggtgacggtgggcatcctggtgatgctgttcgcggtgcagaggttcgggacagacaaggtggggtacctgttcgcccccgtcgttttgctgtggctcctcctcatcggcggcgtcggggtgtacaacctcgccgcccacgacgtcggcgtcctccgcgccttcaacccaaagtacatcctcgactacttccgccgcaacggacgccacggctgggtctccctcggcggcgtcctcctctgcttcaccggcaccgaggcactcttcgccgacctcggctgcttcagcatccgctccatccagctcagcttcgccttcggcctcgtcccggccgtgctgctggcctacgccgggcaggccgcctacctgcgcgtgtacccggaccacgtcggcgacgccttctacgcgtcgacgccgcaggtgctgttctggccaaccctggtgctggcgctggcggcgtccgtggtgggcagccaggccatgatctcctgcgccttcgccaccatctcccactcgcaggccatggggtgcttcccgcgcgtgaaggtggtgcacacgtccaggcagtaccaggggcaggtgtacatcccggagatcaacctcctgctgggcgcggccgcctgtgtggtgacggtggcggcgcgggacacggtggtgatcggcgaggcgcacggcatctgcgtggtgctggtgatgctcatcaccacgctgctgctgacggtggtgatggtgctggtgtggcgggtgaacatcgggtgggtgctggtgttcgcctgcgtcttcgcctccaccgagtcggtgtacctgacgtcggtgctctacaagttcgcgcacggcgggtacataccggtggccatgtcggcggtgctgatgggggtgatgggggtgtggcactacgtgcacgtcaggaggtacaagtacgagatggagaggacggtgtcgacggagagggtgagggagcttgtgtctcggagggagctgcagagggtgcccggtgtggggctcttctacacggacctcgtgcaggggatccccccggtgttccctcacctcatcgacaagatcccctccatccacaccgtcctcctcttcgtctccgtcaagcacctccccgtcccgcacgtcgacccctcggagcgcttcctcttccgccaggtggagccgcaggagcacaagctcttccgctgcgtcgcgcgctacggctaccgcgaccgcctcgaggacgcccgcgacttcgtcgccaacctcgtggaaaggctgcagtactacgtgcgggacgtcaacctgtacggcgccgccgccaataataaggtgagctacccgagctctcgttgcgacagcatgggcatacccaagtcggcttcctacgcggagaggctgcagcttcagagggccaggtcggtggccatgctccactcgcattctcagcatcagcaacagcctctgcctcagcagctgggccagctgcttcagtactcggcatccacgggagagcagcagcgccgctccgtttacgcggaggagatgcttactccggcggagtcgttctcggagatggggacgatggcggcgagcgggcggcagctgatggcggtggcggtgaagatgagcctggaggagatggcgcggatcgaggaggagcagcggttcatacagagggagatggagaaaggggtggtgttcatcctcggggagagcgaggtggtggcgaggcctcactcctccctcctcaagaagctcgtcgtcaactacgcctactccttcctccgccgcaactgcaggcagggcgacaagatgctcgccatccccaggagccaactcctcaaagtcggcatgtcctacgagatctgatcgatctctcatgcatcccccatccattccttcataagcaaaccttccttaattattgctttcatttcttcttccttcttcattatttcaatctcgatccatctactctactactagttcttcatttcttctctgctactccagtatactcaactggttatggttagtactagcagctaagctaagctaagctagcttcataactataagtgcctttattgatgcatgcatgccagtatatatagtgatcatatatatacatacacatatactagcggaggagtatgtaactagttgctagtattgctgattgataattaattgtacaattggatgcatgggatgggagaccactgaattgatccaggttcttcctacatgtttgtatgtatgtatgcttgtagaagcttgcacagatatattgatcatatgattgtcaattccttgttgc

SEQ ID NO: 16037 - DNA, 2291 bp, Oryza sativa
  ref <308>: DATABASE ACCESSION NUMBER: AK066545
  ref <309>: DATABASE ENTRY DATE: 2001-12-06
gggcgacttctccctctccctcctcttccactctcctcctcctcctcgtgagctccgaggttgccgacgacgacgacgacgaggtctcacccatggcgacccgcgaggtgcccctcctcctcctcctcgtcgtcgtcatggtcctcgccggcgccggcgccgcccgagggttctacctccccggcgtcgccccccgcgacttccgcaagaaggaccagctggcggtgaaggtgaaccagctgagctcgatcaagacgcagctgccctactcctactactccctccccttctgccgcccggccaccatcgtcgacagcgccgagaacctcggcgaggtcctccgcggcgaccgcatcgagaactccctctacgtgttcgagatgagggagccgaggctgtgccagatcgtctgcaaaaccgcgctgacccatcaggaggcgaaggatttcagggagaagatcgacgacgagtaccgcataaacatgattcttgacaaccttcctctggtcgtcccgatcaggagtttgttggatgatcacgacgcgcccacatcttatcagcttggcgtccatgtcggcatcaagggccagtacgccgggagtaatgaggagaagcacttcatctacaaccacttatcgtttctggtgaagtaccacagggatgagaacacggatcttgctaggatcgttgggtttgaggtcaaaccattcagtaccaagcatgaatatgatggcgaatggaaggagaatgagacccggctcaagacctgcgatccgcattcgcgacgcctcgtcgtcgactccgattcgcctcaagaagtagaggccggcaaagagatcatcttcacctatgatgttaactttgaggagagcgatatcaaatgggcgtcgcggtgggacagctacctgctgatgacggatgatcagatccactggttctccatcgtgaactcgctgatgatcgtgctgttcttgtccgggatgctggccatgatcatgctgaggacgctgtaccgggacatctccaagtacaaccagctggagacgcaggaggaggcgcaggaggagaccgggtggaagctggtgcacggcgacgtgttccggccgccggcgcgcgccggcacgctgtgcgtgttcgtcggcaccggggtgcagttcctcgggatgctgctggtgacgctgctgttcgccatcctcggcctcctctcgccatcgaacaggggcggcctcatgacggcgatgctgctggtgtgggcgttcatgggcgtgctcgccggctacgcggcggcgcggctgtacagggggttcagggggtcggagtggaaggcggtggcgatgaggacggcgctggcgttccccggcgccgcgttcgccgtgttcttcgtcctgaacgcgctcatctggggcgagaggtcatccggcgccgtgccgttcaccaccatgaccgcgctggtgctgctctggttcggcatctccgtgccgctggtgttcgtcgggagctacctcgggttcaagcggccggcggcgacggaggactaccccgtgcggacgaacaagatcccgcggccgatacccgagcagccgtggtacatgaacccggcgatgtcggtgctcatcggcgggatcctgcccttcggcgcggtgttcatcgagctcttcttcatcctcacctccatctggctccaccaattctactacatctttggcttcctcttcctcgtcttcgccatcctcgtcgtcacctgcgccgagatcgccgtcgtgctctgctacttccagctctgcagcgaggactacgagtggtggtggaggtcgtacctcaccgccggctcgtcggcgctctacctcttcctctacgccgccttctacttcttcaccaagctcgacatcaccaaggtcgtctccggcgtgctctacttcggctacatgctcatcgcctccgccgccttcttcgtcctcaccggcacaatcggcttctacgcctgcttctggttcaccaggctcatctactcctccgtcaagatcgactagagcttaattacacttgcacttgcatgaatgcagtgtcattaacgtgcttgctcgagatactactagcatgtataagagttaatttgttaatcaggtcatgataaattggtaattaggctgctctcttatccccggatgcttcaggggatctacagtttagtcaagttgtactagtagcttttgatgtgtaatcctatatagttacattaaacaaagttttctgatacaagtgaagatttaaccacaggcatttttcagttg

SEQ ID NO: 16038 - DNA, 1503 bp, Oryza sativa
  ref <308>: DATABASE ACCESSION NUMBER: AK066546
  ref <309>: DATABASE ENTRY DATE: 2001-12-06
gacaccatacatcccgcgccttcttcctcctcagctttgccgagacctcgttgcctcaagccgtgttgcgtgctgcatgctctgaattgaagaactctcttgggcctgaccaggtatatcagaagtggagaagaagattggaagcatgagggaaatgggagagaagaggaggcgtggacaccttaaccctgctggttttgcaggagggttgcatgatcatgaggagaagaagaacgaggagcataagctagacatgagtggcatgtccatggatgccctcccacacctcaccatgtctcttggtcaagtcaccatcttggatctctctaacaacaatcttgagagcatcccggagtcaataatcgctcggctgctgaacgtggtggtgctggacgtgcggtccaaccagctgaaatcgctgcccaactccatcggctgcctctccaagctcaaggtcctcaacgtctccggcaacctgctcgagtccctccccaacaccatcgaggagtgccgtgcgctggaggagctgcacgccaacttcaacgagctgacgaagctgccggacacgctggggttcgagctgcacagcctccggaagctgtcggtgaactccaacaagctggcgcagctcccctcctcgacgtcgcacatgacggcgctcagggcgctggacgcccggctcaactgcctccgcgcgctccccgacgggctcgagaacctcgccaacctcgaggcgctcaacgtcagccagaacttccagttcctccgggagctcccctacgccgtcggcctcctcgcctcgctccgggagctcgacgtcagctacaactccatcgccgcgctcccggactccatgggctgcctcaccaagctcgccaggttcagcgccgtcggcaacccgctggtgtccccgcccatggacgtcgtggagcagggcctggacgccatgcgcgcctacctcaccgcgaggatgaacggcggcgacggcaagaggaagaagaaggcgtggctgcccaagctggtcaagtacagcaccttcacggcgaggatgacgcccgggcgcaccagggtgcacgagaacacggagggcctcctcatgtcggactaccggtcgctcaacggcatcgcctcgccgaggttcctcaccatgctctcgccgcgccgcctcttctcgccgcggaggaattcgcccaagcattgttgatatggccgatccgatccgcctctgcctactctgtgtactggttgcctgtttgcttcaggggtgtacttcagatgatgtcatgctctcgtacttaattaggatagatatgatgatgctgctgctgctagctgctaccgctgctgcaaggtgtgtatatgttctcatgaagaggtttgtagcttcgcatacagtatatagctctacaatttttgtttgacgtaaaaaatgctgtagtacaatctagagcattgatgtacataacaagggtaattttcttccatgtctgtttgttaagcacc

SEQ ID NO: 16039 - DNA, 1976 bp, Oryza sativa
  ref <308>: DATABASE ACCESSION NUMBER: AK066547
  ref <309>: DATABASE ENTRY DATE: 2001-12-06
aagagggcagctgctctgttttcctgcaggtgtatatgctgaagacctgcaggctgcagcagagtcaagaaaggaagaaagggagagggaggcaatcctacttgtcctgctgctgcatagatggagaggctagatcaacatgtcattgagatggcctcactactggcgcaagaactgaagcatgaactcgcaagcctgaactcgccgacgacggggcgggccggcggcgagtcatctccgccgtcgatcatgatcgacaaggtcgccgagctcacccgcaacgtcgacaagcaggagtacgagccgcacttcgtctccatcgggccgtacaaccgcagctgcgactgcaagtccaagctcgccagggactccgacaaggtgggtaggctccaggaggtcctgtcggcggcggcggcgcacaccaccgcgccgctgcagctggaggacttcatcaccgagctcgcgcgcatggaggctcgcgcgcggaaatgctacaagctgtcgttcgatcacgtccagagcaaggatttcctgcgctggctgctgctcgacggctgctacatcctcgtccgcttcggcgacgtcgtgatgaggcgccgacctgaggacgaggaggtggaggaggaggaggagaccacggcggatggcatcgtgctccgccgcgtgaggagatggtttcatgtcccgagctgcaaggggttcctgcgccggcggctgctcgacgcgtgctacgtgctcgtccgcctccgcgacgtcgtcgtcgggcgccgcagcaaggcgcccgtggcggcagaggctaaccgcgtcgtgccgtcggtggaggagagggaagaagaatccgccgtcgaccagcaggaggccgtggcggtggtccgcgacgtgttctacctcgcggagaaccagattcccttcttcgtcgtcgacaagatccaccagctgacgttcctcgacggccagactccggcggtgcacgccatcgcgaggtacgcgcacgagctcctgcgggtgaacgggtactccgtcgcgacgccgaccaaggtggaggagccggagcggccgccggagccagccaacctcctccacctgctgcacatgcacttcacgcctacagtactgacgtccgccgccaccaccggtagccgccgccgcggcggcggtaggcccgtggggcggtggcgcacggcgatggagtactacttcgccggcgtaacgttcaagaagcggcccctcgatcggcgcggcggcgcgcggtgcgtcctcgacgtgaaggtgagcgggtgcggcggcgggacgctggagatgccgcagctgaccgtggacgcggagacgtggccgctgctccgcaacctgatggcgctggagcagtcgaacccggcggcggcggggagccacgtgacggcgtactgcgtgttcatgtcgcagctggcgtgcacggcggcggacgtggagctgctgtcgcggcggggcgtgatcgtgcacgggctggggcaccacggcgaggtggccaagcacttcgcggacctgtgcaagggggcggtgttcgacgcggacgacgccgacatgaactacctgaggccggtgtgccaggtgctcgagcggcggttccagagccggccgcggcggtggatggcgtggctgaagaagaagtacttcgccaacccgtggctcatcgccggcctcgtggccgccaccgttggcctcgtctacaccgtcatccaggcggtctactctgttctcggttacacaaaaccagggagctagctgtggtgacgtggctgtgtgacgtatcgtgctacgtagcagccatgcagtggtcccatgcgcgtagcagcatatatatatatatatctatatagtgcatgttttcagtggagtgtaagaatagtcagcttaaatatgtaagttcttttttgagaaccgaaacttgtaagtatatgttgtttagatgtaagaaagacttaacagcccatgtttct

SEQ ID NO: 16040 - DNA, 1006 bp, Oryza sativa
  ref <308>: DATABASE ACCESSION NUMBER: AK066548
  ref <309>: DATABASE ENTRY DATE: 2001-12-06
gagtcacctttccccctcactctctccacgcgacccagatcgatcgccgagctgcacctgcacctgcaccccgaggagaggagaggagcaatggcggcggggtaccgggcggaggacgactacgactacctcttcaaggtggtcctcatcggcgactccggcgtcggcaagtccaacctcctctcccgcttcacccgcaacgagttcagcctcgagtccaagtccaccatcggcgtcgagttcgccacccgctccctccaggtcgacggcaaggtcgtcaaggcccagatttgggacaccgccggccaggagcgataccgtgctattactagtgcatattaccgaggtgctgttggagcgttgcttgtctatgatgtcacccggcactcaacctttgagaatgttgagcgctggttgaaggaattgagggaccatacagacccaaacatagttgtcatgctagttggcaacaagtctgatctgcgccatcttgtagcggttcaaaccgatgaagggaaggcattcgcggagagagaatcgctctatttcatggagacctctgcgctcgagtccaccaacgttgagaatgcatttgcagaggtcttgacccagatctaccgcatcgtgagcaagaggtcagtcgaagcaggtgatgatgcaggttctggtcctggcaagggtgagaagatcaatataaaggatgatgtttcggcggtgaagaagggcggctgctgctcgggctaagctcttgctgtattttttttgggacctgtgtgagcttgtgttatcgccgttccagcgactgagaaattgttagtagtattagcaacttctatgttacgtagagagtttattgctataactgaaaggtttggccagatcagtttagatcttcctattgttgtatggtctccgcggcaactggggcatggtgttggttttcatgtgaatccattgcagccatgcttgaactgttgaatcaagtagaaatatgttttacgcttgc

SEQ ID NO: 16041 - DNA, 1588 bp, Oryza sativa
  ref <308>: DATABASE ACCESSION NUMBER: AK066549
  ref <309>: DATABASE ENTRY DATE: 2001-12-06
gagcaggaggagaccaagacaccggccatggcttccgacgacctcttcgagggcctaccacctcccgccgccgccgccgcgccggccgccggaggagagcgcgcgccttcaccatcgccgcctccgcctccgagactgcccgcgctgaagagcgctctcaagcgggacaagctctcttcctcagatgctgccgcttcctcacccgctgccgccgccgccacggatgccgcagccgaaggacgtgctcctgagaagcgacttaggtttagaactactgttgatgcctcagaaacgcaagtcattgatgctatgcacaagataacttcacacatacggaatccttcaaaattcagcaaggcatcaaaactagctctacagcttattgaggctgggagtgtcaagccagggacaatcagtcacttctttgctatattagaggctgcaatgtcttcaccaggagcttgtaatgagccttctgtacgtgctgattaccaggctttgtttaatgcagcccagggtgtaacagagtgtttcaaccaacaacagaaaaatcagtttgatatatgggtgctgcatgcagtggtggcaaatgatctttttacggatgacagttttgtgttctcaaaggctgtagggaagatcaaagatgccatctcagccctgccaatcacaacagtggatgatgacaatgatgaagcagcagctctagcagctgttgaaagtaataacacagatgataacccgcaagctgcggcatccaactcgttgccagatgatagcactcatgctgcagcctccaactcaagtgaggaatcctctgatccttttggtttggatggtctacttgagcacaagtcaaagaagtctgaaaaggctcgagagaagacggtcgccgctctaaataggaaagcagatgaggatgaatcaaagagatttctgaagtcacaacgagaagccctcctgaaatgtctagaaatagctgctcggcgctataggattccgtggacacagaccgccattgacatctttgcgaagcacgcctacgacaacatgaaccggttcacgacgcagcagagggacgccatcacgaagctgtggaactcgatcaaggagcagcagatcaggcggaagcagggcaagtcggtgagcgggaagcttgatgtcaacgcgttcgagtacctccaggagaagtactcccatgagaagatcagcatccgccatgctgtaggcggtggcggtgaacggcgcgccactcagtggctcggctaaaactacgaggtaaggttgctgtctgctgatgtacactggtgtgaggtcgctcagcggaagaaactgcaagaaactcgatgattattccacaacgacggcattcattttgagatgttgtgtacatcagcatgggttgtgagtatgtgacatatacggatgatgcaattgcttggaattttgatggcaagaatgcgatttatactttgatgatatagctgggcagctggctggctatgtacatgggtacgttgtcattgatggatctccattcttgtgatctcacctatcttgtaaacttgtagtagctgaatgagaggag

SEQ ID NO: 16042 - DNA, 1453 bp, Oryza sativa
  ref <308>: DATABASE ACCESSION NUMBER: AK066550
  ref <309>: DATABASE ENTRY DATE: 2001-12-06
gattaataactccccgaattcgccaaagcacaaccttcccccaccaacccaccgcacccagagcttcgcctcgacctcgccttcgccttcgtcgctgtagctgccgcgatccaggaggaaagggagtggggtgcggatgggattgggggaggaatgcgacagctgcacgggctgaaaagttgcagcagcagtagtagtatatgtccccccgcgccgcgggggttgtcgctgtgggtgaaggtgcggtgctcgctctcgcctgcctttcccgagttcgttggtgagggcaatctccggccgggcgcctcgtcggctggtgctccccgatcggggggctgctgcaaatcgctgttcggattggagcggccggtcggtctgcgtttgattgcagacatggcgaacttcagaggttttcggcgcgcagtgatcgtggttgttctgtgcatttgtcatgtgaatgtcgtaaggggacagagcactgaccctgctgaagtaaatgctctcagagctatcaaaggaagattaattgatccgatgaataatcttaagaattggaatagtggagatccatgcacatcaagttggaaaggagtcttctgtgacaatataccaataaataattatcttcatgtaacagaattgcagttatttaagatgaatctttctgggactttggcaccagagatcggtcttctatctcaattgaaaacattggatttcatgtggaacaacttgactggtaacataccgaaagagatagggaatatccacacactcaggcttataactttgaacggtaatcagctatctggttctttaccagatgagattggctatctccaaaacttgaacagattacagatagaccaaaatgaaatatcaggacccatacctaaatcatttgctaatttaacaagcatgagacatcttcacatgaacaataactcattaagtgggcaaatcccatctgaattgtcaagattgcctgaactcctccatctccttgtggacagtaacaatttgtctggacctcttcctccagaactagcagagactcgcagtttacaaatacttcaggctgataacaataacttcagcggaagttccatccctgctgcatacgaaaacataccaacacttctaaagctgagtcttaggaattgcaatttgcaaggaggtattccagatataagtggcattcctcaatttggctatttggatcttagctggaaccaactgacaggatctataccaactaataaacttgcttcaaacgtcactacaattgacttgtcacataactctcttaatggaactattccatcaagcttttcggggctgcctaatcttcaattcctatcgattgaaggaaatcacatagatggtgctgttccatcgacaatttggagtaacatcacttttgtgggaaatcgaagccttgttgtggacttcc

SEQ ID NO: 16043 - DNA, 1821 bp, Oryza sativa
  ref <308>: DATABASE ACCESSION NUMBER: AK066551
  ref <309>: DATABASE ENTRY DATE: 2001-12-06
gactagtggtggagagacgaaacacaggacgccgaaattctctcgcccacggattcccctccactcgcactgtcagtctgtcactctctccgccgccggccgccgaatctccggcgccgatggaggcagaccccaatccgatggtggtgctgcacgcctgcctcggcgtgggccacctcatccccatggttgaactcgcgaagctccttctccgccgcggcctcgccgtcgtcatcgccgtgccgaccccgccggcctccaccgccgacttcttctcctcgtccgcccccgcggtcgaccgcatggcggccgccaacccttccatctccttccaccacctcccgccgcccgagtaccccgacccggatcccgacgccttcctgcagatgctcgacacgatgcgtctcaccgtgccacccctcctcgccttcctccgctccctcccctcggtcgcggctctcgtgctcgacctgttctgcgtcgacgcactcgacgccgccacggcggccggcgtcccggcgtacttctactacacctcctccgccggcgacctcgccgcgttcctccacctcccgcaccacttcgccaccacggaaggcagcttgaaggacatgggtaagacgcccctccgctttcccggcgtccctccgatcccggcctccgacatgccgcacaccgtgctcgaccgcgcggaccggacctgcgctacgcggctggggcactacgggcggatcccggaggcgcggggtattctgattaactcctacgaatggctggaggcgaggtccgtgagggcgctcagggaaggcgcctgcatccccgaccgccccacgccgccggtgtactgcatcgggccgttgatggcgaaaggcgaggaggcggcgaacggggaacgccacgcatgcctctcgtggctggacgcgcagccggagaggagcgtcgtgttcctctgcttcggcagcttgggcgccgtctcggtgaagcagctgaaggagatcgctcgtgggctcgagaattccggccaccgtttcctctgggtggtgcgtagcccgccgcaggatccggccaagttcttcctgccgcgtccggagcctgacctgggaatgctgctcccggaggggttcacggagaggacgcgggacaggggaatggtggtgacgtcgtgggcgccgcaggtggaggtgctccggcacgccgcgaccgccgcgttcgtgacgcactgcgggtggaactccgtcctggaggcggcgtcggccggagtgccgatgctgtgctggccgcagtacgccgagcagaggatgaacaaggtgctcttggtggatggcatgcagctcggagtggtgatggacggctacgatgaggagctggtcaaggccgaggaggtggagaagaaggtgaggttggtcatggagttcgaggaagggaaaaaactcagggatagactgacaatggcgaaggaaatggccgcgaaggcgctggcagacggcgggtcgtcgtcgttggcgttcaccgaatttctgaaggatttgaactttggaaacactacaaaggaaaaagcgtagaagacgaacattgagcagtgcaaacgatcaagcacaaaagatgaacattgagttggaatgatttatattgctgctggaatgtgacaaaatcacatatctgcattatttacccgctgtgaactgtgctatttttctgtatttctgatgtgagcagaaggtgtgagagtttcttcaggctgattagctgcttcagcagtcagcacttgtagattacactctggagccgtgcttacatgatggaatagtattatgctctatc

SEQ ID NO: 16044 - DNA, 1418 bp, Oryza sativa
  ref <308>: DATABASE ACCESSION NUMBER: AK066552
  ref <309>: DATABASE ENTRY DATE: 2001-12-06
gtcagcgatcaaccgcattacacttggttaattaattaattctccattagcagctagctagggttctagggttaatttagttgatcagttcgccggaaccggagaagaagaagaagatgatagggtggggagacgtgtacaaggtggtggcggcgacggtgccgctctacttcgcgctgttcctgggctacgggtcggtgaggtggtggcggatcttcacgagggagcagtgcgacgccgtgaaccggctcgtcgccttcttcgcgctccccttcttcaccttcgagttcaccctccacaccgacccgttccaggtgaactaccgcgccgtcgccgccgacgtgatctcgaaggcggtcatcgtcgccgtcatcggcgcctgggcgcggttcatgagcaagggcggctgcgccgtgagctggtccatcaccagcttctcgctgtccacgctcaccaactcgcttgtcgtcggcgtgcccatggcgcgcgccatgtacggcgagtgggcgcacggctcgtcgtccagctctccgtcttccaggccattgtctggctcacgctgctgctcttcgtgctcgaggtcaggaaggtcgccatcgggatgtacgtcgacggcgccgaggcggcggcggcggccggcaaggacgtcgaggccgccggcgccgccgccgccgcaggcacggtcgtcgtcgccgccgccgcgggcaagccgtcgctgtgggcgctggtgaaagtggtggcgcacaagctggcgcgcaaccccaacacttacgccagcttcgtcggcatcacctgggcctgcctcgccaataggttacacatcgcgttgccgagcgccttcgagggatcggtgctgatcatgtccaagtcaggcacaggaatggccatgttcagcatgggattgttcatggcgcagcaggagaagatcatcgcgtgcgggacgagctttgcggcgctggggctggtgctaaagttcgcgctcggccccgccgccgtggccatcggctccatcgccgtcggcctccgcggcgacgtcctccgcgtcgccatcatacaggcagccctacctcaatccatcacatcattcatatttgcgaaagaatacgggctgcatgctgatgtgctcagtactgcggtgatttttggaatgcttgtctccctacccttgttagtcggattttacatagttttagagctaattaggtagacgcagagccaatggtacatcaggaaaacatagtttttccttgagaattccaaaacatacatactgacaacaaatgttgcaaaatatctcctgccaacattcctcattgcataaaactgtaatgggagtatcgagttctatggaatacttttaacacgttatgtaacaagaatgtatacttattctgttattcaaaagaatgtgttacagt

SEQ ID NO: 16045 - DNA, 1184 bp, Oryza sativa
  ref <308>: DATABASE ACCESSION NUMBER: AK066553
  ref <309>: DATABASE ENTRY DATE: 2001-12-06
gtggaccgagcgagaggagagaaggggcgccgccgccgccgccgccgcccgccatccgcgccgcttctccttctcctacagcatatatatatctcgtcggcgaactgagatagggtaactgagattagggttttggctcggagggggagtggagcgggaggaggaggaggaggcgaggcgatgatgatggtggcttccaggctccgattccaccagcttaggctgattggggtcaggccgacctgctgctctccgtcccgggatttcgcggcggtgagaacccaaaagcttcagctctcaagaagaaaagacgattggatgaagtgtgccttgagagatttcaacagtatagcaggacgtacatccaatcatggattcttcagggtaaggtccttgtggatggaagggttgtgaataaagctggaacacaagtatctgacaagtcgatcatagaaatcaaggctgaaattccaaaatatgtatgtagagctggtcataagcttgaggcggctatcaaagaatttggtattgactgtgatgaaaaggtagcccttgattcagggttatccactggcggttttactgactgtttactccaacatggggcatcacatgtatatggtgttgatgttggccatggacaggtggctgaaaaaattcgagtgcatgaacgtgtttcagtaattgaacgtacaaatttaagatatcttactgaactgccacagctggttgacttggtgaccctggatctgtcattcatctcaattctcttggttatgcctgctgtagtcaaagtaatgaagacagactcgacattgattacacttatcaaacctcaatttgaagctcgtcgatctcaggtaggaggtggtgggattgttcgggaccctctggttcataaagaggtgctagataggataatttcaggcgtagagcagtttggattctgcaacaagggctggattgaatctccgataaagggcgcggaagggaacaaagagtttcttgcttgcttccataggatcccagtgcaagaattgcagccggaggaagcaaagtcaacatgattatttgtacctaatgccatatctagttcacatagaatagctggagaatactttccgatctttttaccaaggatgttacttcaaattggcataatgtgatgtgagaatcccttttgc

SEQ ID NO: 16046 - DNA, 2525 bp, Oryza sativa
  ref <308>: DATABASE ACCESSION NUMBER: AK066554
  ref <309>: DATABASE ENTRY DATE: 2001-12-06
gggactcgtctctttcctcgggctcaagcgctcggcggcggccggccgccggcggggtggcgcggccgaggcccgagggggaaggagacggcggcggtgtgtggcgtggccggtacgcctccatgccttatcggtgctcgtgttccttcgcgtcgaggagtggggaagcggctggagaaatggctctccggcttccggcggcgaggccgccatgttcgcctagatgattaacatcgttgagcccggcgttgctgtgttcgggagtcggggacatcagcagcggcggcgcttcgtctcccagatgggtgaagacagcaacaaacccatccccgtgttcatctgccctcttccatggtcattacctactctccatttatgcctggttcccctacatttgctctcattcgtcatgcaaattttcagattccttttagctttcttcctcgcagacctctcatcaggaggttctgttgggtggatggtgctgtaccctttgagctagagctccagagcgacagaagtaaggcttatcagaagaaactatagggcggaaagcaaacaaaaaaaactgtcacgttattgcattttttcagtcaggaaatgggcctgtcaatctcatacccgccagatgactacctgcctacggaagaggacacagaccagatgtttgttcggtctctcagctctgacaatctcagcaccattgagacctttgagtcaccaccggcattactcgactccctgagttcccaaaggcctatcataaaagaatcctttaacttcaaaaaaagtgagggtgatccatttcatgttgaaactacagtatccttgatgagtcctaaacccggcaaggagaagagttgcacccataaacgcactatcctaccaagatatgggtcaatggaatacttgccaccacattctccagtggttgggatgatcagcccgaagcaccaggccgcagcagtaagagtgcagaaggtatacaagagcttcaggactaggcggcaacttgctgattgcgctgttcttgttgaacaacgctggtggaaactgatagatttcgcactgctcaagcacaattcagtatccttttttgaggaggagaagccagaatctgccctctcaaggtggtctcgggctagaacgaaagctgcgaaggtaggtaaaggtctgtcgaaggatgaaaaggctcagaagctcgctttgcagcactggctcgaagctattgaccctcggcatcggtatggtcacaacctccattactactaccaacattggcttcactgcgaaagcaaacaacctttcttctactggttggatgtgggtgaaggaaaagacgtaagtatggaggaccactgccctagatggaagctgttgcagcaatgcatcaggtatcttggccctaaagagagggagttctatgaggtagtaattgagaacaagaaactgctgtacaagatgagccgcaagattgtcgacacttctgagggccccaagaattcgaaatggatcttcgtgttgagcacaacaagagttctatacattggcacgaagagcaagggcacattccagcactccagcttccttgctggtggagccacatctgctgccgggagactagttgtagataatggaatcctaaaggctgtctggccacatagcgggcactaccgtcctacggaggcaaacttccgcgaattcatgatgtatctgaagaagagaaacgtagatcttgccaatatcaagttgagcccatcagaagacgaagaggacgagtgtctcaggtccaggagtggccgctcccagctcgagccaaccgagccaggaaagcctgagaaggaagaagacgccacggccgacgacaatggcactaccaccgtggccgcgcaagccgcgccaccctccaccaccggcggtgagccagccacgccggtgatgaagaggtcatcctccggcaaccgcctgcagcgcaagcggccgccgaggctgacgctggacaagagccggctggccaagggcgtggcggagcaggacgccgggtcgttcggcgaccgcctggacttctgcaaggtgaacctgttccgcggcggcgaggaggcggaggaggcggtggtggtgccgcaggagaagatcctccgccggctcaactccaggatgaccatgaactcgtaccagctcgggaagcagctgtcgctccggtggaccaccggcgccgggccgcggatcggctgcgtccgcgactacccgccggagctccagttccgggtgatggagcagatcagcctgactccgcgcggcggcgccgggccactgaggctcgggtcgacggcgaccccccggcagagcccctgcgcgccgctcccgtcgccggcgccgctctacgccgccgccgggactcccacctcgctgctgcagcacggtgcagcctaaaagtccttactttgtgggcgtattcagagtttcagacagtataaaattcgagccaataaccaatccatgcatcaattcagctaatattatcg

SEQ ID NO: 16047 - DNA, 2935 bp, Oryza sativa
  ref <308>: DATABASE ACCESSION NUMBER: AK066555
  ref <309>: DATABASE ENTRY DATE: 2001-12-06
ggttgctgcaaaggcattgtcgcaaagtcatgaagaatttgatgtggcaattaatgcctatccggagaaagagttgaagcgactggttttccaggatttgttgcatttattcgctcataagaaacggcaagagagagagagagagatagagagaggggaagcaagaagaggctttgaaagatttttgagtttgaatttcttgttcttgtgggcgtgtgcgtgtggagcggtggaggcatgaaaggcggcagctccgccaccgcggcgagcggcggcggcggcaacagcctggcgatcgtcgagcggcagaagccggcgacgtcgtgcgtggcgtcgctgttccagatgctcgccaagaagaagctcttctcctcgtcctccaagaagaccaagctgcttcccccagtgcgcacacagaagttctcgcctgggagaccacctgccggcggcgagaagacgccggcggccaagatgaggactctgctgcttgatgctccatactatccaaatgaagttaccactcgcttgccacctcctggccaagacaacaaaagcagtgaaatgtgcacaccgggtgtggtagccaggctaatggggctcagcgcaatgccagccaccagccatcaaaaggcagtaaaaaccatggatgcctccgagcttggtggtcaccggagtgaatgctcctatggaagcatatacaactcgcatcagaggcaacaaaagccagggcatatcagagatggccggcatgacaatggcaatcagctcgatgcagatgcgcagccggtgtggtcacggaagcatgcagcacacaagttagcctcacctattaagagtccaagatcagtttcaagcaggaacaaggttaggctgattgaagcagcagtcaaggtcctggaacccggtttacaatccaggcaccaccatcaggctcggaggcaagcgcgcctcgagtatagatgcaacagcagtgatgtgcagagtgctgctgaagccatgcacgatttctccgatcaattcgcaagagaaatgtgtgatgttgatgcatcaaggtcaggtgctcaaaatgtaggagccacctctctgcacaattctacttccaatcagtggtccgaagaggatactatgaggaatgtttctgttaggaggccaaaccagaacatatcatgtcaagcacaatctgagggaaaccataagggtcagaggaacggatttaaggacagtggtcagagaacatcagatgatgtccttgtttcaagtcaaggtgtccaaaaaatacagccgaaaaacatatcccgagagaatgttgattgtagacctcttaaacagaacaatctgaagcagaatgcattgcctgaaacttatagagcagcagatacagggcatatggtccaaaggcagaaacatagagctaaggagcaaaatgtggcaaacacagccaatgactttgtctgttcaaacagaggtatgaacaacagtgcatctttgaggtccaaaggaaaagtaaaggataaaatcggcatgccacatggtagtgcggagaacaggaacttgagcacaaaatgtcaccgaaccagtggcctgcatggtgattgttctaataaacagatatcaaagactgcaacactgaaagctacagagaaagacatgataattgcaaaaggtgcagggttagttagtgagaagccaaagtctaccagtccaaactctgtaaggaatgactcgcggagaaaggtagagtcacgcattgcttctaggggtaacaactcaggcatcatttccatctcttctaattcaccgagaaaggctgtcctcgctttgctgaatggtcatactaaaggatcagatagtgttgttctgggatctccaactggttcttgtcctaagagagactatcgtagggactgccaaaatatttcttcagaaagggaattggtcttgagtgaagctttacaaggcatatcaagtctggaaagtgcagaatcagtgtgctttaatcgaaatgagttgagaaacagagaaattctggacgacagagtaatgtcttcattgtttcgaaagacgagtgctatcaatgtaatggaagaatctccaagtgatgaatttctatggcagtgtaactttctggacagtctgacttttggcttcagagaggttcctagaagtggtaaattgcgtgaaactcataaaaagcatgaggttactacaaatgctagcgatccatcttattatgcagatgatgagtgcttttctgggagcctgctcaaaactgcagcatcagaagctggattcagagaccgacgccgctcggagaattgcacaatgcaacaagatggaactaacaaaagaaactccaggtgctctgaaactaattttggccaagacagcagcaacctgatacaccctggagaggttgcagcaactgttgagctgctactaacaaacgttcgccggtctacttctactactcctccacgaagaagaagaagaagaagaagaacgggttcagcttcaacgccggcgtcgtcaaggccacagaaggggagaagagcaggagcccgctgggaagcctcgcgttcgattccgtcatggagtgcttggactcgctgttcacccagttctgcgactcaggatacaggtcgttctcgagggttcccctgatctgccccgaggagaggctggctgctcaggtggacagggagatcgcgaggtgcagcggcatggccgggaaggaggtggatgagctgatcgcgagcgacgtccagcactcgggggtggagatcggcgtggatgtcctgcacgaggcgtttgagattggtgcccagatcgaacgggatctgctccaagagctggtggccgagatcgggatggatatgttgaggcgtttgtgacgtgatgatgatgatttcgtagcaatatggtgaaattatatgtt

SEQ ID NO: 16048 - DNA, 1353 bp, Oryza sativa
  ref <308>: DATABASE ACCESSION NUMBER: AK066556
  ref <309>: DATABASE ENTRY DATE: 2001-12-06
tgaaaattacttccatggctctgacgtgaactgtgttctatgccctcgcaaccctgatgactcaggcagcattgttcaggatctgtcgatctcaactatgtttacacaccatcagaagatagtagttgttgaccatgagttgccaaaccagggctcccaacaaaggaggatagtcagtttcgttggtggccttgatctctgtgatggaaggtatgacactcagtaccattctttgtttaggacactcgacagtacccatcatgatgacttccaccagccaaactttgccactgcatcaatcaaaaagggtggacctagagagccatggcatgatattcactcacggctggaagggccaatcgcatgggatgttctttacaatttcgagcagagatggagaaagcagggtggtaaggatctccttctgcagctcagggatctgtctgacactattattccaccttctcctgttatgtttccagaggacagaaacatggaatgttcagctatttagatccattgatggtggtgctgcttttgggttccctgatacccctgaggaggctgcaaaagctgggcttgtaagcggaaaggatcaaatcattgacaggagcatccaggatgcatacatacatgccatccggagggcaaagaacttcatctatatagagaaccaatacttccttggaagttcctatgcctggaaacccgagggcatcaagcctgaagacattggtgccctgcatttgattcctaaggagcttgcactgaaagttgtcagtaagattgaagccggggaacggttcactgtttatgttgtggtgccaatgtggcctgagggtgttccagagagtggatctgttcaggcaatcctggactggcaaaggagaacaatggagatgatgtacactgacattacagaggctctccaagccaagggaattgaagcgaaccccaaggactacctcactttcttctgcttgggtaaccgtgaggtgaagcaggctggggaatatcagcctgaagaacaaccagaagctgacactgattacagccgagctcaggaagctaggaggttcatgatctatgtccacaccaaaatgatgatagttgacgatgagtacatcatcatcggttctgcaaacatcaaccagaggtcgatggacggcgctagggactctgagatcgccatgggcgggtaccagccataccatctggcgaccaggcaaccagcccgtggccagatccatggcttccggatggcgctgtggtacgagcacctgggaatgctggatgatgtgttccagcgccccgagagcctggagtgtgtgcagaaggtgaacaggatcgcgg

SEQ ID NO: 16049 - DNA, 1688 bp, Oryza sativa
  ref <308>: DATABASE ACCESSION NUMBER: AK066557
  ref <309>: DATABASE ENTRY DATE: 2001-12-06
gtgttcattgccgctggtggcaatcttcttcttgttggaccaaaccctagctagcagcagcaaccatggcaaaccctaggcctccctatgtgttgctggagagagtagtgtttttcggaggacgcgagttacccgacggcacatggaaagatgccgcaggcatagtcatcggatggagcagagcgcggctgctgagtcggcgagaggcgatggaggcgatggaaccccatcccttcctcgccgatcctccgcaagtgagctccctgcggatgatgtcgccgacgcccgcgcacgcgcagcagctgggatccatccgcgacggcgacatcgccagcacccacaagggcatcgtcgtcatctacgccggcttctaccgaccaggctgctccgatgacctcgggggatgctacctcctctacgacgcccccaccaacgccctcaccgccatccccccgctgcccgactcgcctcgcttccccaccttgctacacctcggccgcaccgccgtcctcgtcgacgcctcccgctctgccgatgattacatcctcgccgatatcgtcaccaactccggcctgggcctccccgaagccaccatcttcgcatggtcatcgctgaccatggagaagagcggcggcgggtgggtcaagtcctccattccccgcctccctctccctgcacatctatgtggtccaaaacacttgttccagatcgacctcgccttctccctggacagcggccgcatctgctgggttgatctcctacagggcatcttgttctgcgaccgcatcttggcaccggatggccccaagttggggttcattccgttgcccactgggtattgcatcgatgtccatcacaggctccgccatcagatgatgccactagcccggcgttccatggcctgcgtctctggcgccgtcaagtttgtcgccttggttggcttggaagatattcattgcccccccaatgaggtgatgctcaagacatgggttctgtcccctgatttcaaggagtggaaggaggatagcaggtccttatctgtggaagagatgtgggcaagtgagagcttcaagcaaatggggttgccatgtgttgtaccagtttcccctgtcctcagcctgacccaagatggggtaatgtataccattctgaatgtcatcgagcaggtacctgcacaagttgatgaatttgggatcgtcgttgtcgatgatgacctggtgcccattgccaattatatgatccgcttcgacattcggcgaaacaaggtcctgtcctccacaaagatatctcaacatggtgaattgcagtggcttatacccaatctcattgccactgacttcactgcatacctacaggaccaccagagagctgaagaagcaggcaaggtaggagcaagcgccaaggggaagcgcaagcagatggagtactactgaatgatatgtagtatatttctgctatttatcatgcacataacatatcgctttttttagcttacatcctgtgactgtgagatgtaaggtcaaatgtgtttaggttaaccatcagagcttattttgtcactaccagaccttattttaatgactaagcctagcagttaaactgaatggtaaccagtatgtatgtgtaatcatcgtggatttatgtcatactactaatagtgttgggctcttcaaatccaacattgtacc

SEQ ID NO: 16050 - DNA, 4038 bp, Oryza sativa
  ref <308>: DATABASE ACCESSION NUMBER: AK066558
  ref <309>: DATABASE ENTRY DATE: 2001-12-06
gactagataggattaagtttcaagagttaatttcttgtactcttgggcgatccatgctgtcaaatcagcaactaacgaggcataatctcgatcactagctctgatctgatcttcagctagcgccggcgagctgcagaggtctccatccatggcgccggcggtcagtgcatcgcagggtgtcatcatgcggtccctgacgagcaagctcgactcgctgctgctgcagccgccggagccgccgccgcctgcgcaaccgtcgtcgctgcggaagggggagaggaagaagatcctcctcctcagaggcgatctccgacacctgctagatgactactacctcctcgtggagccgccgtcagacaccgcgccaccgccagactcgacggcggcgtgctgggctaaggaggttcgcgagctctcctacgacgtcgacgacttcctcgacgagctaacgacccagctcctccaccaccgcggcggcggcgatggcagtagcactgctggtgccaagaagatgatcagcagcatgatcgcccggcttcgaggggagcttaaccggcggcggtggatcgccgacgaggtcaccctgttcagcgcccgcgtgaaggaggccattcgccgccaggagagctaccatcttggcaggcgcacctcgagctcgaggccgagagaagaagtcgacgacgacgatcgcgaggactccgccggcaacgaacgccgccggtttctgtcgctgacgttcgggatggacgacgctgctgtgcacggccagctcgttggtagggatatttcgatgcaaaagctcgtccggtggctggccgacggcgagccgaagctcaaggtggcttccattgttggatccggaggtgttggcaagacgacgctggccacagaattctatcgtctgcatggccggcggttggatgcgccgttcgactgccgggctttcgtgcggacgccccggaagcctgacatgacgaagatcctcaccgacatgctgtcacagctgcggccacaacatcagcatcagtcttcggatgtttgggaggttgatcgactccttgaaactatccggacgcatttgcaagataaaaggtacttcatcataattgaagatttatgggcttcatcaatgtgggatattgttagccgtggtttgcctgataataatagttgcagtagaatactaataacaacagaaattgaacctgtagctttggcatgctgtggatataactcagagcacattattaagattgatccactgggtgatgatgtctcaagtcaattgtttttcagtggagttgttggccaaggaaatgaatttcctggacatcttactgaagtttctcatgacatgataaaaaaatgtggtggcttgccactagcaataactataacagccagacattttaaaagccagctgttagatggaatgcagcaatggaatcacatacaaaaatcattgactacttccaatttgaagaaaaatcctactttgcaggggatgaggcaagtactcaaccttatttacaataatcttcctcattgtttgaaagcatgtctgttataccttagcatctacaaagaggactacataattaggaaggccaacttggtgaggcaatggatggctgaaggtttcatcaattccatagaaaataaagtcatggaagaagttgcagggaactattttgatgaacttgttggtaggggcctggtccaaccagtagatgttaactgcaaaaatgaggtattgtcatgtgtagtgcaccacatggtattaaatttcatcaggtgtaagtcaatagaggagaatttcagcattacattggatcattctcagacgacagtaagacatgctgacaaggttcgccgactctcgcttcacttcagcaatgcacatgatacaacaccactagcaggtttgagactctcacaagttcgatcgatggcatttttcggacaagtcaagtgtatgccttccattgcagattataggcttcttcgagttctgattctttgtttttgggctgatcaagagaaaacaagctatgacctcacaagcatttctgaactgttacaactgagatatctgaagataacaggtaatatcacagttaaacttccagagaagatccaaggactacaacacttgcagacactggaagcagatgcaagagcaactgctgtcctattggatattgttcatacacagtgtttgttgcaccttcgtcttgtactacttgatctgctccctcactgtcacaggtacatcttcaccagcatccccaaatggactggaaagctcaacaatctccgcattttaaacattgcagtcatgcaaatttcccaggatgaccttgacactctcaaaggactgggatctctcactgctctttcgctgcttgttcgaacagcgcctgcgcaaagaatcgtcgctgcgaatgaggggttcgggtctctcaagtacttcatgtttgtctgtacagcaccatgcatgacttttgtggaaggagcaatgccgagtgtgcaaagattaaatctaaggttcaatgccaacgagttcaagcagtctgactctaaggagacagggttggaacacttggtcgcccttgcagagatctctgcaagaattgggggcactgatgatgatgaatcaaacaaaactgaagtggagtctgccttgaggactgcaattcgcaagcatccgacgccgagcactcttatggttgatatacaatgggtggattggatctttggtgctgaagggagagacttggatgaagatttggcacaacaagatgatcacgggtatggatttttcattctattcccaggttacaacttacaaggattattgagcttctttctttctctgccgtggcttctatctttaccttctatgcatcttcaacctgacttgatgattgtttgaaaccaattttaatggaagttaaatgttattgttgtgaccctgaatcaggttttgtatgctaccggaatcctcttcacgtcttcagagtagaggtaattttgtttcttgtcattttacagttacagttcatctacttaaggaattaatgggaggtcctatattttctcgggtacctagaaggtgtggttcctagtcttacctccttaagaaccgtagaatgttggccctaacacttggatcaaagaacgaaaggtgtatgcactatagtatcctttatatattgcacaagtcaagacatttgttaaaacacacccagtgctagtaatttgtttactgagatatgaattatcgccaaatacccatactgagcctattagtaaaatatttacgaggtgtttgaggacagcataactttcagtaaagaatttactacgtgaggtgtgtgttttaggtattgcgcatcttgggtgcattttagcgcaaacgtgtataatatatatcccatggtactaactcatgtcttaaccataattgcacaccaacacaaaacatacactactacagagataagtatcgaagaagacatgcccaccggtgcggaagggacggtgattgtgccccacacaatggagcagttcgccctccacatgagccaagccaagcaatcccacaagctcgtagtcatccagttcactacttcccggtgccctgcttcacgctacatcgcgccagctttcaccgagtatgcgaaggagttcgctggtgcggttttcattaaggtcaatgtcgacagcgatgagctggagagtgttacggactggtatgacatcgaagggatagtgccaacatttttcttcgtcaaggatggggagaagattgacaagattcctggtgctaacaaggagttgctccgagccaaaattcgaaggcacacagcttctccttacttcctccgttgataatgacttcttttatcgtctttgtctagtatatatatggcacttatatagttaactaggaagggcaccttgtttaatgtagctttcatttttattatgaatgttaaggatgatattatattgttgaagtatttttttactccc

SEQ ID NO: 16051 - DNA, 3799 bp, Oryza sativa
  ref <308>: DATABASE ACCESSION NUMBER: AK066559
  ref <309>: DATABASE ENTRY DATE: 2001-12-06
gtgaggatgcaaggcttgcagagcagctgcccaagctgctgctgctgctcatccttggcacatgtccatggagtccgcggcggcgaccgcattcttgaagacagtcatggggaggctgttcatggcgctggagaaagagtacaacaagcacagaggcctcgcgcaagaaagccactccctgcagcaagacctccgcatgatcgccgccgccatggacgaccagcagctttccatggggaggagcgacgccgccgcacgcacggccgtcgcgcggctgtacaccgaggagatgctcgacctcgcgcacgacatcgaggactgcgtcgaccgcttcttgcaccgcctcacctgcaaccaccacaaacgcggcggcgccggcgccggagcatcgctgctgcgccgggtcacgcacgagctcagcaaggtcaagagccgctcgagcttcggcgacgagatccagaagctcaagaaacgcctcagggaagcgcaccagcgagtcctcaccatcaatccgccgcctattctcatcgctggtgggtcgtcgtcatcggcggcggtcgcgccgccgtgtcgggcagcgcgcagcccggtgggcatcggggaggacgtcgaagagctcctctcgatgctggacgaggtggagggcgagccggtgcagatgcgagtgatctccgtcgtggggttcggtgggttggggaagacgaccctcgccaaggcggtctacgatgaacctcgagcaaaggacaaattccgccaccgtgcgtgggtcgccgccggtggctcgccggagatcagggggatcctccgtgatgtcctccagcaagtgcgtcccgacgatgccatggatgtggacggccagcgtcttgaagcttcgttcaaagactacctcaaggacaagaggtatttaattgtgatagatgacattgggatggatcaatggagcatcatcaggtcagcctttgaagacaatggaacaagcagtagaataatacttaccacaacaattcagtcagtagctaatatgtgggcggacccagaaatgggccaaggcccgggccgctccatggaaatttcagcccaacgcaaagtttacatggtaaaaggaggtccaatagactttttcctggttaaaaaacatacttctctaatgggcctcccatcccaggccccgggccgtggaccagcttgcccggggtctgggtccgccccgtgcagccatggcagtggttatgtgtaccaaatgaacaccctgggtgaagacgactccaaaaaactagcttttccagggtttagatcacctgaattggagcaaggttcagcatccttattagggaaatgtgatggtcttcctcttgctctggtcagtgtctctgattacctgaagagttcaagtgagcccacaggagagctttgtgctaaattatgccgtactctgggctctcatctgaaagagaagcatggccatgacaacttttctgaactcaggaaggtgcttcttgacaactatgacagtttatctggctatgctctgagttgcttgctgtaccttggtatattcccaagcaatcgtcctctgaagaagaaagttgtaatcaggcggtggttagctgaagggtatgcaagaagtgattctcttcgcagcgaagaggacattgccgatgagaatttcagtaagcttattgaccggcatatcattcagcctattgacacaagaaacaattctgaagtaaagacgtgcaaaactcacggaattatgcatgaatttttgctgaacaagtccttgacccagagattcatcgcgacatcatctcatgatcatccaagacttggaatcaatactaccaatgcacgccacctttctgtccatgctggcgaactgagagaatgcgtcacatctgatgaagaattatctcgtgtccgatctctgacaatctttggggatgcaagtgatgcaatttcatattttcgcaagtgcaagctgatacgaatcttggatctacaagaatggaacaatctagatgacgatcatctgaaacacatatgcaaactgtggcatctgaaatacctgagctttgggggcaatatcagtgagcttccgaggagcattgaaggacttcattgtttagagacactggatttaaggagaaccgagataaagtttttgcccattgaagcaatcatgctgccccacttagctcacctttttggaaagtttatgcttcagtgtttagagacactggatttaaggagaaccgagataaagtttttgcccattgaagcaatcatgcttccccacttagctcacctatttggaaagtttatgcttcataaagatgatctgaagaatgtgaacaagagtaaactacaaaaattcttctcttcaaataagagcaacctgcgaactttagcaggatttatcactgacgagggcaaaggatttctgcaacttgttggtcatatgaaaaaactgaggaaggttaaggtatggtgcaagcatgttgcaggtagcagtaattacatcgctgatctttcacgggccattcaggaattcacgaggactccgattgacagggatagtgaccgttctctctcacttgattgtgaagaatgttctgaaaattttctgagctcaattgatttggagccatgctctgaagattccaaataccatctaaggtcactaaagctacatggcaagttactccggttacctccatttgttacttcgctgtcaggtctcactgagctgtgcatttcatcagctatactgacacaagatcatctgtcagcactaatcaaactgaacagacttctttacctcaaactgatcgcagacaagcttgaaaatattgaaataaaaattggggcattcccaagcctgcgacgcctgtgctttgtcatgaaaattatgacttcagctctaacaacaattgaacaaggggctctatcgaacctcgtctcgcttcagctgctctgtcaaggtctagttggtctttccggcattgagatcagacacctgaaacatcttaaggaaatcaccatcgactctgcagtgactgtacaaacaagacaagattgggaacaggcagcaaagaaccacccaaacaggccaagagttctgttgttcagaaaggttgatccgatggaaagcgaggagcctgaaaaaccttgtgccataggggaaaagaggaaactttctgtagcccagccaacaggttcagatggtggactggattctagccttaagaagatgagactttcagagccttcttcttctcggcttcaggtgatcgttcatccggtggtagtaacagccactgaggcagcaccccagcattcgtttgcgaatctctagcacatatattcaactgcagcagactgcaataaaatacaattcaaaatttgcaagaaaagcttagcaatctttatttctgttcagtacatctgttagacagttacatggtccagatttctgtctttccctacttgttgtgtacttcctacagttactgtttagctacattagtgtggaactttacgtgcctagagctttgaaaatgctttgttttcgttgaaatgagttgttgtctgtaagtctattggaaagaagtgaatgccaggaagtgaatttgtccaaaagtcgccgaaggctgtatgttcaggcctcagggtctaaattgaccttgttttgtgtaagtttagggtgttcaataatgtaactttaggggataatttggggatttttcactgtactttgatccagccctaaagggcaagtataaatgtgtacaagagatgt

SEQ ID NO: 16052 - DNA, 2847 bp, Oryza sativa
  ref <308>: DATABASE ACCESSION NUMBER: AK066560
  ref <309>: DATABASE ENTRY DATE: 2001-12-06
gggttttccctcccccttcccaagtcccaactgctttctcgtcggatgctcgtcgtcgctgcgggccgcggctgctcgttcctcttcctcgtctcctccgggctccggggaacccatcagctatcgcaggcacgcgggttggggcgactccgctctgcccccggatctccggcccggccggcggcgcgcggtgcggaccagctcgggttgggttgggttgggttggatttgggggcggggcagtgcgagctttgctgctgctgttgctgtgccggcgggatgcggtggtgcggcctgcggctgctcccactggtttgcctgcttgttattgctgcagccgcagaagaggataaaacaaatattctacaagcagacaaaaataatgacaacaacatagcacattcagatggtgggaagacaggacggcatgatgaaacaaatcctaatacagtacatcatgatgaaggaaagaatgaccctgatgggaacaacaagaaggacaaatcaacagaagttattagcacggcaaaatatgcggcagctgtgcatcatgtggataaagatatcaacacagcaaaatcctcgcatgtaacagacttctcacaagatcctcttatcaaggggtgtgacccatctcatacatgtgtaattgaaaataaaaagttcatcgcctgcttgaaagttcctggagaaggtgattttctcggcaactagtcttctctaatctctgttagtgcaccatcattgttgtagtatagcagtatacctgtcttcacgaaaagttctcatttcctttttgacagatcgtttgcaaattgtgttatggcagttattttatctttgatttgaccttgccttaattagtgctaccaaatactgggtttgttgataaaaagattgacacgtaaattggtctgcaactgtaattttccccagtcagcaattatttttgaccaattgcaattcactattgtcaacttatagccacgactagtgctgatgaagtgacaattgattgcgtagttggagctatctatactaaccaaaaacacaatgtctgggaccaaattgaatatgcaatacaactgctgtatcacaagcaaattttgcccctgacgaatttaagcaaataatgtttctgcaaaagtacctgtgatgttatcacctacctaaaaaatactttgcaaagatatattttcattgttttttctctgaaggttttgcatcacatatggatatagtcgtgttagttcttattaattagatttttctatgttttgcacataaataacttgttaccgttgaaatcagattcattagctctatcacttctgatggacaacaaaggcatggacccactttatgttggtattacaactccagaatttgtcacttcagctgaagacaccatccatgtccaagcaaatgatcataatgaggtgagctaatgcaaatgagtatcttgaagataattatagtaatgagattttctggcttaacttttctttatgcaatatttgcatggtgttacttccacacatgttatttcagaagagactgtcttttatattctttattgatatgaaagtttttccagcgagcttttgagaggattatactgcaggttttctggcttattttttcccatatgtactatctactgtatgtgttgtttcaaaatagagtagctgttttttgcaagcttatagaaggatagttgctctttaccaagatcctggcttcatggtgtcattaatttatgttttgtcatataattggttcgtgagttatatatttcacgtgaactgcggtaggttattcccatattgatttatatacatgcataattgcattagcttattttgagttcttgttgatagtgtatctcaggattagcagaatgtcagtatactattgctgttcttatcagcttttattcaaggggaactggatctttctcatgctgtttcaatgttttcaatcgatgtactgatcttcttttttattttcatattgttaatttagacacaggtgactatttttaacaacggtgcaccaaacatgacaataattcttagagttgctgaagagacctgcaatattagcattcaccgagcaattgcgagggagataagtcaagtaatgccaatgcggcttacctcaaaatacatgttagtgcctgtttttcttcttattggagctgtggtagcatgcattaaacttcggagaagaggtatccaagatggtggacctgcataccagaagcttgatgcggcggagcttcctctttcgactggagggaagaaagaagcagatcaatctgatcagtgggatgacaactggggagacgagtgggatgatgaggcgccattgacgccaaccagacatatgcccaacctatcatccaaaggtctagcttcaaggagatctaccaaagatggctggaaagactaatgacaatatactcccttttcatggattggaaaaatagttccaatgcctatatcatatgatttttctgttccattatctgaaagaatatatatcctttttgccatctttataataggaaaattttgttctcttgctaccttttgcttgatttctggagtgtataagaagagactacaggggctaagatatactggttcagtttgtgcatttgttcaccaatgtagatatgtgcacctgatatgttccctacaactaagggatctccagagcttcgcttcacttgtgcatggattccaactgaggctccaacttcgtcttgcaatcatgaaagttggatgagagatccaccgaacaatgaacaaattgttgagatgaatgctatatctttcattg

SEQ ID NO: 16053 - DNA, 2396 bp, Oryza sativa
  ref <308>: DATABASE ACCESSION NUMBER: AK066561
  ref <309>: DATABASE ENTRY DATE: 2001-12-06
gctctctctcgagtctcccgtctcctttcccctccttcctcctcccctttcgtcttagcctcagctcgccgcgagacgaatcctcccctcgccgccgccgggtccgatcgacggcggtatcgagggacggagggggcgcgcccgttctctcgccgtacaccgtcgtcgccgaccggctccctcgacggcacggtaaaataaaaaataaaaagcctcctcctcctcctcctcccctatgatggcggatgcggcggcgggggggcgggccgatctggacgccgttgacccgcccgattcggctcggtcgcatccccccgtgcgcgcgtttactgggaggatctgttgtatttggacgttttagactggatcgagtgagggggattttgcggtgttcttgctgtgacgggattcagctatgtaggtgtaggaatcttatgttaacttgttgggtggctctgctgcttctgattctttctgtgaatctggagtaacaaattctttctgtgaatctggagtaacaaggacttgtgctatggccgatctctacttttagtacttcgttatgttctatacggcataggagtccatctctcgatagataagagttctctgattttggatggggatttgcttgatggatccggagtcatataacatgtttgcaaaaaaagaaaaaggaggagtccatctctcgatagataagagttctctgattttggatggggatttgcttgatggatccggagtcatataacatgtttgcaaaaaaagaaaaaggaaaaatgatttagtttgtgttctgtcatgtataacccttgtttctacaaagatgtactagtttgcgatctgattaagcatctcatgctttctcgctttgattctctttcagagtttgaagttggaaatcaaccttgttgttctctgtagcgctttcctttggattgcggagaatttcaaacaaaaccaacaaacctttgcatctgactgacttgaggtaactatgccaaaggacaggagcacccgtgccatgtcatacgagcgccgccggtctcgtgtttcgccgtacccctccaatgggaagggctgtgctcgcaggtcagaggagtctgctgctgctgccgctgccgctgccgcgaagcaggctgcggaatgggaggatgtccgctgcccggtctgcatggatcacccacacaacgctgttctgctcgtctgctcgtcgcatgagaagggctgccgccctttcatgtgcgacacaagctaccgacactccaattgctttgatcagtaccgcaaggcctctaaggagtcctcaaaggattctggtgccagtgctgctgctgcgccagaatgcagcgagtgccagcagcccataaaactgtcttgcccgttgtgtcgtgggccagtcagccattggacaaaggattatgatgcacggaagtacttgaacgtgaaggttcgagcatgtactaaagagtcctgcgagttcaggggggcatacggtcaactgaggagacacgccagggagaaccatcctactgttagaccaactcaggtggatcctgaacggcagcgagactggcacagaatggagcagcagcgtgatcttggggacttgttcagcatgcttcgttcaggcttaagtgccagggaggacgggatcggagtcagtgaaggggaagaggatatcagcgagagggctctacatagcccatctataacaatggtcttcattgtgcgcactggcaggtcgatactccactacagggaagcattcccaggccaccacagaagaagaacaattcttctgcttggggaggcttttggtcgtgaatcctccccattagggggagcaagtggcagtggtgatggtgacaccacagctcgcgaaaatgatgaaggtgatgacgacgtcacgctatcaacagaggcatcggctggttctcagcatgatggtgaagtcgatggtgatcctgcacattgatgcagctggtagggagtgccaaggcgtgcacctggactgaaaagctctacaagcaagcaatctttcgggttcaccaggcatccaagaccacatgttgggaagaaacatgggggtgttccatttggctttaggcgtagtcaggacatcctgcctacgtgcaagaagaactgagatgaaattgcaatgcagggataggctcaaaaccgctgtggagttgtcttagtttcatttttaatatatttgctggaaggtctgtagcaacagaaacatcaatggtggtggtgtatttatcatgtccacggctaggacttgggtgaattcaattcactgcgttgtaatttgatctctgaaatatattctttctgcgttgatgaatctgatcatgttaaagcagaaatttgatgtatatttatgt

SEQ ID NO: 16054 - DNA, 1234 bp, Oryza sativa
  ref <308>: DATABASE ACCESSION NUMBER: AK098960
  ref <309>: DATABASE ENTRY DATE: 2002-08-28
gtctctcctcctctccgcggcgccactctccttccgccgccgccgccgacgacgacgacgacctcctcctccgggtcgacgaaaccctagccgcggcgcggaggcctgctgcttccggctcccgctcctccctgccgagttcccgcgaacccttcgctgccggtgaaggaaggcgaggatggacggcggctacggctcggtcacaatcgtccacgacgcgcgctcccccgaggacgtcttccaggacttctgcggccgccgctccggcatcgtcaaggccctcaccatcgaggtggagaagttctacaagcagtgcgaccctgagaaggagaacttgtgcctctatggactgcctaatggaacctgggcagtgactctaccagctgatgaagttcctcctgaactaccagagccagccctcgggataaacttcgctcgtgatggaatgcaggaaaaagattggctgtccctgatagctgtccatagtgattcatggttactgtctgtggcattttactttggggctcgttttggatttgataaaaaggccagggaacggctcttcatgatgaccagtagtctccccactgtctttgaagttgtgtcaggaggtgtgaatacacaatcaaaaaccgccaacggcagtagcaaaaacaagtcaggctctaagccaccaaagcggcccaattctgacagcaagccacagaagcaggtccaggcaaagtatgagggagagaacggcggcagaggaaatggaggtgatgaagatcaagctgaaaccatttgtggcgcctgtggtgaggcctacgcaaacggcgagttctggatttgctgtgacatttgtgagacctggttccatggcaaatgtgtccgaatcacccctgccaaggcggagcacatcaagcattacaagtgtcctggctgcagcaacaagaggaccagagaatgagcgtccattttttctttctaatgtgatcctgatagtagtggcaaaaaatagatagtagtttacccgtgaacttggggaacctcaattcctactgggtgaccgtcgttgcggcagccctggttgccccgctgtattagtagtagctacgttacttcttgtatcatactggacatagttggtagtgccacagtaatagtagtatcaataggccatcttctgcctccttggttggatggattggttaagtgtctaaactctctgattaatgatgtgattttttagtct

SEQ ID NO: 16055 - DNA, 2084 bp, Oryza sativa
  ref <308>: DATABASE ACCESSION NUMBER: AK066562
  ref <309>: DATABASE ENTRY DATE: 2001-12-06
gggggagggagaaggcgcggtggagcggagtccggaggaaacgcaaggagaggagaggagcagaggaggcgaagctctcgccacgcgctcgcgtggacgacgagatgatggccttcggctcgctgctgctctcgccgccgccgccgccgccgccgccgccgtccctcccgctaccggccagaccctccgccgcgtcgtacctagtcgcggtacgccgccgccgcccgccggagcctcgctgccgctcgcaggagatggcgtccagcggcggcggaggaagctccggggggctcggctctgagggtagatttgtccgccgataatgtggctgttgctatcgtttatttcgtgcaaggagttttgggtcttgcgaggcttgctgtgagcttttacttaaaagatgatcttcatcttgatccagcagagactgcagttatatctggtttatcagcgttgccatggttggtcaagccgctttacggttttatcagtgattccatccctctctttggatatcgaagaaggtcttaccttattctatcaggactcctcggagctctttcgtggagtttgatggcaacaattgtggatgataaatacagtgcagcactctctattattcttggatctctcgcagttgccatcgctgatgttgtggttgactctatggttgttgagagagctcgtggtgaaccacagagtacatctggatctctccagtcattgtgttgggggtcatcagccattggaggagttatgagtgcatacttcagtggttctctagttgatacttatggcgtaagatttgtctttggtgttacggcatttttgcccctcatgacatctactgttgcagttcttgtgaatgaaaagcgtttgcctttgggagaaaatgctacctcatcttcagattcagggttaattgagagctctaaggagcacattatgcagatttggagttcagtaaagcaacccaatatcttcctacccaccttgttcatattcctttggcaagcaacaccacaatcagattctgccatgtttttcttcatcacaaataagcttggattcactccagagtttctagggcgtgtcacgctcgttacatctattgcatccttggtcggcataggagtatataattcatttttgaaggaagttccattgagaaaaatcttttttgtgactacaatatttggttctgcccttggaatgacacaggttcttcttgtcactgggctcaatcgagttcttggaatcagtgatgaatggttctccattggtgattccttgattatcactgtccttggtcaggcttcctttatgcccgtgttggtgctggctgcaaagctctgccctcctggagtggaagcaactttgttcgccactctgatgtccatttccaacgctggaggcgtcaccggtggtctgttgggggcaggcctgacgcagttcttgggagtcaccaaagacaacttccaaaaccttgctcttctgattgtcgtgtgcaatctcagctccctgctgcctctacctcttctgggcctcctcccggatgaatcacccggtgtagataatgagcaaacaaaagtcgattgagattatctccaagcatcggtcctacttgaatgcaggacatccaatcgcctctacgtgaactcagcggcgcaggggaattgggaatcaggctgcagctgaccttggccgttgcaatgttgatcaccctaccgaatagtatgtttagggtgatcagttgatgattggttccatggagatatacgcctcatggattagcggacttgccgcggttgttaactggtggttaggtcaggattgtgtgccgtcagagcatggacatggaagccgcagtgtacactagtgcaggtacgaccttttgttctttaccatgaaaaacggcagaagagtttcccgtgtattctgccacatccaaccgatagaagtagtatccatgttctgaactcttatcaagttatttgtacatgcaatgaaatgtagtgtatacagagattgtacatcgattcgtaactttctggaactgatttatgaaggtgtagccgtgtagc

SEQ ID NO: 16056 - DNA, 2060 bp, Oryza sativa
  ref <308>: DATABASE ACCESSION NUMBER: AK066563
  ref <309>: DATABASE ENTRY DATE: 2001-12-06
ggtttttccccttcacaatcagagcgaaatcgagagagagggcggcggcggcgacttcgtgcgcaagagggaggcggcggcgacttcgtgcgcaagagggcgtgccacgggccagcgacgccagtgtcctcccttctccatcctccttcctctcatccctcctcccgccgatccctttcccttctccatcctccttcctctcatccgccgccgcgccggctcgtggctgagctgctcctgcacctcctcctcccagtcccgcgcccgcagctcccgcctctccccccgcttcttccgcctctcccgccctgtcagctccccctcacctccatagccaagtgctagccaataagaaaattttctgccgcatccatgatacttagagactccactgcttcattgaccaagaaaatatagaagatcaaaggtgtcttgtagaacttaggtgttaaaaggaatagagtaatctagggaggaataaagcatgggaaaaggagaggtagccactaggtccaaatctcaaaaatcatcggcgacacagaatgaacagagtacacccactaatcctcctactgcatatccggactggtctcaatttcaggcatactataatcctgctgggacagctccaatgaccccaccgggctttttccatccaaatgtggctccaagtcctcaggggcacccatatatgtggggtccacagatgatgcctccctatggaacaccgccgccatatgcggcgatgtatgcgcaagggacaccatatcagcaggcacctatgctaccgggttcacacccatacaatccttatcccgggcaatcaccaaatgggacagttcaaactcctacatctgctggcggaacagagacagataagtcaggcaaaagtaagcggaagactcccctgaagagatcgaaaggaagcttaggtaatcttgatgtagttgcaacaaaaaataaaaaggcgcccgcaaaaccttcagcatcctcatccaatgaaggttcttcacacagtgagagcggaagtggaagttcttctgaaggaagcagtacaaattcaaaaagtggttcaaggacaaaggatggttctgagcatggccagggtaatgatgctagcaacaaaggagctactgctcagagttctgcggttgagcccgtacaagcatctactgggccagttgtgcttaaccctatgatgccatactggcctgtccctcctcccatggctggcccagcaactggtgtaaacatgggaatggattactggggtactcctacttcagtacccatgcataataaagttattgcagcaccagcatcagctccttcatcaaactctcgtgatgttgttctcagtgatccagctatacaggatgagcgagaactgaagagacaaaagcggaagcaatcaaatagggaatcagctcgacgttcaagattacgcaagcaggctgaatgggaggaagtagccaatcgagctgatttgctaaagcaggaaaacagctcacttaaggaagaattgaaacaacttcaggagaagtgcaatagcttgacctcagaaaatacaactttacatgaaaagcttaaagagcttgaaggcgagaaatcaaatggaaactggtataaagagtgaaaagctgtaacttatcactttctgacttctgatataaattggaggcgacatggtaggtccgataattaggaggtattcatgtatgctattagatttttggccgagaggtagaattgtatcataggatttgacatgatggctacagattcttcttccagttgccgcggctgctgtactctatgcttttttttttctgcacttgtgtaagattctacgaagtaccatgtaaaagtccccaagtgatgtttgaaactctgggggttagcttctgagatagttgatgtagagctgctcattgagcgtctttacctgaattgatgtgtgtcacagttatagtttgtgacttatcattcagataattagaggcacaaatttgtataatgtactaacgggtcgtgataaggaaattttgttgcattttgct

SEQ ID NO: 16057 - DNA, 853 bp, Oryza sativa
  ref <308>: DATABASE ACCESSION NUMBER: AK066564
  ref <309>: DATABASE ENTRY DATE: 2001-12-06
ggctagggtttcgggttcctcgacctctcgccgccgtcgtcccgcgcgcttggaggtcggcctgctcgacggttgtcgccatgatcatccccaagaagaaccggaatgagatctgcaagtacctcttccaagagggggttttgtacgccaagaaggactacaatttggcaaaacacccacagattgatgtgccaaaccttcaggtcatcaagctcatgcagagcttcaagtccaaggagtatgtcagggagaccttctcctggcagtactactactggtacctcactaatgatggcattgagcacctgaggaattaccttaacttgccgtctgagattgtacctgctacactcaagaagtctgcaaggccaccaggccgcccatttggctctggcccccctggtgatcgcccaaggggcccacctcggttcgaaggggacagaccaaggtttggagaccgggatggctaccgtggtggacctcgtggtgcgcctggtgattttggtggtgagaagggtggtgctcctgcagaattccagccatcattcaggagttctggtggtagacctggctttggacgcggtggcggcggtggtttcggtgctggtccaacctcttcctccatggagtgaaaggagctcaggattcttgtcgcaggagacattttagtattcaagttttgcagtggtgtttgcagtagagatcaatgcgtagcacctatgttgaaaccttaagagatgcaagtgtaattctcctggtgttgatggcttgagagtttatcccaaaccctctgtagaagccaatgccaatggaaatatcgttcagctactcagcaatcaggtttttcctcccc

SEQ ID NO: 16058 - DNA, 1343 bp, Oryza sativa
  ref <308>: DATABASE ACCESSION NUMBER: AK066565
  ref <309>: DATABASE ENTRY DATE: 2001-12-06
gaatttttaactcgtcttcgaatctatactttcagcattgtgctcaatactttgtttggattaagtgtgaagtactggatggctgttaccacgagattccttcttggtgctctgaatggattgcttgcaccaataaaggcttactctatcgaagtttgccgagctgaacatcaagctctgggcctatcaattgtgagcacagcatggggaataggtcttgtagttggtccagcaattggaggctacctcgcgcagcctgtcaaacaatatcctcatctttttcatgaaaagtcaatatttgggagatttccataccttctaccctgtctttgtatatcactttttgctctcttggtcctcataagctgtatatggctaccggagaccctacataagcataaaggccttgaaacaggagtggaggcagctgaagcttctactactcaaggaagtgcagaatcacataagaaaagtttattcagaaattggccattgatgtcatctatcatcacatattgtgtcttctcccttcacgacaccgcatatagcgagatattttctctgtggactgtaagtgatagaaaatatggtggactcagcttttcatctaaagatgttgggcaagttcttgcagtggcaggtgccagccttcttgtatatcaactttttatctaccgttgggttgataaaattcttggacctatcaactcaacccgcattgcgtcggtactatctataccgattattgctgcttatccctttatgacgcacttatcaggaataagacttggtgtggccctctatagtgcagcaatgatcaaaagtgttcttgctataactataattacgggcacttctcttctacaaaacaaagcagtgccacaagggcaacggggtgctgcaaacggaatagctacaacggccatgtccttgttcaaggctgttgcaccagctggcgcaggtgttctattctcttgggcacaaaagcgacagcatgcagcattttttccaggtgatcagatggtgtttcttttactgaacctgactgaagtcattggactcatgttgaccttcaaacctttcttggcggttcctcaacaatacaaatagaacattcagatactgtcagctggtgtggcaaacaccatagagagatagttgtagctagtactatgttttagtattaaaacatggtttagatatggttgtagcagagtgttagaaacatgcaccattccaggtgcagagcctctgttaggttgttcttctttttgttctgctttgggtctgtgagataaataatcttgcaaaagctatgacattttttattgcagctttggagt

SEQ ID NO: 16059 - DNA, 3520 bp, Oryza sativa
  ref <308>: DATABASE ACCESSION NUMBER: AK066566
  ref <309>: DATABASE ENTRY DATE: 2001-12-06
gatctcttcttcctcccttcccctcgggccaagggccatctcacccccaccaccgcgatggcctccttcccctcccctccgctcgccgcggcggcggccgcagcgccgccccgcctcgccccgggcctccccctggccgccgccgccgtgcgcaggccctcctccctcgcgcgccggtcctccatcgccctcgccgccccggccaaccccctccgctgcatccaccgccgcgccgtgtcgcccaggttgaggaggcggacggaagctgtcggcgcggcctcggcggcgattgggagcctcggcgaggagagggaagggtgcctctcgtgcttccccaggggccggaggcgggggaggccggggctcgcgaggttcgcgccgtgcgcgctcccgcacacctatgggctatcgtcgctccacagcgggttgactggcgctaagatcaggcgtcgccatgtattacatgctgctggacctgatgaaccacatgttgcaagtccatttggtgctatggcaagcctttttgcaccaaagctacctggtggcttggctgcaagcctaactggtgaaagatcacctgctgcggataaaataaagcctgtgaaaagggaaagacaggcaattaggccacctgtagaacataagtggtctcttcctggagttgcccaggatgccaagcctccagcaatttttcaacatgaattgatccagagtttctcaatcaacatgttctgtaagatacctgttaaccaagttcagacatataaagacctgcgaagtgtcctgatgaagcggatatttttatctgctctgcattttcgaatcaatacaagatataagagctcaaatcctccttttacatccgtcgagctggatcatagtgactctggaagggaaggttgcactgtcactactcttacagtaacagctgaaccccagaattggaggagtgccatcaaagttgccgttcatgaggttaggagactcaaagagtttggtgtcacaatgggggaaatgacccgctacatggatgcactgataaaagatagcgagcaactggctatgatgattgatagtgttccctcagttgacaacttggacttcattatggagagtgatgcacttcgccatactgttatggatcaattgcaggggcatgaaagtttgcttgctgttgctgaaaccgtcacccttgaggaggtcaacactgttggtgcagaagttctggaatttatttcagattatggaaagcctgatgcaccgcttcctgctgctattgtggcctgtgtacccaaaaaggtccacatggatggagtaggtgaaactgattttgagatacatccggaagaaataactgattccatcaaggcgggtcttgaggaacctatttacccagagcctgagctcgaggtgccaaaagaactgattactcggtctgagcttgaggacttgaaattgcaacgcaaaccatcatttgcttctctgagtaaagaggagaatgttgtgaaaatatttgacgatgaaactggtatagcacagcgccgcctttctaatggaatttccatcaattataagatcacacaaaatgaggcaagggttggtgttatgcgactgatagtaggtggtgggagggcaacagaagattctgaatctaagggatctgttattgttggtgttcgtactttgagtgaaggtggctgtgttggcaacttttcaagggaacaggttgaacttttctgtgtgaataatctcataaactgctcattagaatccaatgaggagttcatttttatggagttcagatttgctttaagagacaatggcatgcgcgctgctttccaactcctccatatggtccttgagcataatgtgtggctagaagatgcatttgatagagcaactcagctatacctgtcttactatcgctccattcccaaaagtttggagcgctctacagcccacaagcttatgttagccatgttgaaccatgatgaaaggtttgtagagccatcaccacattcattgcagaaattgactctccaatcagtcaaagatgctgttatgaaccagtttgttggtgacaacatggaggtcagtattgttggtgatttcactgaagaagaggtcgaatcttgtgttcttgactatcttgggactgtgagtgctccaaaatcttcaaaaacacaggagcatattgagaagatttccttcctgccgtttccttcggacttgcattttcagcaagtatacataaaggatactgatgagagagcttgtgcctacattgctggccctgcacctaatcgctgggggtttgcaactgaagggaatgatctattcaatgtcatccggagttctagtggagatgctcaagtttctgaatcagcaaacacagatcttacggagaggaaacataatgacgttcgcagccattctctgttctttggcatcactttgagtttgttggctgaaattattaattctaggctattcacaacagttcgagattccatgggattaacctacgatgtttcttttgaactaaacctttttgacaaattggaccttggttggtatgtgattgcagtaacatcaaccccgagcaaggttcataaagctgttgatgcatgcaaaggtgttctcagaggattacatagtaacaaaattgttgaaagggagctggaccgggcaaagaggacgttattgatgaaacatgaggctgagacaaagacaaatgcctattggcttggtttactagcccatctgcagtcttcatctgtgcctagaaaggaaatatcctgcatcaaggaattgacgatgttgtatgaaagtgccacgattgaggacttgtatcttgcatatgagcacctaaaagttgatgaatcttctttgtttgcttgcattgggattgctggtgctgaatctggcgaagagacgactgatgatgagctcgatatgggcctgcatggcatgggtcctattggaggccgtggtctatcaacaatgaccagaccaaccacatgatttctgcaacttccgatgactgaacttttgtaaagggatcgaactagctcctcaagctaggagttgtatgatcctgttcgagacaaatgttgacagttgtgcgttggcacatactgttttagactcctcgtgcgttgagatcggatcaaatcgctatttcttgtgcattgcaaccgaaggcttggctgccacaattctttttgtgatattgcgttgattgatggcgaggtcctgaaaggtcaggcagcttcacatgtatagtaaagaactaaaaaggttcatcgttgttgtaactaggatacatcaggtcattgaaaaggtaggggccagtagaatctcagataaattgctgtgcgacggctatagcgtaggggtcttataacgcaataatgcaagcccacaagttgtaacattctagtattatttttctcgaaaatgtatatttgagctatttatatttattaggtttcacaattttgtgatgattctactatcc

SEQ ID NO: 16060 - DNA, 3605 bp, Oryza sativa
  ref <308>: DATABASE ACCESSION NUMBER: AK066567
  ref <309>: DATABASE ENTRY DATE: 2001-12-06
ggctttaacgctgcgtttacggaaaccacgagtttacgccttcaccgaccgttacgctgccgctttgcactttcccctccccgtcccccgccgcgccgcgtgtccgcgtcggtgtcgtggtcatccgccgccgccgccgccgccgctctcgcaatggcgaggccgttgccgaaccaggccgtggcacggacgtccgccacctccctccgtcacttccctgggcactcgaagccgtcgctgccgctgtccgcgccggctctccggaaagccgcggcggcgctcctgctcgcggcggccgtggcgctgccctgtgccgtgctgtaccgcgccgcggtgttggacgcggtccaaccggtgcaggtgggatgggatcgcgggccgtggtgggagcggggccagccgccccctgctgttgtggtccccgaggaggacggcgacgtcgatcccgctgcggccgacgatctggacagtgacgacctcaaacttgagcaagttctgcaggaggcctccatggataataagaccattatattgacaacactgaatgctgcatgggcttcttcaggctcggtcattgatctttttatcgacagttttcgccgtggtgttaggactagctcacttttgagacatcttgtgataataacatttgattggaaggcttacaaaaggtgtatgaagatccacgcatactgctttgctcttgcaaccgagaatatggatttttctcaagagaagaggtttctgactgctggttatctggacatgatgtggaaaaggctggatttcttgcggctagttcttgaaaaaggttacagcttcattttctcggatgcagacatcacgtggttccgcaatccttttcctcatttctatcctgatggagattttcagattgcatgtgatcactatgtaggcaatgcaactgatttggggaacatagcaaacgggggatttaactatgtgaggtcaaacaatcaaagtatagaattctacaagttttggtattcttcgcgactgagatatcctggctatcatgatcaggatgtatttaattttataaagcatgatccttacattacagatattggactgaaaattaagttcctaagcactacatactttggtggcatttgtgaacccagcagagatttaaacaaggtttgcactatgcatgcaaactgttgcattggattacagagcaaacttcatgatctaagagtcataatggaagactggaggaattatatgtctatgccaccaagcttaaaaagatttggggcattgtcatggggggtaccacaaaattgcagtctttcattgcttaaccagtgagacatgcttttgggggtgcaaactgtataaaactgtagaaaatgtcaatttctgagcataattgtcagaaagagaaaaatactttgaagggaaaaaggggctactacatcatcaactttgccaactttgatgccttcagttaggcctgctcatggattggatcctaatggatttaatggattggatttcagtgtgggttggctttggatgggttgaaatggattgatgcagctaatgggctggggtgggttggatggagatgtaaaacggtttggattggattggttttggttaggaaagtttgggtagaaagtggattcagcccatgggcttccactggattgtccccaaatcacattcgtcttcctatgacattgacagccacggcaccaccaccacttcgcttgacgccgccggtggcttgccaccttcctctctgcctcccacacccttctgtgtcactactcgttgcaaccgctggcaggagcatggcggcgagatcaccaccggctcatcatcatcatcctgccgccgccgccggcgacctctgcccagcatgtgggccagctgctctgactcgctgttcgtgctcggtgcggcaccgctgctggaggggtgcgttggcatgggtttcaacctcaaccttggcctgcctggtctgggccaccatgtcaccagcggcgctgcagacgaggtggctggtagctgtcggcctccatggccttagccccagatggggcagcggatcattggcactaacgatgacgacgtcgtcacctctgctctgtggagacagcagcaaaaatgtggagacatggaagctggcggccggaggtaggggcggaggcaggcctagggcggcctgcctccaaaaacttgcttaaattttgttgattcaccatgtaattttttcataaaactaatactccattagtcgagccctaccttaggcctagtcttgtataatttctggctccgccactggccggaggaggtgctcccatgtggccggagttctctgtggcggcgccggtggtcggctgggcgctgcaaccacagcttctgtgatactaaagtttctgtgatactaaagtggatatatgcatccatgcatggaacatgtgtatattggtagtatacacgcatgtatatgcgcatgcatgtatatgtgtgtacgtgcgtgaagagagttgaaccaaggattggacactgcggtttcagtccatggatttagaattggttgaacccacttaactagaatgggttggactcgtttggttcaaaactttttatgggttggattggtttggggcttgaagaaggagaagtggtctgggttgaattggaaggatgcttgttacagaagtgggttggggcagtaatggattggatttccacccattagcacccctaccttcagtaatattgtgtatctttcggaacataacattgggaaaggtgcaggctgctttctggtatccctttgattattcatagttcttatctcctttttgttttagttctaacatgtttgttgatctggaactgcagccatgcaaatatgcgattttaaattgcataaactggtagaagtttcatctgcgcgaaaagcactgcaagaaacacagctgcatgaccatggcaagaatacttggcatctgaacattggtacgtatcccagctgttgcaagtttgcaaaaacacagtacagcataatgtttaggtgcccgtttttctctcattttagcagactgaaattatttgttaatagatacggggggattcccccaatgctctaatgcttggttgcctgaacctgtccatctatagggccagtctccttctcctcgtctctcttatctacctttcttctctcattctgtcattcacattactaaaaggtgcgatgagccgtcttatttgttggttggcgttgtacacttgtgcatgcctttgtctaaagtctctccctgtccttttggaacggtttcgctaaaaaaacttccaacagttttattttggggcaacttctgatttcctggccatctgatgtgcacggagattcgtgaaggcgcgctgtgggtccggtggatcgaactcagggtccctgcttcgcaccaagcactccttaacagctgagatatgcatgcttttcattagttacatgtattacactgtaactttagtatagttgcaatgtaattacactaaaattgtactatacttacatttgaaaaattttacgcaataaacttgcgacagatttttag

SEQ ID NO: 16061 - DNA, 1978 bp, Oryza sativa
  ref <308>: DATABASE ACCESSION NUMBER: AK066568
  ref <309>: DATABASE ENTRY DATE: 2001-12-06
gatcgagccccccgccgccgcgctgcgcgctaaccaggcccccaccgccgtgccgcccaatgccccatccagccccacgtagccgcaccacgcccccatccaagccgaggccgccgcgggcacatccccatcgaggagcacctgccttcgtccccacctttgatggccgtctccatcctctgctccaggtggaacgctatacacgaagtcgtagctccgtttgtgacccccgcctactcctcctaggacgccactgtggctgaggcaagcgactccgctcggccatatctacatcagtgtgcttcgtaaacgagaggtcagtaaagcaactccatgtttccatctgtggctctacaactttccacaaagaaccatggtatgttcatagttgatatgcattagaattagagattttagtatcagggtaaattagttctctttggtcagaagtttcttggttggggggagaacatattttgaatttgttgaacctcttgcagtcccgtttgtgcttgatggtacagattattgtgaagatttatttgccaggagtcatctagatattctaatgccactgtgcagtctttgtacaaagcaaacgaatatagtgttgcaaactctattgaatcgacatgttgtccatccttccaaaagagtgttgtgtgctgccatttccagatttgacttgtatctctgaaattaatatctggagactgtataatatgctaatggaaaggggaccaggttacagaaagatggaggatggagcggctaaattctttacattctggttagaaattatattcttcttgcattaaattatattcttcttgctgaattgaaattcagttactttcttgcactgaacagttatgcacacatttctacttggttaattataggtgctatttgactaggccgctgtgatagaaaccagtaattgccacatggcttgagatcatcttgtaagggggtggcacatgcagatggtgcaacattgctgtatgcaggatctctggatttttgttttttccctttagttcttgtttttatgctcttgcttcaatctgtgctatcaaattgctttgtaaagaatacatttctgcactaagattcacaagcagttggttccatgacagtatcctatctcctgtatctgttttagataaccaattttgcctcttctaaactgtaatcaggggtagaccataaattaaagatcgagttaagactgaagattgctaacaccctaatcagaatggaggagttgttctgttaattaattgctgcttgcatcttcttctattggttgtgttttgcacatattgtgtggattgaaactctaattcagtttgctacggcgaataagatttcaaattttccttatgggagagaggataagattcagttttttttccaaaaatatattaatttcctgccaatgcaacacaagatgacaatcatttcttcaagtgcataatattttaatgttctttttgcagaaaatcattgtttaaactatttggatatcatgcctgaattagagaggctacagaacatcatggaagcaatacatggacctgatagcaccaagcactccgcatggtcaggatcagggtgagatgtagggctagcgacagagcttggatgcaaatgattgctctatcccaacaattggttggatctctgtcttgattgaaggcatataatgatcatgccaaaggactgggattgatttatgttgtcaatgcacacatttggttagtcagccactaagatgtgtctattacctttccagcagaggttgtaagaactaaggctcattctgcttctcttgagttatgtgtagctagcgactttgtagatccattcatgttgtgttcttgcctcgtgatgttctcattaataccggggaatcttcaacttatgttcacatgatatttttctatggttctaatttatttctgtgatgcttgcc

SEQ ID NO: 16062 - DNA, 2221 bp, Oryza sativa
  ref <308>: DATABASE ACCESSION NUMBER: AK066569
  ref <309>: DATABASE ENTRY DATE: 2001-12-06
gggatctcttcttataagtagagagggagacgcagcgtgtggcatccaaagctctctctctctctctctcatagctagctagagcatgcagctactagctagcaagcttaattagcagccacacattagagtcacaaagtgagagagaaggaggagcttcacaagctcgatcgagagagcaaactaagcaagcagccatggctgctcctcctctctcgtcgtggccatgggcaagcctcggctcgtacaagtatgtgttgtacggggcggtggtgtggaaggtggcggaggagtggaggcagcaaggggcggcgccggtggggtcgtggtggctccacctgctgctgctgttcgccgcccgcgggctcacctaccagttctggttctcctacggcaacatgctcttcttcacccgccgccgccgcgtcgtccccgactccgtcgacttccgccaggtcgacgccgaatgggactgggataactttctgctgctgcagacgctgataggggcaacgttggtggggagcccggcggtggcgcggcagcagctgctgctcccaagcctgaagcaagcgtgggacccacgcgggtgggccatcgcactgctgctgcatgtgttggtcgctgagccgctcttttactgggcccaccgggccctgcaccgggccccactcttcagccgctaccacgccgctcaccaccacgcctcggtcaccacacccttgacagctggatttgggacgccactggagagcctgctgctgacggtggtgataggggtcccactcgcaggggcctttctgatgggggtagggtccgtgggcctggtctatggacacgtccttttgtttgacttcttgaggtccatgggctacagtaacgtggaggtgatatcccctagggtcttccaggctgttcctcttctcagatacctcatctacacccctacgtacctgagcctgcaccacagggagaaggactcaaacttctgcctgttcatgcctatttttgatctcctggggggcaccctcaaccacaagtcatgggagctgcaaaaggaggtctacttaggcaagaacgatcaggcgccggacttcgtgttcctggcacacgtggtggacatcatggcgtcgatgcacgtgccgttcgtgctccggtcgtgcagctcgacgccgttcgccaaccacttcgtcctcctcccgttttggccggtcgccttcggcttcatgctgctcatgtggtgctgctccaagaccttcctcgtcagctcctaccgcctccgcggcaacctccaccagatgtggactgtcccccgatatgggtttcagtacttcataccggcggcgaagaaaggcatcaacgagcagatcgagctggccatcctgcgtgcagatcggatgggcgtcaaggtgctcagcctcgccgctctcaataagaacgaggcactgaatggaggtggcacgctgttcgtgaacaagcacccggagctgagggtgagggtggtgcacggcaacaccctgacggcggccgtgatcctcaacgagatccccagcaacgtcaaggacgtcttcctcaccggcgccacctccaagctcggcagagccatcgccctctacctctgcagaaaaaagatcagagtcctgatgttgacattgtcgtcggagaggtttctgaagattcagagggaagcaccggcagagttccagcagtacctcgtgcaggtcaccaagtaccagcctgcacaaaactgcaagacgtggctggtggggaagtggctgtcgccgagggagcagaggtgggcgccggcggggacacacttccaccagttcgtggtgccgccgatcatcgggttccggcgagactgcacctacggcaagctcgccgccatgaggctccccaaggacgtccagggcctcggctactgcgagtacacgatggaacgcggggtggtgcacgcgtgccacgccggcggcgtggtgcacttcctggaagggtgggagcaccacgaggtgggcgccatcgacgtcgaccggatcgacgtcgtctggaaggcggcgctcaagcacggcctcacgccggcgtgaccgccgccgccggaggccagcggcgaagccaacgagaacggccggcgatcttgtgggatttggtgtgctgtaagatagaagaaatgtacgagaaaaaaacgatttgccgtgggatttaaattaattaaaatttaatc

SEQ ID NO: 16063 - DNA, 1302 bp, Oryza sativa
  ref <308>: DATABASE ACCESSION NUMBER: AK066570
  ref <309>: DATABASE ENTRY DATE: 2001-12-06
ggctaacggtaaaacagcgatgaccatgcatcttctctccggccaacggctgctcctcccgatcccatgcggcgcctgctatcgctcgccgccatccccggcgatcaagccgtccccgcttggactacgcccattcaccaagtcatcgtcgtcgttgcccctgcatctgcatgcagtctcgcccgccaccgttgcaaccgacggctcctccacctccgcgcagccagatagttgggcagagttcgcgtcgcgggtgtccggcgagtgggacggatttggcgcggagttcacggcggccggcgacgccgtcgagctaccggagaacgtggtccccgaggcctaccgcgactggggcgtgcaggtgttcgactggcaaacgcagtgccccactctcgccgacccggccgcgccgtgcgacctccactacaggctcgtccgcctgctccccactgtcggctgcgaggccgacgccgccaccgtccacacctcgcaccagcgccacgcctcctccgcctccgcgttcgcctactccgccgccgggtcgtacgtcgccgcctggcccaggggccccgcgccggtgctcgaggtggagcactgcgtcgtgcacccggacaaccgggaggtgagggtccgcctcgtgcagacagtggcgctcgccaaggaggcgcggctccgcggcgtcaaggtgttctccgagcagtggtacggcccctaccggaacggcgaccagctcggcggctgcgccctccgcgaggccgcgttcgccgccggggagaagctcgccgcctccgacgtgaccgggcagtggcagagcgacgccgcctccgccgcgaggttctccggcgagctggaccccgagacgggcaagttcgccgggttgacgcctgatgagcccggtgagagattgagccgagacgacggcgatggaatcgtgacgctgccgaagcagctgtggagctcgttcaaggagaatggcaaggacgagttcgtgtgcgaggtagggtgggtgctgggccatggcagcgccatcacgtcgaggtgtgttctctccagagatggagatgtcaaggagatagtcgtttcgcgcgagtcgcgtgtgtcggagggaacctgatcaggatatcaaaattgtcaggttcgatgatttttatgtagaatagaattatagccatacacaaatgtcttacacgcccgggtgtatactaatcaaattggcctcccgaaaggagtatacatgagtacatatactgacgctgttgtctgcatgatctagctaaaagtaatacagcacgccgctttccg

SEQ ID NO: 16064 - DNA, 3196 bp, Oryza sativa
  ref <308>: DATABASE ACCESSION NUMBER: AK066571
  ref <309>: DATABASE ENTRY DATE: 2001-12-06
gtttcttccccaactctaccgcatcagaactcctcctctcctctcgcacgacgaaccctaaaccccaaatcctctcatcccttctctcaaatcaggagcaaatcaaccaaaaatcggtagctttgaagtattagatgccaatggaagaggtgcagatggatttcggcgagtagagcaaggcaagcaacagcttggggcgacggctgcagcgggcggcatcaggttacggtgcttgcggcggcttggggcggcacctgcagcgggcggcgtcaggctacggcgcggctaccacgcttgcggtggctccgtcgagcggcgtcaagttgcggcgcgcggccgcggcacgtggctgcagcgggtgtcggcgtcgacggtaggctgcagcgtcagctgcttcaagcggcatggtggctactgtgggcagtagtagcaggaccaccatggaaaggtatataatctatacttatgcttgtgacctgcttgttctatctatcgtgtagggatgttactaacaatatatgtgtgtgttttgaggaattctttttgaatatttttaatccttgttcaactggttcaagagtccgaatttgctggtttgctatgcaaccttagcatgtgcatagctaaccatatcttgcttgcgtatcttcaggatataatcaagcattagcaatatctctttgtgtgaatatgttgtgcattgtaattaaacaacggcctctctaccttaggtgctgatttgaattaatagatagtgagtttaataaattaatcatcaaacaatggtagcatgaagtaatataagaaagtagccatatgtttacaaccttgttaaaagtagtttaagctggatatgtttagtactttacagtaaggtagatgtaagaatatttgtctctaacatgctttgtcaatgtaacaaccacacaaactaattttaaatgatgtctcaaattaatgtataggaagatactagtactattaaatggttgtataattaaaccccatgacttatagattatttaaataataaagttagccttataattaggtaaatcaaacatgaatacagatagatgagtctttaatttatttatgaggaataggtacagaattgttatgatagaaccacccaaataaggttgagtcggttagcatccaataattactcaaagagtaaaatcacttgtcaacccacttaaatcacatatactgtacaatccatttaaaatcatatgatatttctgttagataggtcttccatgcattagttattcagtccctgtatatttagatgtaggttttcatctattcctcgttgagctgctagaatatttctccattgttttgcttatcctgtaggaatgaccaaggcttcttgacagccattattaaggttgagtcttattttaccacatcgcttttgggtcaaaggacatatgttaagggaaacaatgtcaaaatttctatcgaaagggataggtattcgatgcttgcgctagttgacgatgtaggggaaaattttaactgggggccaaatcaatacatcggcttttggaaattgggtgatgtgtcaactcagagtaaagtagagataaccacagattcacaattgctagattggttggataagggtaatcagcacggggttgtcaatattcatgccattgtcaatgattttggtggtccattgcaagttgaaccttcaccaactaaaagaaggtgccacccatctgtgaggtattctattccatttactccaccactatttactgacctattggttgatgctacgccactaacactgcctgagagttacaaccatcttgagaactccatccaaccagtaccatccacccaaaatgagagcaccacccatccggagagcacttcacatcctgatgatgaagccacatcccctattaaaaagagtgcaaagaaggttgtaaaaaagtgtgcaaagaggaggagccaagacgatgacgatgatgaagaggtttgggatgatgagaaggaagagaacgaagaggaggagccccagctatgcccaaattgtgacccactagaggttgatagtgatagcagctatgatagtgatgcagcagcctcctctgactctgaatatgattgtgatgatcttgatgaccaaatacatgatgacgatgacaatgactctgaccttgagcatgtgtttgcatatgattttgataacccatgtattgatgaaggagaggtgttcgcagatactactacttgcaaggaagctgttacacaccatgctataatccatgactattcttttgaaactgagaaaaaggacaagcagagtgttgtcgaaatgacaactgcatacgtcgaaagacgtgggctaatcagcgatttattctatcaaatggctatggaaggattatggctatatatgcatctatctaaatagcacggttacataccagaggttctgttgttagatggatttgggatcaagcaattaatcgcagggaaccatttgtattattattttattgatggaggctttgctttaattatgaaaatattttacttgtcacaataaattagaaaaggttaataattatccatgctttgtatgttagaattgtttaggttaatcatattatggttacagattatcccttaatgaacaatcctaacttacagttgaactataattatatgaggtcaagatttataactagtattatccaccatacatgtttgtcatatactccttggtttaatatatgctaaaggtaggttattgttattaaagggggtggctatcaatctaggaaagtggatgagtttagagacaaggaattttatacaggttcaggccttcttatttaagaagtaataccctactcctgtccggggatgattccgccgagtgtattattgattgtataaactggaaaaaagatcccgccccaagaggcacacggacccctccttatataggggaagaggtccgctttacaaaatacagtccatatcctaacggaatatgggattacagataaaatacaatcgtaaccgagtaggatcccgggtatttccttgacacacaagtttataatctaacccgagttctcataaagatattctatctatattcagtaccctgtatccagctggaatataactgccatgtagatatggggtatccataatctccatc

SEQ ID NO: 16065 - DNA, 3811 bp, Oryza sativa
  ref <308>: DATABASE ACCESSION NUMBER: AK066572
  ref <309>: DATABASE ENTRY DATE: 2001-12-06
gtccaccttcgtcagatctgccattaccgaagccgagcaggcgaggcgaggcgaggcgagcggacgccatggagcccggcgtgagcatcgagtccgggtcggcgatccgcgtggcggtgctgccggtgggcgggccgatctcgccggcgcgcctccgcgactacgcggcgctggtggcgcggcacgcgcgcgtcgacctcgcctcgctgcggccctactactcggagcaccagaagagccccttcgcgcaccagccgtggggcggcggctgcctccgcctcaagttcgtgctcggcggctgcgtgccctcgccgtgggaggacttccagtcctcccgcaaggtgctcgccgtcgtcggcatctgccacctcccgtccttccccgatctcggccgcgtcgccgccgacttcgtcgacgccgcgcgctcctacccctccgcgctcgccagccgctgcttcgccttctgccccaccgacgcgcagctggtgcagaaaaagagggataatattattatgttccctccttctgatcaacaatcgttggaacttcatatgctcacgatgatccaagacctttctgcttcgctgttgatggagtttgagaaatgggtcttacgtgcagaatcaacgggaactattctaaagactcctttggattcacaatccagtcttggctcagaggaggtgattaaggctaaaaaaagaaggctgggtcgtgcgcaaaagataattggagattattgcttgttggctggatcacctgctgatgcgaatgcacattatgccactgcaatagagcttgcaagattaacaggagatgttttctggcatgctggagcccttgagggtagtgtctgtgcattagtggttgataggatggccgaaagtgaccctgttttggaggacgaagtgaagtttcgttattacaccattatccagctatacagaagagcaactttacaagacaatgctcaaagagtttcaccagtcagctttgagcttgaagctgcattgaagctggcaagatatttgtgcaggcggcaatgtgccaaggaggtgtcagatttactaatgggcgctgccgatggtgccaaggctctgattgatgccagtgatcgcttgatactctatattgaaatcgcgagactttttggtacacttggttataaacgcaaggcggcctttttttcaagacaagttgcgcaattgtatctccagcaggataatgcatatgctgctatgagtgctatgcaggtcctaaccacaactacaactgcataccatgttcaaagcaggaagaccagcaaaatggatcatggtttgctcaagtctgtagtatcactatttgagtcacaatggagtacccttcaaatggttgttctaagagagatactgatgtcttcaatccgggctgcggatcccttatcgtcgtggagtgctgcagcccggcttcttcggtcattttacccactcatcaccccagctggtcagagtggcttggcaagctctctttcaaactcagctgataagcttccatcgggcacacgttgtgccgatccatgtcttccttttatcaggttgcattctttcccactgcacccttcacaaagagagatagtgaagcgcaatccaaataaaaaagagtggtggactggtggtggtccttctggaccttttatttacacacctttcaccaaggggggaacatctggaactagcaaacaagaggtaaattggattgtgggagagccagttcaagttatggtagagttagcaaatccctgcagctttgacctaattgttgagagcatttatctctctgttcattctggaaattttgatgcctttccggttagtgttaatcttccaccaaacacttccaaattggttctgttatctggaattccaacacaagttggacaagtatcaattcctgggtgcattgttcattgcttcggtgttatcacagaacacctattcaaagaggtcgattgtctactccttggagctgcacaagggcttgttctttctgatcctttcagatgctgtggctctagcaagtttaagagcgttaactttccaagcatttctgttgttcctcctctgccattattagttgccaatgttgtgggcggagatggttctattcttctatatgaaggtgaaatccgtgatgttttgataacactgacaaatgctggaactgtacctgttgaagaagcaaatgttgcattgtcagggaagaaccaagattctgttatttcgattgcccatagcacatggaaatctgcacttcctattaaacctggtggagaagtgacattcgcagtgactctcagagcctggcatcttagcccgacagatttggaagcagatggcagcagatctcctgcaaactcaaggaggatagcaagagaagggagtaatcctttcttggatattcactatgctggtccttcagggaactctgagagcaatgatgtttctctcccacctggaagacgtctggttgttccgttgaatatttgtgttgtacagggcatgcgacttgtaagagcacgcctgttgtccatggaattacctgcccggtttactgatgctcacttaagatctgtcagtagcaaggacaatctaagcaatggcagtgatgcgattcgtaatgacattagcttattgaagattgatccttataaaggaagctgggacctccgtcttctggaacttgagctgtttaatcctactgatgttgttttcgatgttgatgtctcagttcatctcgatggcacaagtgtcgagcaaaaaattcttccagaggataaaacggccagttcggcttgccacaaaactcgaattgatcgtgactactctgctagagttctcatacctcttgagcacttcaaattacctgttcttgacacttccttctttgtgaaggaaaatggaagtgatgaacctcttggatcagagctgccacgttagcagaaaagaatgccaaggcggaactaaatgcttcaatcaacaacttgatttcaaagataaaagtgaagtggcattctgggagaaatagctccggtgagctgaatattaaagatgctattcagacagcattacaggcatctattatggacatactgttgcctgatccgctgacattcagctttagacatgccaaggatggaacaacagccaaaactgactcttcgaaggagcctggtgacggttccagtcgttctgctgatgagagtgttctgaggtgtaaggatcctatatttgctaatgaaatgacccatatggaagttcaaattcgcaataacactaaggaaactattcggatgaacctaagcatttcatgcaaagatgttgctggagagaattgcttcgacgaaaatagcgcaactgtcctctgggctggtgttcttagtgacatatatctggaggttcaaccactgcaggaggtagtacatcctttttctatctacttcctggtccccggagactactcgctgcaagctgcttctgttataattgacgcaaccgatgttcttcgtgctcgggcaaaggcagagtcgcccgacgaacctatactatgccgtggatctccattccatatccatgtagttggtacagcttagccggactttcttggatttagtctagagcgtgccctgtatcgtgcgtgagtttcgtgacatgtgcagctgcgaagatcatgtagaatttttatgcacatctgatttatttgagccgcatgaaggcttccctgtaacacagttgtgttttgtacagtgtaaaagcatagtgaaggttgtttc

SEQ ID NO: 16066 - DNA, 2879 bp, Oryza sativa
  ref <308>: DATABASE ACCESSION NUMBER: AK066573
  ref <309>: DATABASE ENTRY DATE: 2001-12-06
ggcgtgggccccacaccaaccacgtcagggcagccgcctcctcctccctcatcggtctcctctcccccgttcctcctctccacgactccacccctcccgactccgcctccgccgccgcttccgatccgcggcggcagccggagctcggagagagacaggccacccgccgcccccccctcctcgccttccctgtgcggcctcgttcgccggtgcgacgcgccatcccggtccgcatcgggctcaaaggcaaaggttactgatggatcatgatagatctagaaggcataaatcaaatacttccagaaaaaggccacatttcaattctgatgacggaaagaggaaacggctaaactcaaggcacgatgatggaaccatatcttctgagccaatagaaaccatttacaggatactgtgtccggttaaaaagattggcagtgtcttgggaagaggcggtgatattgttaaggcactaagagacacaactaaagcaaagataagggtcgctgattccattcctggtgcagatgagagagtaattattatctttaactactcaagtcagactgaagaagctgctcaaaatatttctactgatggatttgaggacatgaagcctcattgttttgcccaagatgccctgttgaagatacatgacaaaattgcagcagatgaagatctccatgctggaattgttcatgaaaagtctgaaaatgttgatgatgtaattgctcgaattttggttccaggaaatcaagttggctgtcttctaggaaaaggtggctccattatacaacagctacgaaatgacactggagcagggatccgtgtcttaccatctgaaaatcttcctcagtgtgcacttaaaagtgatgaattggtgcagatatctggatcttcttcccttgtaagaaaagctctctatgaaatatctactcgtctgcatcaacatcctcgtaaagacaatccacctctggaagaaattatagatgcaagcacacaaaggaagcatcaggctccaccacaattaccacatgcaaatccaatgttgccacacctgcatgtggatcactcaccacaaatacccttgcttgatccatatagaaacaggccactgcagtatcattctgctgaagctgaagagttctctattaaaattctgtgtgcttctgaacacattggtcaagttattgggaaaagtggtggcaatgttcggcaagtcgaacagcagacaggtgcttgcgttcaggttaaagaagttggcaaaaatgcttctgaagaaaggttaattgttgtttcatctcaggagattccagatgatccagtgtctccaacaattgaggcgcttattttgctccatagtaaagtaagtacacttgctgagaatcaccacttgacgacacggcttgttgtaccatcaaacaaagttggttgtattattggcgaaggtggaaaggtaattactgaaatgagaagacggactggggctgaaatccgagtctactcaaaagcagataaacctaagtacttgtcttttgatgaggagcttgtgcaggttgctgggcttccagctattgcaagaggagccctgacagagattgcttcgaggcttagaactaggacactcagagatggaagttcttccaataatccgacaccttttgccccttttgatggtcctcctgttgatatcttgcctaacagggaattcatgctatatggacgatctgccaatagtcccccatatggagggcctcctaatgatccaccatatggaagacctgccattgatccaccatatggaagacctgccattgatccaccatatggaagaccagccattgatccaccatatagaagacctgccaatgatacatcatatggagggttgaacaatgatgggcctcgtgatccttacactgcgtatcctgtagagtacttctctaaaagagagtaccctagtggaaatagcaaagttacaccatctgcttcatacgacagatatgcagcaactactcgcttgcctaatagagaactgccctcatctattagtcctggtgccgattatatgtcccgccgttcttatcttgaccaagtacctactgataggtactctagtaggggtacactacaattaggcctctcgagagctgggaatagtaatgtgcaacaattaggaatcaccagagctggaaattccaatgcttatgattataccgaggccgctgagcagatccatggacgtgaggattaccgaagactgtcaggtctcactgggtatccaggtggctccgtcgaatttcggattccaaatagttatctggaatctgtcattggagctggtggtgtcaatctagctgagatccgtcagatctctggcgcgagagtgaagttgcacgaagcccatcccggttcttccgagtccattgtggagatccagggcattccggatcaagtgaaagccgcacagagccttctgcaaggcttcatcggcgcaagcagcaacagcaggcaggcgccccagtcctctcgcatggcccattatttttagtaagctggaggacattcgcaacaggggggtcactgcacagctgagtttgttcttcagttcaactgcagaaaattgcggatcggttgccatagttgctagaacggtacatagatgccacctaactgtagtgagcggcataactttcatattgtgtttatcgactatctagttgattttagcggcaaaagctgtactgcccaatgttgtctctccttttgttcatggattcagacttgtgacttgattacttgtagtccttcatggatcagactggagtaaaaaaagaaagaagacatgggtttaacaggaagctcaaaacggtgacagtagc

SEQ ID NO: 16067 - DNA, 1699 bp, Oryza sativa
  ref <308>: DATABASE ACCESSION NUMBER: AK066574
  ref <309>: DATABASE ENTRY DATE: 2001-12-06
ggaaggcccaaagcccacaacagagaggagagtgggcgacggggggctagggcggcggcggcgcggcgaccagcgacgggcggcgcgcacctgaccggaatggcccacctcgcggcctctgccgccccgcttccaagcgctgaccccgacgccggcgaggagtcctcccactctccgccgccgccggagaaggggctgaggaaggtggtggtggtgatgggcgcgactggcgccggcaagtcgcggctggccgtcgacctcgcgagccacttcgccggcgtcgaggtggtcagcgccgactccatgcaagtctacggtgggctcgatgtcctcaccaacaaggtccccctccacgagcagaaaggcgttcctcaccatctcctgagcgtgattgatccctctgtggagttcacttgccgcgatttccgcgaccatgctgtgccgattatagaaggtatattggatcgtggcggcctccctgttattgttggtggtacaaacttctacatccaggctcttgttagcccattcctctttgatgatatggcacaggatattgagggtcttactttaaatgaccacctagatgagatagggcttgataatgatgatgaagccggtctgtatgaacatttgaagaagattgatcctgttgctgcacaaaggatacacccgaacaaccatcgaaaaataaaacgctaccttgagttgtatgaatccacaggtgccctacctagtgatcttttccaagggcaagccacagagaagtggggtcgacctagtaactccagatttgactgttgtttcttgtggttagatgctgatcttcatgttctggatcgttatgtcaatgaaagggtcgactgcatgattgatgatggcctgctagatgaagtgtgtaacatatatgatcgagaggccacttatacccaagggctgcggcaggccattggtgttcatgaatttgatgagtttttcagattttattttgcaaggaaggaaaccggtgagataaagatggattcctgtacaactatggcaggtctccatgatgataacctgaagggcttattggatgaagcagtctcacaactaaaagcaaacactcgcagacttgttcgacgtcaaagacgaaggctgcatcggttgaataaatattttgagtggaacttgcgtcatattgatgcaacagaagctttctatggtgccactgctgactcatggaacatgaaagttgtgaaaccttgcgtggatattgttagagatttcttgtctgatgatacaattttggcaagcagagatggttctagtgtaactggaagccctaggatgtcttcaagagagttgtggactcaatatgtttgtgaggcctgtgataaccgggtacttcggggaacgcatgagtgggagcaacacaagcaaggccgatgccaccgtaaaagagtacaacgtttgaaacagaaggctagtacagtgatatcattataggcaattagcactgtttgcactctcggtgttcatgaacctttcttcattctctgcaactgtccccatgcatcctgtttgtcaaattggctgaagactacaccattcagaaggtagcaagcagcagatatatttgttaatagtaccttgctagattcttgtgccagttccaaacatccaatgcagagaatacaaactctacagattggtcagc

SEQ ID NO: 16068 - DNA, 2089 bp, Oryza sativa
  ref <308>: DATABASE ACCESSION NUMBER: AK066575
  ref <309>: DATABASE ENTRY DATE: 2001-12-06
tgggtggagagggtgccggcgtggagggagcaggtgacggtgcgggggatcgtggtgagcgcggtgctgggcgtgctgttctgcctcatcacgcacaagctgaacctcacggtgggggtgatcccgtcgctcaacgtctctgcggggctgctcgggtacttcctggtgcggtcgtggacggcggtgctcgggaggctagggttcgtcatcgcgcccttcaccaagcaggagaacaccgtcatccagacctgcgtcgtcgcctgctacggcctcgccttcagcgggggttttgggtcatatatgcttgcaatggatcagaaaacatacgaacttattgggccagattatcctggtaacagggcgatcgatgttatgaatccttcattgggttggatgatcgggttcatgtttgttgttagcttccttggactatttagtcttgttgcactgcgcaaggtaatggtgattgattacaagttgacctatcccagtggaactgcgacagctatgttgataaatagcttccacactaccagtggagcagagcttgcagaaaagcaagttagctgtctcggaaagtatttgagcattagttttttctggaactgcttcaagtggttcttcagcggcgttggggattcttgtggttttgacaatttcccatctctgggacttgcagcatttaagaacacgttttattttgatttcagtccaacctatattggatgtggtcttatatgcccacatattgttaactgctctacacttcttggagcaatcatatcttggggtttcctctggccatatatatctacaaaagctggggactggtatccagctaacctaggaagcaatgatttcaaagggctatacggatacaaggtttttatatctgtatctgtgatacttggtgatggtctttataacctcatcaagatcatctatgctactatcaaggaagtaatgaatgcacggtcgaagcaaggaagacttccccttgtgcgggttcatgatgatgatgaaggctctaaattatcagctgaagaaaagcttcggaatgacacgtttctaaaagacagaattccatcatggttagcaggatcaggttatgttggccttgcagcaatctcaacagcaactgtgccaatgatcttcccgcaggtcaagtggtaccttgtcctgtgtgcctatgttgtagctcccctgctcgccttctgcaactcatacggctgtggcctcacagactggaaccttgcgtccacgtatggaaagattggcctttttatttttgcctccttggttggccgaagcggtggcgtgattgctggcctagcagcttgcggtgttatgatgtccatcgtatccaccgctgccgatctcatgcaggacttcaggactggttacctgaccctctcttcaccaaggtccatgtttgtgtcacagttgattgggaccacccttggctgcatcatcgcccctctgaccttttggctctactggactgctttcgatatcggcaatcctgatggcatgttcaaggctccatatgccgtcatctaccgtgagatgtcaatcctgggtgtcgaaggattctcagcgctgccccaacattgcctggcgatctgctcggtcttctttgtcgcagctattttgttcaacctcctgcgggacgtcactccgaagagcgtctccaagttcatcccgctcccgatggctatggctgtcccattctacattggggcgtactttgcgatcgacatgttcgttgggacggttatcctgtttgtctgggagagggtgaaccgcaaggaatctgaggactttgcaggcgcgattgcatctggtttgatctgcggtgatgggatctggagtgttccatctgcgatattgtccatcatgaggattgacccaccaatgtgcatgtacttcaagccatcccttaccagctgaaaatagcgcaaaatccgttgtttatttggatgccaaaatagaaaagaattttcacatgtatatatttctctctgttgtaaattagactgcgcaaaagtgcagtaactttgttctttctgttaatatatttctctgtttt

SEQ ID NO: 16069 - DNA, 1284 bp, Oryza sativa
  ref <308>: DATABASE ACCESSION NUMBER: AK066576
  ref <309>: DATABASE ENTRY DATE: 2001-12-06
tggaccaccaccactgctatcgtcgctaccgcctccctacgtcactccgtcctcgacgccgcacgatcttcgcgactcgtaacggaataccagcggatcatacccacacccccttcaaatcacagcacagtcgcccttagcccatcatggttttcagaggcctttgcgtcggactcggcgagttcctcacgtttgccgcggtcatcctcatggtctttgccaacattggccaattgaccaacaacattgtgacgcgcaacatccgctacgtctcggtggacgcttcgaacctcggcaacgcgctcgcgtcgaccaacacggccaccaacgacctgtacgccgcgaacccggcggctcccgtggcgcagggcaacggcatcaggcagagctaccagtggggtctgtacaactactgtgccggccagccctcgggtgactcgcgtgcgtgcagcgacaagagctttggcttcgagtggcagcccgtggatgcgctgctcaacgatgcgccccaggacgcacgcaacggcatccagaacttcctgcccgaggcgacgttccgcgactcgaaatacctcggcgactactcgaagccggccatgtacctgatctttatcggctcgtgcctcgcgctgctctcgtggatctcgggtctgctgtcgcatcgctttgccttcctcggcgccgcgttcatcgcgctgcttgcggctctgacgctcggtgtgggcgctgcactgctcaccgccatctacaccaaggcgcgcgactcggtgggtgtgcagtacggcgtggtggtgcactacggcaatgcgctctggatgacgtggggcgcgtttgtggcgtgcgtgctcgccatcgtgccctacatcctctcgtgctgcacgggcaggagcgacgactactaagctgctcatgtcgacgcgatcgttgcggccaaggtctctcgagctcctaccactgggctttgattgaggactaggtttgggcgatccatgcccccggaaacctttgcgtggctggtcgtgcggcgtacgatcgtgcacacttttttttcttccacctttggatgtagccctatgttctttggcgttgtggctctttgacgattcggctctgctcttgcagagatggcccgcgagatataccccgcggtctcttttttttttgcctccctaaactcccccttttgacgttggtacgatggattggcagccacttcccattgtttattcctttgatgtccgtctgctacgtatctctttttcttaacgccgcgatttaatcacg

SEQ ID NO: 16070 - DNA, 1696 bp, Oryza sativa
  ref <308>: DATABASE ACCESSION NUMBER: AK066577
  ref <309>: DATABASE ENTRY DATE: 2001-12-06
gactcctcgctccgtgcgcattctctgtcctcctcgcttcgcccgaatcccggctgtcgccacagtccacagctggaccagcgccgccgctgccgtgtcttcactgccgctggaccagcgcactcactgtcgtgcctcctcgcgactccccgccacacgccaccacatcgtgcccctgccgctgccgtggtagttccccattcttccggagccccgtccaggactgcctctgccggcaccgtggtggttcccctttccgtcagagccccgcccgggactgctcccgacgttgccggttgttctcccttctgccggaggtgctgtgcacgccacgctggtatgcaactctcctccccgaaggtgccgaatttgtccaacgtttcgttcgacctacgccgagttcgaccatccagcttccttgcgccttcttctcttctgtgccagcacacctgattcggctcaaattggctgagatggcaacgtggttccgatggtcttcacctctttgcgtacgatggagtgccggctgaggacaagttcaacggcggttccagtgatggcgacgacttgccccctgctccaacaatgggaatatcagtcgtaggttttcatcggtggcgtgtgcggaagaaggaacactgagagggagtagcaggatatgttcgcataccggccacgtagtgtggtatggtaggcttaaagctaacggccgagcggttgtccaaggacgatccacatgcttcttcctttgaactgaccgttggaatgccaggaatcttaacggcgacattgaggatgcgcttgtcgcattagtaatcgtaaccttcctctcaaatttcaccgcatatttgttgcatgcagaaaagcacaaacctcagtgatcaaagctaacttgacccttactggaacgaggaactcaaagctctctgttcctcaacagtatggtcgtcgcatgttggtaataaactcacaggatgtaaaatcatcaaaaatttgtaatgtgtttctgttgcgtttgtccaaatcttactttctttgcatccagcaagtgttcgatgggtgacaattttcgtagctagaaacgacaacagttgatgactgccaatgctttacccactttaggcgtactccaaaaaagtaacatttggtgttgaagaatgtggttgccgttatgttgcttgagtgttttgaagttggataattaagctcctaaatgttttttacactattgtctttattatactgaattaaaaacttaaaatgttcttgaataggacatgcacggattggggatttctattcatggagtaacaatatctttattgtacttttgtgtgggcacaggggagtgtggagttgctgtcgtggcattcttcaaatccaaccctccatggaatcaaactcctcacctgctagccacagctcaaaagctggtgcgttggttttctcccatgtagaaaatacagaattttcttattacatttcattgtttgttgacgaccgacatttccattgttgccgagaacaacatctacggtttgcatgtgtactcgcaattcctccttgaaaatgtcttgatcagaagtccggtgtgcatactttcttgtggtatactggtcttaggaatttgattagagttttggtgtatgaaagtaaaagtgacatgaaggtttatgcatgaatatataatttggcc

SEQ ID NO: 16071 - DNA, 2260 bp, Oryza sativa
  ref <308>: DATABASE ACCESSION NUMBER: AK066578
  ref <309>: DATABASE ENTRY DATE: 2001-12-06
gtccgagaatgctcgtgagcagcgcctgcgcctggcatggacgtgccgctggtgccagtgccaacgacggcggccgacgacgacgcggcggcggggtcgccgtcgccgtcgccggagatggagatggaagaagacggcggcggcggcaaggtggtgtacgtggcggtcagcggcaacaggaacaaggcgctgccgacgctgcggtgggcgctgcgtcgccacgccccggcgccggaggggaggaagaagaccgcgctgctggtgctcgtgtatgtgcaccggccagccaccatgatcccaatcttcacaggagcaaaggtgccttcaattgttctcaaggatgaaatagtcacttcttaccggcagcaagagaggaggattactgaaaaatttctccaacaatacctggacatctgcacatctgaaaaggttcaagctgaggcattcatgattgcgaatgacaacattgcgcatggcctcataggggcaattcaagagcataagatcagcacactcatcatgggagctggcatatatgggaaaacaagcacccaaaggacaaagctagcaatcaccatggagaaggaagctgatccatcttgtaagattttgtttgtccacaagggaaatctattctccatcaggcccaggactacaagcatccccatctctgtgaatagtggtgttcctactatggcaggttctcacataccttggttcagcttcattcctccttggcaccatgatgaccgcagcagcgtcacatcttcttccttcctcaccgactcgcaaaccatgaccgacaatgggcttgatccagaaaatctagaccaccaattcttcgaaaatgcgatgcccatgttcgattatgacagcttcagccttatcagacatgaatccctccatggcctaaatgagatagctagccagatcatactgtctggccattcacagtacttgcgccagttgaatttcgatgtaagctgcaatgaggaagtaagaaaccgccagttcattcacggtatcgactcgatcctcggagtcgattcgatgaaccttgaggaggtgtactggaaggcctacatggaggacaagacaatcaagtggatttatctactggagtacatccataagattgtatcagtctcactgaagcaaatccaggagcagcatgatggtgcctctagtggcctgacacttgaaggcctctcagatgctgcaaccaagcctatcaatcgattgctcacatttgcgtcgacggtcagtaaggtgaatggttcgccggagaagctcttccatacgttgcagatgcacaaggcattgtcaggagcttctccgatgatccaacaagccctcttgggagaacagaaagagttctttcgtcagagagcttcacagaattcttgacacgctggaggactctgcaagggaaatacttggtaagctgaaagtccagattcaatcacatgattcaccgatcataccaggaggcagtgtacacttggttacaacatacctcatgagatatatcacattgttggcacataacaccagctcactgaacaccattctaggtcatgatcatagtgaccatctgttggcagctgacggaatcaacttgctgttgccaagccacctaatttctggcttgatattcgatcttggctcgatgcttcagaagcagtctaagctgtacaaacctgaaggattgcagtacctgttccttatgaacaatgagcattttattcttcagcactttgagcgggaagacataaaacttatgataggaactgagtggattcaaaagtactgtcataacatcaaccgatacaaagtgaaatatatagaagcaacatgggctactgtggtatcttgtttggacaagaagatcagcatttcactaaattttctgcaaccttcacccttgaaagaatttatttcctctttcgaaacagagtatagactccagatgcactggaaggtccctgatccaaagctccgtattgagctgagacaaactgtctgtgactatgttctgccagcctattgtgaattcatggagaagcatccaaatttagagaaatcaggggacaatcttgaagatatcaggaacaaattaaatgaactgtttgaaggatgagttgatacttttatgattacaaaaacaaattcttacttgttctcttgttccttcaattcatgcaaggaaaattgtaacacatactaattcaatgattgttaaattaacttttcattatgc

SEQ ID NO: 16072 - DNA, 1816 bp, Oryza sativa
  ref <308>: DATABASE ACCESSION NUMBER: AK066579
  ref <309>: DATABASE ENTRY DATE: 2001-12-06
gtgagccgccacttccttccttccaaaaaggaagaggggaaaaaaaatctatagccaccaaattgagcaagattctcacacgaaaccaatcacaagctagcattcgtttaatttcttggctgctattgtccggggaagaggttcttggtgtccaaagaatttgtcggttctagggagctccaagttgctgtagcttcatttcttggttctttgggttcttggattggcggtactgattgtgggagatgttgtctgtgagctgcccgagagtgtacatgagcaggaaggcgctggatttcggtcagctggcctcctgccggtgccgttgggctggccggtccggcatgcgggtggcgccgaggcggcgcatgccatgtgtttgtttcgtggcctcaccgagccagccaggccttgctgcagttgatgtgccagcagaggcgatttctagtgcgagaacaacaacaatgatccctgagcgaatttctgtttcttcacttttggaggttgtctccgacgacctgctgaaactcaacaataatctgaaatcgcttgttggtgcagaaaatccagttttagtttctgcggcagaacaaattttcggtgctggtggaaaaaggttaagaccagcattagtttttctggtgtccagagcaactgctgaattagctggtttgttggagcttactacagagcatcaacgcctggcagagatcatagagatgattcacacagcaagtttaatacatgatgatgtcatagatgatagtggcatgaggagagggaaagaaactattcatcagctatatggaacacgggtggccgtacttgctggtgattttatgtttgcacaatcttcttggttcctagcgaacttagaaaacatcgaagttattaagctcatcagccaggtgatcaaggactttgccagtggtgagataaaacaagcatctactctttttgactgcgacgtcacccttgatgattacttgctcaagagctattataaaaccgcttcgttgctcgcctcaagcacaagatctgctgcaatattcagtggtgtaagcaccactatatgcgaacaaatgtatgaatacggcaggaatctcgggctctcgttccaggtagtagatgatattcttgactttacccaatcagctgagcaacttgggaaaccagcagggagtgacttagcaaagggaaacctgacagctccagtcatattcgctttgcaagatgaacccaaactaagggagataatcgattctgagttcagtgaaagtgattcattggctactgcaatcgacttggttcacagaagtggtggaataagaagggcgcaggagcttgcaaaggagaaaggtgacttggctctccaaaatttgcagtgccttcccaagagccagttcagaagtacccttgagaacgtggtgaaatataatcttcagaggattgactgatggattcacttgattcctctgaatcacttgatttctctgaatataagatgctcgcacccatgtgggttagtagctcccaaagaagttcatcttgctagaataatgtcgatcttgggaagatgattacaagcagcaactttttgttgtggatccaccaccaacatgtatcatagcatcctattttgcagtttatgtaactacaaggcagataaaggaactaaggaagcatagtgtatatttcatagtagtttcggcttcttgatacacgaaatagtatttttttcccctcccctttctgccatttcatttgtcattggagaacgactatgaattaattaacatgattatactttatagcc

SEQ ID NO: 16073 - DNA, 1364 bp, Oryza sativa
  ref <308>: DATABASE ACCESSION NUMBER: AK066580
  ref <309>: DATABASE ENTRY DATE: 2001-12-06
ggaggcttaggcctagccattcccatgaccaacgcccagccccagccgcagccgcgccaccaccaccagcctcgtcaattctgagggcgccgccaacaccaacaccaccaccatcgggtcctcctccccttgcggattggttgcctgaccctcctcctcctcctcctcctcgtgtagattgattggttcttggtggtggtggtggtggatcgggtggctttggctgagatggtggtggtgacggcggcggcgccgcctctcggcatagcgttggtggggccgacgcgggcgaggcgtggaggagggttgtcgctctcctcctcctcctgctgctacctgtccatgtgcggccgtggcgtcctgcgagggggatgcgcgaggatgagggagccgctgccgccggccccgattgggctggaccggtttctctgcggatacatgcgaagagatgggcatgaagatggtgaaaggagtcaaggaatagaggattctcttatgtttgggccagacgatgataatggttcaaatattcctactcaagttgagacacttgttaggggtactgcgacggttgctactccagagtataagtcgattccagatctagattacctgcaggagttgctggctattcagcaacagggaccgcgggctataggtttttttggtacccgtaacatggggtttatgcatcaacagcttattgagatcctgagctatgctatggtcataacgaaaaatcatatattcacatctggtgcttctgggactaatgcagctgttatccggggtgctttaagggctgaaaagccagagttgctcactgtaattttacctcaaagtctaaagaagcaacctcctgaaagtcaagagcttttatctaaagtacaaaacttaattgagaagcctcaatatgaccatttgccactaattgaagcgagcaggttatgcaacatggacatcatctcgaaggtccaacaggtgatttgttttgcattccatgacagcaagctgctgatggagacctgccaggaggccaagaatttccggaagatcgtaaccctattctacttggattagctcctcaggggcttcgcccccatttttgtctgtaggctggttggtgatagaatatttggttcagttagctgtgttcactctgaaactcaggaatgacacagccgaataggtgcaaccttcaaatcggggaagatcctttcgaccattgttttgaattttgtataaaccaaataagcttgtcgatatgtctggttcatcattgaatggaataatttaaagttcttactatttctgacctgtggcctggctactttttatttgagagggtttagctattattttgc

SEQ ID NO: 16074 - DNA, 1682 bp, Oryza sativa
  ref <308>: DATABASE ACCESSION NUMBER: AK066581
  ref <309>: DATABASE ENTRY DATE: 2001-12-06
gaaacgacccaaaaatggacgccgccgtcgtcgccatcgccggcgacggggacgccgacgccggccaccgccgtcctctcctcgcctccgccgacgacgacgacgagatccgcccctaccccgcatcatccccttcgccgcagcacccggcgggggctgagcggaagccgcggcgggtcgcctcgctcgacgtgttccgcggcctcaccgtcgccatgatgatactggtggacgacgccggcggggcgtggccggggatgaaccactcgccgtggctcggggtgacggtggccgacttcgtcatgcccgccttcctcttcatcatcggcgtctccgccgccctcgtcttcaagaaaacaccaaacaaaacagtggcaactaagaaggctgcaatcagggccatcaaacttttcatcttgggtgtaattttgcaaggaggatatattcatggcagacacaatttaacttatggcattgatttggatcatattcgatggctaggtgtgctgcagaggatagctattggatactttctagcggcaatttcagagatttggcttgtcaacaatatttcagtggattcagctatatcatttgtgaagaaatacttcatggagtggatcgtggccgtaatgatttcagcactttatgttggcttgctactcggcctttatgtttcaaattgggaatttaaagttcaaactagcaattcaatccttacaattccaactccgggcaacgaaattggaatgaaaatgatccagtgtggagttagaggtagtcttgggccaccttgcaatgcagttggatttgtagatcgagttttacttggtgaaaatcacctgtacaagaacccagtctataaaaggactaaggaatgcagtgttaactctcctgattatggaccacttcctccaaatgcaccagactggtgcctggctccatttgatcccgagggtttgctaagtacattgatggctgcagtgacttgctttgttggattgcattttggacatgttttggttcattgcaaggatcattcacctcgaatgctattatggctactagcttccactgtgttaacagtctcaggatttctacttcagttattaggcatgcctttcagcaagcctttgtacacggtgagctacatgctactaaccggtggggtatctggattcctgctgttgttgctatactacattgttgatgtcatcaatatcaagaagccgttcatcctattccagtggatgggcatgaacgcgcttatagtgtatgttcttgctgcttgtgagatcttccctacacttgtgcaagggttctattggagatcacctgaaaacaacctggtggatttgactgaatctctgcttcagacaatcttccactccaaacgctggggaaccttggcgttcgtcgtcttggagatcatcttctggtgcctggctgcttgtttcctccacatgaaaggcatatacttgaaactgtagctgtagagccattcatttccctgcaaaaacacattttctgcagaaaatgttcttttttggcccaagcaagggccttccttgtaaatcttctgaaacaattctctgtaaatgcacttcctccatttgtacactgcaactgaattgatcgccctgatgtatcattttgtaaattcaatgcgtggatttaattgt

SEQ ID NO: 16075 - DNA, 1315 bp, Oryza sativa
  ref <308>: DATABASE ACCESSION NUMBER: AK066582
  ref <309>: DATABASE ENTRY DATE: 2001-12-06
ttgggtgctatcaaaaaaaaaaagcagcagcaggacaggggagcggagatcgaattgggagttggggaggattggattagattagattggattggggaagaagaagaggaattgagatgtgcaagtccagatccgacgcagtgcccgtctcctccgttgcttcccgatcccgccgctcctcggccaccacctcttcctcctcctcctcttcccggcggccgggcccggcctcttcgtcgatctccggtagcacagccagcgccgcgtcttccagttcaagctcccttgccgccgcccgcgcctccctcccggatccgcccgtgctctacccgttccaggaggtcgccggcgccaccaacaacttcctcgccaagcgcgccccggcctccacctactggccctgcaccctgcgcggccgccacgccgccctcttccagctccgccgcgcaccacctccacgcgacaccgtgaccggcaagctactcgccgccaccgccaggtaccaccataccagcctcgcccccctgctgggcggctgcgtcgcgggagcccacctgtacatcgcctacgagttacccccgggcgccgccacgctgagcgcctgcctccgcagccctcgcaacaccagcttcaccgccctccgcacctggctctcccgcgtccaggtagccgccgacgtcgcccaaggcctcgactacatccaccaccatgccgccgccgtgcacggccgcgtctcctcctccaccgtgctcgtctccgaccccggcctccgcgcgcggctcacgcacatgggcgcggcgcagttggcggaattggaagatgaggaggagccgtcgcgggaggcagacgtgcgcgccttcgggctgctgctgctggagctgctgtccggagagcaggcgaccacgtaccgggtccgggaggcggtggttgagacggcggcggcggcgcgggccaacgggcgggtgaggagctgggtggacaggaggctgggcgactcgttcccgcaggcggtggcggagaggctgctggatgtggggctgcggtgcgcctccgcctcgccaccgccggagatgacgtgggtcgccggaaagatatccaaggcctacctcgactcacgggcttgggaccactcgcttcagcgcccgcaggcccacctctcgtctgtctcgctcgccccgcgctgaggcccagctgcttcttctcttctcatgtttccaaggcccaactcaatatttgggccttctttcgtttcggtactaattccgcccgccaaactactcttcttctttcctctaattcattcatgattcctatc

SEQ ID NO: 16076 - DNA, 3000 bp, Oryza sativa
  ref <308>: DATABASE ACCESSION NUMBER: AK066583
  ref <309>: DATABASE ENTRY DATE: 2001-12-06
gaggcagagacagcgtcgtctcctcttcctcttcgtcttcctgccgccgccgaggagccgagcaaaatccaataatccatcatcggagacgagcaggagcacgcgcatcaatcatcgtagagtgactcatcggaggaggcgtgaattccacctatccttttcttttccccccttgtattctcttattattgaaatcccaaccccataatccgaccgtacccacccgccccccatcgccggcggcgcccagatcgccaccgatcgcctccaccaggggcgcggcgcctcttccgccctctctcagcggcggttgctccacgtctccggattccggaagaggagggagggagggagggagggagggagggaggaggcaactcggggcgttggaccgggctcccacggcgacgcccatggtcgacaaccagggctgctcgccggcgctcgagcccgtgcccacgccgcccaaccccgacccctcatccatctcgccggaggcctgggatcccctcgaggccgccgccggagccgtcgtcgcccggatccagcccaacccgccctccgaggaccgccgcgccgccgtcatagcctacgtccagcacctcctcaggtgcaccgttggctgccaggtctttccatttggatctgttccgttgaaaacttatcttcctgatggagatattgatttgactgcctttggccattcaagtgatgaaattttagcaaaacaagtacaggctgttttagaatcagaagaggcaaggaaagacgctgaatttgaagtcaaggatgtccaatatattcatgcagaggtcaagttggtgaaatgcattgttcaaaacatcattgtagacatctcattcaatcagtttggtggactgtgtaccctttgttttctcgagaaggttgatcaaaaatttgaaaaataccaccttttcaagagaagtataatgctgataaaagcttggtgttattatgaaagccgcattcttggtgctcaccatggattaatttctacctatgcattggagatattggtgttatatattttccatctcttccatggaacattggatggtccactagctgttctctataggtttctggactactatagcaaatttgactgggacaataagggtataagcttgtatggccctatttccttgtcttccctgcctgagctagttactgactctccagacactgttaatgatgattttactatgcgagaggactttctcaaggaatgtgcgcagtggtttactgtacttcctagaaactctgagaaaaatactcaggtctttccccgaaaatttttcaacatagtggatccattgaagcagagtaacaatctagggcgcagtgtcagcaaaggtaacttcctccggatacgcagtgcatttgattttggtgcccggaagcttgggaagattattcaagtgcctgacaattttactatggatgaagtgaatcaattcttcaggaacacattgaagagacactgcagtagggtaaggccagatgtgcaagaaatagctctggacttcaatggtgaaagagccgacaacgatagttcgcctttatacagtaataattcctttggtgatctatctgatgagttcaataacatcagcatttcagattccagcaaccatgggtcactaaggcaaaatggatggaattatgtggctgagaacaaggaaaggaagtctgtttctggtggcttgctggcaagcaaagcaacaaatcctgcagctactaattcaactggtatgacgaatggcagtgactcttgtgagcccgcatcaccatcaattaccggagcacatagcttgccatctgaggaaggtcatgacgcactggatctctttaatgagtcagaaagtggtacgaaagctggcataaagtatggcacaaacccatcacaccatggaatgtcaacagtgagttatgcaggcagatcccaccagtcctttgaagaggtggataatgatgatagaggtaccatcgatagcaattggtcagatctcactggagactacacaacaaattttaataatcttctctatgctcaagggttccaccaagattatccaatgaaccaatattatccatttggtccagtgtactatccaataccctcccctccacctgcacgatatcagaataggcgatcatcaaatggtcatagcagaaataatgtgtatggatatgctggtacaaatggaataggccctgctccttgtccaccaggttatttaattatgaggccatatagtcaaattgatgattcaaatcgagctcgtggaactggcacatacttccctaacccaaacttgtccaaagacagatcaccttctggacgaggcggaaggggaaaaactcatttcctgccacataaccatcaaagaccacaccactacggtagagctgatatgtcagcagatttgactccttcggaggaattgagacatatttatgatcctgatgcaaatgacttgggaatcccctcttcactgcgcatatcaataccttctccatcttcggaagctccaagggaaattgtgcatggcaatggttttattcagcctccagctaagaaacttgagtttgggaccttgggagcattgcctttggaagttacatcccaagagcttggtattaacagattgaatactgcttccgacagccaaccttcagcgtctgcaagccctatgtctctggcaaataatcctggaattagttctaatcaaatgaggaatgctcagccatatcatctcaaggacaacggtgatttcccaccgctatctagttgatgccatatagttcattgcatatcagagacaacttggtccaagaaagatactgataaatggtgcgagcgcttggtgcaacaatagcaggggttgttccgcaagacaaacatcatccatcatgtacatcctatcattaacttcacattctcctatcttcaattcacccttgctgttgctttcc

SEQ ID NO: 16077 - DNA, 1487 bp, Oryza sativa
  ref <308>: DATABASE ACCESSION NUMBER: AK066584
  ref <309>: DATABASE ENTRY DATE: 2001-12-06
ctgccgtcctctccctcgccgacgccgtctcccaggtcggttccgacctcgccgatttcctccgctctgattccgatcacgtcccccgaaccctcctccagctctccaagctcgccgcctccgaccccatctcctccgctgcctcctccctttcccactccctcgcctccggcctcctccgcgccctctccgactccacctccacctcgaccacgaccacacccgcacaaatcggcctcaccgatcggatcttggaccgcctgctctcccccgccggcaccggcttcgcctccgccgtcgtcggcagcttcgccaggaacctcgtcttgtcctaccacgccgccgccgcccctcggccccccagcgcccacccgctcccggattggctctgcagcgacaggggcaaggacgccgcggccgaccttgtccgggtcttcgttagcaccgccgtcgcggcctacctcgaccggaccgcctccgtgccgcgtacctctcaccagctgctcgcggcattcaccgaccccaagcacgaggccaagctcaaggacctgctcgtctccgtctgcaatggcgccgtggagaccttggtgaggacaaggaggcaggttgcggttgctccacctccaactccaattgtggtggtcagtgaggcgcagagtcctcatggatgcgtcatggacacggtgtccagcactcttgccgtgcccagcaaccgcaggtttgtgctggatatcactggcagagtcaccgccgagaccgtccgctccttgctcgatttcctggcgcagcgggtctccgatggagccaggaagagcattgccaccgcccgcaacgaggggttcctcgccatcaagcacatcacctccaagtccatggccatcttcaccatatgcttcgccttgtgcatgcacatttccatgggaacaaggttcctcttgccgccatagctcactgctattggaattccaggtgacagcttgtcccccatcttcattagttgcacactaaattattactactatatctgtagattgcaaattgatcctataccactagtagttattattacaagcttggcgcctcattgtcatattaccatgtctttggggtgttggctgaaagcatcaaggttccatcaacaactagactggaattttcagatggtggttgttttgtttgtggcttgattgattgacacgaggtatatgatggctaaattaaatcatactagccgaattggcaattttagtgtatgataattttgatacgggtagtgattgatgctgttttatgcttgccaattttagtgtaaagtggcctagtttttgtcaatagcttcttgttgctgatgctcttcagctgtctttccatgcatgtaatccatagagcttgtctgctttttttttgtttggtattcactctttcttctgacttgtaacaaagggaacgggaagttgtgagataaaaataaaatgccttgttttgtg

SEQ ID NO: 16078 - DNA, 1467 bp, Oryza sativa
  ref <308>: DATABASE ACCESSION NUMBER: AK066585
  ref <309>: DATABASE ENTRY DATE: 2001-12-06
gattgacttcagactcctactccgttctcggactcccagcccgctgccacctttgcgccgctgtcgccgaccaagtctgccgctgacgaaggaggggatagaggactagctccatctccatccagaacagctactcaccaagtccgcgacgccgtcggtgacaaaggaaggaacggtgggctagcccctgtcaccaccgcccattgagaccaccggtgatggagaacttgccgccatacagcaaccatgcccatcaccggagcgccccactaaccggcaacctccaccactgccaccacccccggccaaccggcgccataggcgcctgccttgccgactgccactgggcgtggccgctcccgccgtcgacatcacctccactgcgtcgctcgccggagccaggcgagacccaccgtgccgccctctctctaggaaggggactgaggaggaagccttgccgccaacccagcggacctgcactctccggtgacctgctcgaacggtggcaagttgaaaagcgacgacggcggtgaggatttacaggaccgggcaactagccagcagccgccgagcgctgagcagaaaaggtggaaaagggagaaatgggaaagggaaaaaggtgaaagggggaggtgaaaagggaggaggtgggtgggggcgccgccggcggctgcggcaccggcgccggcgccggcgaggtgggcgacgaggggaaaagcgctgggagtcctgttctcctcccgggtcgcctcagagagcgacacgggagtcaaagcgtccccacaatttccgtataatatgacgggataacaggaatcttgataagcgaagagatgaggaggatataagatgatgtttatgcctttgtggacaggtgaacccgaagggggtgaaatccggcaatggcgcggcggcggcggcgagaggggtttttggactggactggcctgagccgtcggtgacattcgcgctgtcctgcggaagctggtcttcgccggcggtgagggtgtacacggcttgccacgtcgaggaagagctggaggcagccaagagggactacctgcaggccgccgtcggcgtctcgacggcgaccagcatctcgatccccaagctcctgcactggtaccttcttgacttcaccaaggacgtgagctccctcatggactgggtgtgcctgcagctgcccggcgagcggcggcggcacgccgtcgaggccgtcgaggccagccgccggagcccgtcgccgccgcctatccaggttgtgccgtacgagttcaggttcaggtatcttctggccacgtagacctgccacggtgtatggattggacactgtagaagggcagaatggcttgtttttttgtgtagcacaagtttgcagctaattgctggaattttttttttttgcatttgtaaagggaaatacacatgaagagttgagagtgatatatatcatgttgctttccactg

SEQ ID NO: 16079 - DNA, 3523 bp, Oryza sativa
  ref <308>: DATABASE ACCESSION NUMBER: AK066586
  ref <309>: DATABASE ENTRY DATE: 2001-12-06
gagaacatttatcaagtggataacaccggtgcttccattagcactgcttgtagtgtatctctactacattgctactgcgacaaccttcctagggatatgttttttactccttccccagtgttcttctacattgatggcatcgagggaataatctgcagactaattcttccaccaaatgctgctttccgtcaagcagatggtcaaccatgtctgtcaaaagatgaagctaagagagatgcatgcttaaaggcatgcgtaaaacttcataaattgggtgctttgacagattttcttctgccgggtccaggttcaagaaagaataaagtatcagtaacaaataattcatcaaacaacaaagttgaagatgatagtctaagagaagagcttcatgagatgttaattcctgcagttctcaaaccttcgggattaaagttggattctttatcgaacttgcatttctactatgttaaatttattcccataccagaagataggcgatatcagatgtttggtctctttgtgatcaatccccttcctgtggaagctgaaacattgcaagttgatttgcatcttgctcgtggcaggattgtgaaagcaggaattaagcatttggggaaaatagcatttgagaaagagaagatgatgcttgcacacaagtttcaagagatgtgtctgaagattctcctggacagatctgagtttacttcaccccatgttaaattgggcaatgatgttacattagaaatcaattcaacattttaccttctgcttcccatcaagcaaaagtgttatggtgatagatttatgattgactggccagcagttgagcgctgtttatcatcaccgatttttaaagaccctatagatgtgtctgtgcatgcctcatattcatcaaatgagtctctgagacttcttgatggaatcttcagtaaaaccgatgtagttggcagtgtagtctttagtccccacaacaatatctttttctttgttgatggcattctggacgaaataaatgcttggagcgagcacagtggtgcaacttatgcagaacacttcaaggaaaggtttcgtattgagctatcacatcctgaacagccacttttgaaggctaaacagatcttcaacctgcgaaatttgcttcataatcggttaccggagaccacagaatcggagggccgtgaattactagagcacttcgtggagttacctccagaattatgctctttgaaggtcattgggttttcaaaagatatgggcagttccctgtccttgttaccttctttaatgtatcgtttggagaatttgctggtggctattgagttgaaggatgtgatgttatcttcttttccagaggcatctcaaattagtgcttctggtatacttgaagcgcttactactgagaaatgtttggagaggatatctttggagcgatttgaagtcctaggcgatgctttcttgaagtacgtagttggacgtcacaagtttattacatatgaaggacttgatgaagggcaattgaccaggagacgttctgatgtagtgaacaattcacatttatatgagttatcgatcagaaaaaaattgcaggtatacatacgggatcaacagtttgaaccgactcagttctttgctccaggaaggccttgtaaagttgtttgcaatactgacgtggaagtgagactacaccagatggatattcatccagataacagagaaaactgtaacctgagatgtacaaggtcacatcattggctgcataggaaagtgattgcagatgttgtcgaatcgcttattggagcatttcttgttgagggtggattcaaagctgcatttgctttcctgcattggattggaatagacgttgattttaataatccagctctctatagggtattagattcaagctccatcaatttatctcttatggactacactgacattgccgggcttgaagaattgataggttacaagttcaaacataagggtctacttctccaagcattcgtacacccttcatttagtcaacattctggaggctgctaccagagactggagtttcttggagacgctgttttggagtatgtgataacttcgtacctctactctacttatccggatataaaacctggtcaaataacagatctaagatcgttagctgttggtaatgattcgcttgcttatgcggcggttgagaaatctatccataagcatcttataaaggattcaaaccatctcacgtcagcaataagtaaatttgagatgtatgtgaagctctccaattcagagaaagacttgcttgaagaaccagcatgtcccaaggctcttggtgatattgttgaatcttgtattggcgcagtgcttttagattcaggcttcaacctgaactatgtttggaaggtaatgcttatgcttctaaagccagtattgaccttcgccaacatgcacactaatccgatgagagaacttcgagagctttgtcagtgtcatggatttgagttaggccttccgaaacctatgaaagctgatggagagtaccatgtcaaagtagaagttaacataaagagcaaaattatcatttgtactgcagcaaatcggaattcaaaagccgctagaaagtttgctgcacaagaaacactttctaaactgaagaattacggttataagcacagaaacaagtcccttgaggagattttgattgttgccaggaagagggaatcagaactgataggatataatgaagatccaatcgatgttgaggctgacatatctgtaaaaatgaagagtccacatatacatgaagagaacataccttttcaaaatacagaaacatctttcactaggagttctaaattccacaatcaaattatagcagggtctggcaaacatgatgtcaataatggaaggaacaatcaacccaagttggcaacacagagtggtcgtctgcctagtgaagcaacagagaaaagcaataaaaaggtgtatcatggtgacatggtacacaaaacagcaagatcattcctttttgaactatgtgctgcaaattattggaaacctcctgaattcaagttatgtaaagaggaagggccaagccaccttcggaagttcacttacaaggtggttgttgagatcaagggtgcttcggcgacccttttggagtgtcatagcgatggtaagcttcagaagaaggctgcacaagagcatgcggcacaaggggcgctctggtgtctcaagcaacttgggcacctaccaaaagaagaggacgttcgtgtatagcaacattgtcatgttttgggggtcacagtgcgaaagtacagtgatatttgtttgtccagagataaacgtgcctttctctcttttgctctgatgtccaacctcccttattaagggacgtgtataaattttcacttctccagtgccctttgaatggctagagttgtatagctagtccattattttccatgagacgtatattggtatatagttttattcttcaatagacgcatatagtattctttcaagttcc

SEQ ID NO: 16080 - DNA, 1966 bp, Oryza sativa
  ref <308>: DATABASE ACCESSION NUMBER: AK066587
  ref <309>: DATABASE ENTRY DATE: 2001-12-06
ggccatcaccaacacaccactgcaaacccatccgcctccgcaccgcgtcgcacctacaaattgtgcacgctgcaccgctcaaaaaaaagaagaaactaaagtcgtacgtaggacgcggcgtgcgagcgttggtgcggtgcgcggcggcgcgcggggaagtagtgagagcatcgatcatgccgggggcggcggggtactccgggtcggtgaagctgaagtacgtgaagctggggtaccagtatctggtgaaccacttcctgacgctgctgctggtgccggtgatggcggcgacggcgctggagctggcgcggatggggcccggtgagctgctgtcgctgtggcggtcgctgcagctcgacctcgtccacatcctctgctcggtgttcctcgtcgtgttcgtcggcacggtgtacttcatgtcgcggccaaggccggtgtacctcgtcgactactcctgctacaagccgccgcccagctgccgggtgccgttcgccacgttcatggagcacacgcgcctcatcaccgacgacgagaagagcgtgcggttccagaccaggatcctcgagcggtcggggctcggggaggagacctgcctcccgccggccaaccactacatcccgcctaacccgtccatggaggcgtcgcgcgccgaggcccagctcgtaatcttctccgccatcgacgacctcgtccgccgcaccggactcaagcccaaggacatcgacatcctcgtcgtcaactgcagtctcttctccccgacaccgtcgctctccgccatgatcatcaacaagtacaagctccgcagcaacatccgcagcttcaacctgtccggcatgggctgcagcgccggcctcatctccctcgacctcgcccgcgacatgctccaggtgcatcccaactcgaacgcgctggtggtgtcgacggagatcatcacaccaaacttctactggggaacccggcgggacatgatgctgcccaactgcctgttccggatgggcgcggcggcgatcctgctgtcgaacaggaggagggaggcgaggagggccaagtacaggctgatgcacgtggtccgcacgcacaagggcgccgacgaccgcgcgtaccggtgcgtgtacgaggaggaggacgagcaggggcactcggggatctcgctgtccaaggagctgatggccatcgccggcgacgcgctcaagtcgaacatcaccaccatcggcccgctggtgctgcccatgtcggagcagctgctcttcttcttccgcctcgtcggccgcaagctcatcaacaagaagtggaagccgtacatcccggacttcaagctggcgttcgagcacttctgcatccacgccgggggacgcgccgtgatcgacgagctgcagaagaacctggacctgtccgcgcagcacgtggaggcgtcccgcatgacgctgcaccggttcggcaacacgtcgagcagctcgctctggtacgagctcgcctacatcgaggccaaggggcgcatgcgccgcggcgaccgcgtctggcagatcggcttcggcagcggattcaagtgcaacagcgccgtctggaagtgcctccgcacagtcaagacgcccgccgacgggccgtgggacgactgcatccaccgctaccccgtcgacatcccggaggtcgtcaagctgtgatcgaatccatggtagcctcagcctcgccctcgccggcggccgtcgcgccgccgccgcattacctcccctacacctgtacgtcacccgcgaagcgtgcgtcctcaaactttggagcttcttaatttgtggtgttttcttctttcctcctttcccctccctcgcttcttaattttttttcttgtcttccttttatttttatttttttcgctataaacacggattaaatcgatatactttgtctgatgtgtcacataaggaatgatcattcacaggagattaattattatatatttttttaattttcc

SEQ ID NO: 16081 - DNA, 1980 bp, Oryza sativa
  ref <308>: DATABASE ACCESSION NUMBER: AK066588
  ref <309>: DATABASE ENTRY DATE: 2001-12-06
gatcagtcccacctgtctctcgccgccgccgcagcacaagcgcattcagatctcggtcgcttggttttccttcttgatttcctctccgagtggtaattgcttccgtgtttttctctcttttttttttctcgttgaacgattgatttgcttttgcttccattttgtttgtttgaagatttcaattcatcgcatcgttgatatagtttttgaatcgtgtttgggatgcaaatgatttggtggtgagaataatagggctctatattatgagtcaacagcaggcgccgtttcaatggtgccctgtctgccgcttggagcccagatcgatgcctaagccaggagaagattgtttggagatccatcttctttagttccaagccacaatacctggccacaaacccaaatcatcccccaatcgaaaacatcgccttcttttcttcagttcttgctgtttttttgtatggtgatttgtatgttttggacggctctcagacgaacgggtgctctgccgatctattccatgggcgagccaccctttgcagaagtgccgagagagacgcaggccgctaacacgattgggtgtttcctttctagatccatccaaatttcaagcggaaatattgtatctgtatcccatagatctgtccggtttttcattaattcgctcgctttggtgtttcaatcgattgcttgtttttgctgtcagtcactgcggatcgaaaaaacttgtgcaactgagggactaatctaggcggatgatttctgtaaaactctaatggacaatgggtactccatataaaatatgcccatcttaaaaatatttcttgttgatcggatggacacttagggagttagggtgcgttcgttccatggacaatgatgagtgagatagcacatcgatgcgttttttgcaatttttttttaaaaaatcatattaatctatttttacactttaaagtagttaatacttaattaatcatattctaatagcttatcttttttttgcatatctttccaatcttctcgatattcgaactcacccttagcatggacgagtactgtacacggctccatagttcatcaagcgaatgaaacaattctttattctcgcgttaaaccattattaaagttcaaacttgaaatctgtaagttcgttaaaaaaactgaaatctctaagcgttaaccctattttctattttcgtaatagtagtaactaaagcaaggcattgtttagatcgtctttcacctgccattgtctgttgatttgaggttgtcctgccacttttctgtgtcaacattactcggatcattctacggtttcatttgtggatttgagattatcagagatcgacacaagagaagaatccactgaattccaaagacgagtaaggtgcaactttttgcagtaaaacacatcaggcacaacagaccacagttccagaacagcagttgacagatacaaaacaactgaaggtaaatcaacagtaaaatgagcgaaacaccaaagctaacggaacgtttattcacacaatggtgttcttatctgataaggggaccaaactgtcatgacagtgcggtaacttcagttatcttaacacaaacagcagacagcatgagagcaacacaacatcataaagttcttatcagacatgtgtcatagtaacccaacataatcacacaatggacaacctttcagctcaccacaccataatgatacattatgggagtagcattttatatgtacatgtctagaagttcatcctacaaaggggggcagcagaagaagaaatagacaagatgaaaatgagaaatggtgttcgccattggacgtgatgagatgaaccaagtcggcgtatgatacacctctttctttagatcggcgggatgttcgaaaacgagaagcccttgtaccctttgtaagcatagtaggcaattcttgtgtagtagaacccagggatgaacatcacaatacccagaatcatg

SEQ ID NO: 16082 - DNA, 2673 bp, Oryza sativa
  ref <308>: DATABASE ACCESSION NUMBER: AK066589
  ref <309>: DATABASE ENTRY DATE: 2001-12-06
gatttcgcatctctctcagcctcaccgtcgtcgcctcccttaatctctcatgcttatgctcatggcagccgacgtctccatccccacgccgcctctctgctctctgctctccctccacacctactgattcttcttccccttcccttctccgctttccctgccttgcaaatccgccaaaggacttttagctgatcgatgaattgctgttcaagtgaagcggttttaagttccaaagtggcgcttctgaattcactcttctgtactatagtattgccaaaggagaattgctctaataagatgaactgtacaaaaggagggggatttccccttttgttttgcgcagtcatttgtctcatggcccaacagggggcttgcaatgtggtgctaatagcgaataacactaccttgtcatttgatgatgtcgaggcaacttttactccagaagtgaaagattcaggtgtaaatggtgcaatttacgctgtggaacctctggatgcatgtagtccattgagaaagaaagcagccaatggtcctgtttcaccatttgcactggtcatacgaggtggttgccaatttgacgataaagttagaaatgcacagaatgccggatttaaggctgtgatagtatatgatgatgaagacagtggtgtcctggtttcaagtaattctactcgaatctaccctatgtctcttatggtcctgaaatcaattttcttatgtctaacgatatgtcacccgtgattattacatataaaaaagtgtttctgtgctttgatctgatcgtttataatgtatcatgatactttcttagctacatgttagggatggctgaaaaagaattttcatcatgtctatgtcacaagatgtaaattgtaggaataattagcacccttttaaaaaaacaaaaagaagaagaagcaataatcagcatccttgtataaactggatatattacttgctctgtgcatatatatgcaatagccatttgagttttgactagaaattgttacagtggctgggagctcgtccgggatctacatatatgcggtattcctctctaaggcttcaggagaggttttgaagaaatattcaggtcaaagtgatgtagaggtgtggatactaccagtatatgaaaactcagcttggtctatcatggcaatttctttcacatcactgcttgctatggctgctgttctagctacttgtttctttgtgaggagacaccagataaggcgggacaggggaaggattcctgtaacccgggaatttcatggaatgagcagtcaattggttaaagcaatgccaagtcttatttttacaaaagtgcaagaagacaatagtacatcatcatcttgtgccatttgcttggaagactacagttttggagaaaagctaagagtgttgccttgtcgtcacaagttccatgcgacttgtgtggacatgtggttgacctcgtggaagacattctgccctgtgtgcaagcgagatgcaagtgctggaacctcaaaaccccctgcatcggagtccacccctttgctttcttctgttattcatctgtctgctgaatcaacagctttgtcttcttttcggtcaacggtggcagtatctccccctaggccaataagacgtcatccttcatcacagtccacatcccgcgcttactccatttccagtgccccccgcaattataaccttcaaagatattacactaactcaccttatattagtacgagtagaagcaatgtagatcttgcaaatatgtcatcacaatggtctcacactccgcaccaagcatccatgcattctctaagaagtggccatttgtctctaccgatcaacatcaggtatacaataccacatgtttctcgttctgactatggatctgccagcctgggtttatcccatgattcctgttctcaccatggatctccgagttattatcatagctctttgggccagcaacgttcttacctgatgcaccgcaccgagtcagggccaagcctgtctactatggtgctccagtcgccacaatagagtcagtagcagtacaatggcgaatcaggagaagtctatcagctgcggtttaactcgatcattacgtcaggcctatgtacagcattgtcttgattctgatggaagcttgtctgctgtgacatcggatcagtcgctaccaagatgctgattgatcttacgaagttcactgtttcatgagcatttgtgcaagcccctgctagatttgttcctgggagatgcaaataaaacagaaaaatcctatgcgacacaaaactggcaggttcatgcaaagttaattcatggaactatttcgtgccagccaccattgtgattcaacaaggttacttacattgtctgtacggaggggaaattggtgatcttaaatcgaagaaagacttgctgagttttgctgaagaagcaaatatccatcagtctacaaggaatggtttgactttgcgtattgtttgaggcttgtattataggtgatgactttagagttggtgtaatggtgtgtttcttttacattagttattttgtcatgcgtataaatgttacagcttagcaataatctgttagtcggtgaatgttttgtagctctctaatatttattcttttttgcgaaactttctaatacttattctgatcttggatatttgtgct

SEQ ID NO: 16083 - DNA, 4684 bp, Oryza sativa
  ref <308>: DATABASE ACCESSION NUMBER: AK066590
  ref <309>: DATABASE ENTRY DATE: 2001-12-06
aaaaatcaagatttcgatttacatccccaaatgaacgggaggtctcccaagtctccatttgttggtaattaccccacgatccacccaaaaccgcgtccacatggatcgcaagcgcccgcgccctccccagccgtcgccgccgccgccggtggcctcctccgccgcctcctcctcctcctcctcggtgctcgacgacggggacctcctccgcgagatcctcctccgcctcgcccaccccaccttcctcgtccgcgccgcgctcgtctgcaggcgctggctccgccacgcctccgaccgggccttcctcggccgcttcgccgtcctccacccgccccgcctcctcggcttttacgtcgacagcgccagcctcccgcgcccgcgcttcgtgcccctcccccacccgcccgagctcgccgccgtcgtccgccgcggcagcttcgacctgggcaccgccgccgacctccacttccacctcggcacggggatctactgctgccggaacggccgcctcctcgtgtgccacaggggcggcggcgagtccacgctccagctccgccgcccgctccatccggcgagcgacggggcggtcatctccaccttccgcacgccgcctcgccctctcccgcccaaccagcgccacacgcggtatatcctcctccccgaggacggtggcgatggcgatggcgatgccgtggcgtgcaccgtggtgaccctggtgagcagcgagcgggaggtcttcgccaaggtggagaagatcttgcgagctggggtctgggacgtcgcgcaaacctcggcgcccattgagctaccggcgcactggaggagatcattgagccggggttttcttgtcaatggcaagctgtatatgttgggcacaacagggtacattcttggattggaattggtgtccatgagcttgttcttcatcgaggtccccgatgccgtgcgagatgactgccctgaaagctttcagctgagcgttaagctgtcgcaagcggagaaatctgggctttatctgatccatgtggaggggtttaagatccatgtttggcttcacggaacagatggaaacagctctgccgattggaatctagtaaatactatttgtttgcgcgaggtgtttggtcatcttgtgaagcctagttgggagtcaggggattcacgcattagtctgcctgggtctggggacaacgctgagtttgtgttcttggaggtggatggtgaggtcttttgcatggatattatcagcaggacagtggagaaggtgtatgagatggcaatgaaggatgattttctatttgagatataccccttcatgatggtttggccaccaatcttcccagcattgatcaaaacacatgaaccagagtgattcgacaaggtttccctcgagatgatttgcataatcaagtgatgatatatgatgattctgctacttctgtagtgaggtaattgtacaaaataaaattgatgaaaagtttgatatccaagttgatttacctcatgattgcccatactgtttaaaccaaaggtcttcttttcaatgccataatcataagtcgcatgtcttttctaaaaatacgtaatcccagcctatgctactgtttcaatgatgataggcaaaatttgcatcccaccctcaagcactagtggaacaatcgatgtgaagttaaaatcccatttatgtagctagtagggaacaatgcactaatatggttcacctatataaatgtccattcttgagggactttagctagaaatgatagttaatttgtcagattttgatgctttactgtctgttacaatcaccacaacaaaaaatattttggcatcagcatatctaaatcactagagaaactcactcgcatttttgttagtcatcattgtcatgactttgttacaagggaaaaaaaactctcatgcttggtggagatacaataaattaactggagcagggctgctggagaactagataacagcttgtacatatctgtatttcaagacatctcttacctgattattgtgagaagtcaataggataaatgcatatttttggtatacgcacgatgcattgttttatctgaatagattggaaccggtgaactgttatgagaatctctttgttcagaaataaatctggacagtaaacatttccccatggctcaagaaggtggtgggctttagtcaggcggctcagcggctgggtggcgcctaatgtctaattgacgcctaggcggtgcctaggtcatcaactagtcaaatccaagaaattagcaagcatattacataaaagtatactatgtaacactaaaatagcaaccaaacaccacccaaagtagttcagctgcctaatgcaccatctaatgcctaatcatgctacccggtgcctagtgcctaatggtcacctatcacctacttttagaacactgattttgccaccaaaacataccttttttattatcatttttacttttttgtttctgtgtatctgtgcaagttactgtcatttgcactttctgtaacatcaggtgtggttgcacaatttaatgctaggattccaagcatgtttccttggtacaggtctccataggactgcactagaattctgtactattacaacatgaatatctccttaaaaaggaatgacataaacattttttctagatgaggtgatttgcactcagtctatggcaatggcattcatcacctttgaactcttattatttaatagaagtgttccataataagttgagtttcagtttgctcctaaatcttggaagttatcagagtattcagaatgtaatatgcctgaattactaaagaatttaagacattgtgcaaaaccaattcacaaccacatacttaatagtttaaaattttccaagttctaagaggagccctgaggatgcgtgcaccaaggccaaggcacaggcgccacagtgctatgttatttcctaaattccatatactatttgtaaataaagttaagaattggcaacaaagagttcacgtaaagcacatgcaattgtcatgtttatcaatcaatttgtatttatgcttattgcacgaaaaggatccctgaacattcgcactagactcaaattggtccaccaactactaaaatgtccaaagtagtcctcaaagttccaaatttggctcgttttatccattactgatttgacagggcaccatggcactctgagttagtgtggtcactgttttcctgaatcacacatagcaagaagactgaattgctactccaagcaatttaatcacaatcatcaacactgattattccaaaatttctatagatgatcactatccatcgagtaaattgcttggatggcaattggacttctaacagtgctgagcaagaaaactcactgtacagggtcagcactatggtgtcagagcagctcagtatacgggctgaaatgaacctgttaattgatgctctagaggctaacgtttttccgctttcatatttgaggaggcaatttcgatctcatgaaattgagggaccatttggtgattcttatgtgtatgcattgattaactattgagtgttgacacctgcagcttaaatttatcttatatcttgattcagtctggagtaaagtggattctagtcttgttcttggattatggcttttataataccatattactgattacaggatttaaagtaatttttcatttaaaaaggttaccattttgcgatattcaatactaccttgttatgtggcatttcttttttatgtttataatatatggttacatactaacagaattaatattacctaagtatttttaaggttacatgttgacaatataatatttgaaggaaatctaacagtatttggtgccaggctgcccgcaggtttgactctttaaccttctattatttttaaggttcttgattatactgctgcattatttgagctatgaacgttttttgctacgtcttccttggctgcagactcttgctcttatctacatatactataatttgtttctacttgatgattcaatgttcttaactagaaagtgtcttcaagaatcggtgtaatttattttctttgaaacaaaagacttgatgaacttataataccaaagcttttcatttaaccttgataattgccatttgtttcagtacccgagtctccaatgagcttaggttccggttgtccaagagctgtcatgttcgatgtcattgttgccgtcattgagtcgctgatgattggctgctttgcatggctgtcgtgttgattctcggagatcacttctccatcatattcactactcaccagcgatgtgaagctgtggcaggccgttgccaagattgcagggcttcttggtttgaccatggtgctcaacagtgtgcagcctgtggtgtcaggccacacgtgtttcaacctgcgtgcaaaagtggggaggcacagatgaagcaatcaagcttctcttaacgggaaattagtactggaaattttacccttctgttctgtcactctgcaaacctgctacacgtgttttagggctcatatgaaattctgaatgatattttttttcttgccatagaattcgttcgtgttttacaatttactgtcaagtttgcttcaattcccaatatacacacctgggaggacttgtgcctctgatgataatactacgagtaaaatgagcc

SEQ ID NO: 16084 - DNA, 1341 bp, Oryza sativa
  ref <308>: DATABASE ACCESSION NUMBER: AK066591
  ref <309>: DATABASE ENTRY DATE: 2001-12-06
gtgaaagcccaagcccccgcctctccactccactccaacccacccatggccacctcctcgctgctccccctccacctccccacgaggccgtccgccgtcaaggcctccgccgccgcgacggcggcggcggccccgacgccgcagtcgctagaggagtcgttcggacggaagggcctccggttcgccgccgacccggccaccggcgcgcccaccgccgagctcagcgtgcggaacggcagctcgctgcagctccggctcgccgacgggctggtcacctcgtaccggcccaaggtgtactggaaggacgacgggtgcagggaggtgctccacaccgtcgccggcgccggcgccggcggcgaggtcaagggcggcgtcgggctcgcgctcagcgaggtgtcctcctccggcgccgccgagtcgctcctcgtcggctccgagtggtccgtcgtggacgccgactccgactcctacgatgcagtgcaggttgagctggggtgcaccaaggggagcgggacgctggaggtgacgtacgtggtgacgctgtacccgctgagcatggcgacggcggtgatggtgaagaacaacggcaagaagccggtgtcgctgacgagcgcgatgctgagccacatcaagttcgacaagcggcggggcacggcggtggaggggctccggggatgcccctactgctcccacccgccgccggccgccggcttcgcgctcctcaccccggcggaggccatgaagcgggaggacggcggatggttcggcggcggcggcggcgaggagccccggcagggggtgtggaccgtggaggacaacctctacaccatcctcaagaagaaggtgagcagggtgtacgcggccccgccggaggagaggaagaagcgcatctacagcacggcgccctccaaattcaccaccattgatcagaatagcgggctggggttcagggtggtgaggatggggtacgaggacatgtacctgtgcagcccgggggagatgtacaggaagttcggcaaggactacttcctgtgcaccgggacggcgtccatgctggtgccggtggtcgtcaaccccggcgaggagtggagggcggcgcaggtcatcgagcacgacaacctgtaacttcttctctatttttttttcattattacgacagtgaaaaaggcgaccaatttatacacgaattgttctttgaaacaagaaacacgctgaaagcgatagcatgcaggaagagatagtggtgcatctcatgtatcagcgtggccaagtgtacagagaacaggaaaaagaacatggtacatggaactaaacaataaatcaagtgtacgcttacagctg

SEQ ID NO: 16085 - DNA, 2638 bp, Oryza sativa
  ref <308>: DATABASE ACCESSION NUMBER: AK066592
  ref <309>: DATABASE ENTRY DATE: 2001-12-06
gggagaaattccccaagccgccgccactaaccctagcttccgccagcacgggtgcagatcaagttccaaatcaacctgattggtcctcaactttgagggtaacatgatgcgagacagcaagaggacgaggtccgcaccacccagagaaccactggaaatgacagaggacatgaccccaagaagcaagaggaggaaatttgtaccattcggagaaggtgcggtgctacctgaggagatgctgacggaggtgttcctacgactgcccattaaatccatccttcgtttccgggctgcctgccactccagcaaatttcaactccactgcggtgtacacgtgctcgccatcgaagcccattgatgacctactgttcacactcgatgatgcgcgtggaaactatgtggaagtggcaccttcaccatgccatggcctcaccctcctgtataatgctgttgcgccagcttactacgtcttcaatgcaactacacgggcaatcacacggttgccaccttaccaagatgtgattcatgccactgctggcgttgggtttgatgcccggacgaaggagttcaaggtggtgaggctttttcgaggaaaatcgcatgagatccattctgtaaagtgtgagatattcattcttgggggtgaggaaggggatcattggaggcctaccgctggtggagtacctttcaggttctgtagttttgctctttctgctatccgcaatgcagtggcgaacaaacttcagccagtttttgttaacggatttctccactggttgatcaacccctcgtttttactcaaagcaccaagagctgctatcatatcattttctctcactgatgaaaccttcagatggatccgatcaccaccctttgaggtatccagagtgcacttggctgagcttgatgatcagttgtgtatggtccgagaccttcgtaatggcttgcctactggtagcatgtttgaaatttggaggctgaatgactataactctggtgattggtcgcttgattaccgaattggtttgacagggaatttgccaagagatttacttgagccacgaattgtgaaagttattggttcctttggtagctacagatcaagcaagaagataatcatcgctacatctaagcacaaggtgtgtgcctatgatccagtttctagaactcttgaaaccattgtctcaatcatggtgacctgcagtgcctatcaaaacgagaaatctgatattagattcagttcatttacaaagagttttaccccagtgcataggacgaggaaagagatagggttctctactcccttgtctaaggctactaaggagatcctactccgattaccagctgaatcaatcttgaaattggaacttgtttgtaagcaatggcgtggattgataaagaatgaaggttttgttcatgcatactttgagcataagaacatggacaggaggccaaagatcatgcttgtgggtaagggctctgaaaaatcagttttcaactttattcccttgagtaaatggctccaagaggcaaatctaggcacaatgtttctggacaaaaaggtggtttgctccaagccttgccatgggttgaatctggtgagcattgagatgaaagactatctgttcaacccgtgtacaggttaccgcatgatctactagaacagagaccatcagctgtaccaggaatggtccaatttgtctagtgatcgctgcaaagactacaatccttttgtagttggcaataagaatgttggtatggggttttgccaggtgactcagagtcatgccgttgtgggaattttctattactggaaaaactacgaatctcatcagtattacttaacatgcattatatggagttgtagctcccaaggccagccactccccgatccacctctgcctgtgaatgacatgccacctgtttctctggatggtgtgctgtactggatgagtgaaccaaggttgggtcagagttatgagcgggccattgtcttttttaacattgccgctaagatttttgatgttatcccttgcccttcatgcattgcaatctgggacagcagaaatccatgtcacgcatttgtggtcgagcttcagggaatgttgtgtgctgtcctttcaaatccagttgcagataagttagatatatggaagtgggatcatggtctgtggagtatagcatatgcaatcaatttaaaattctggccagattattcccttgcgacaaatgttgtagtgcctctcgcagttgacccaatagatggaaaggttctactgaatactgggaggaagcttggtttatataatccatgtgagcaaacaatcgaaaacttgcacttgatcaggcgtcgcagcaacagaaccctggagttaacagaaatttccacattgccagatgccaagatgttcctaagaagttctctcagtggaaactattattggctccgtgcgagaagtttgctaacccttcaagtgcttcatcagggaagaatccattttactccagagaccaatctaaggagctaaatagtgtgagtcaaaaaattatgcctctggttcctatgttgtacgaggagggtttagcttactatcctacaactactaaattgagagtattgtgcgattgaagtgttgcc

SEQ ID NO: 16086 - DNA, 1795 bp, Oryza sativa
  ref <308>: DATABASE ACCESSION NUMBER: AK066593
  ref <309>: DATABASE ENTRY DATE: 2001-12-06
ggagtgaccgagaaggcagtgatggcagctgagtccacagcacaggcgccggcgcagccgcacttcgtcctcgcccctctcgcggcgcacggtcacctcatccccatggtcgatctcgcgggcctcctcgccgcgcatggcgcacgcgccagcctcgtcacgacgccgctgaacgccacgtggctgcgcggcgtcgccggcaaggccgcgcgcgagaagctgcccctcgagatcgtggagctcccgttctcgccggccgtggccggcctgccgccggactaccagagcgccgacaagctctcggagaacgagcagttcacgccctttgtcaaagccatgcgcggcctcgacgcgcccttcgaggcctacgtgcgcgctctggagcggcgcccgagctgcatcatctccgactggtgcaacacgtgggccgccggagtcgcccggagcctcggcatcccgcggctcttcttccacgggccgtcgtgcttctactcgctctgcgacctcaacgccgtcgtgcacggcctgcacgagcagatagccgccgccgccgatgccgacgacgaacaggagacctacgtcgtgcccgggatgccggtacgtgtgacggtgacgaagggcacggtccccggtttctacaacgctccgggttgtgaagcgctccgtgacgaggccatcgaggcgatgctcgccgccgacggcgtggtggtgaacaccttcctggacctcgaggctcagttcgtggcgtgctacgaggcggcgctcggcaagccggtgtggacgcttggcccgctctgcttgcacaaccgggacgacgaggccatggctagcacggaccagcgcgcgatcaccgcgtggctcgacaagcaggccacctgctccgtcgtctacgtcggcttcggcagcgtcctgcgaaagcttccgaagcacctgtccgaggtcggccatggcctcgaggactccggcaagccgttcctctgggtggtgaaggagtcggaagcttcgtccaggccggaggtgcaggaatggctggacgagttcatggcgcgaaccgcgacgcgcggcctcgtggtgcgcgggtgggcgccgcaggtgaccatcctgtcgcaccacgccgtcggtggcttcctcacgcactgcgggtggaactcgctgctggaggccatcgcccgtggcgtgcccgtggcgacgtggccacacttcgccgaccagttcctgaacgagcggctcgccgtggacgtgctcggcgtcggcgtgccgatcggcgtgacggcgccggtgagcatgttgaacgaggagtacttgacagttgatcggggtgacgtcgcgcgggtggtgtcggtgctgatggacggcggcggcgaggaggccgaggagaggaggaggaaggccaaggagtacggtgagcaagctcgaagggccatggcgaaaggaggctcctcgtatgagaacgttatgcggctcattgcgaggttcacgcaaactggagtggaataggatatcgcgttaatctcacaatgagacgatgagcttgtaagattttcaactgcatactccatatagcaatttctaccgagtagtcgcttgctttgttcaggttcgttttccaccgaaatccggaaatttcggggtcaccgaaatcacagaaatttcaggaatatcggaacgcttttttgcaatagaagtctagaagctacatgtgaatgttttatagaagcgaacaatgttacatttaggacaggaaaaaaaaggtgaagaaactgacagaattgtgttcttgttctgttgttgcagc

SEQ ID NO: 16087 - DNA, 905 bp, Oryza sativa
  ref <308>: DATABASE ACCESSION NUMBER: AK066594
  ref <309>: DATABASE ENTRY DATE: 2001-12-06
gattccttttgcagaaggagcttgactaccttgttggagctgtttcaagccctaaacgcccatttgctgccatcgtgggtggttcaaaggtgtcatccaagattggggttatcgaatcccttttggagaaatgtgatatccttcttctaggtggtggtatgatcttcacattttacaaggcacaaggactctctgttggttcttccttggttgaggaagacaaacttgagcttgcaacatctctccttgcaaaggcaaaagaaaagggtgtctcccttctgttgccatctgacgttatcattgctgataagtttgctcctgatgctaacagccaggttgttccagcatctgctattcctgatggttggatgggtctggatattggtccagattcagtcgcgtcattcagctctaccctggaaacaacacagacagtcatttggaatggacctatgggtgtcttcgaatttgacaagtttgcagtaggaactgaggctattgcaaagaagttggcagaccttagcggcaagggtgttacaaccattattggaggaggtggttctgttgccgctgttgagaaggtgggagttgcagatgttatgagccacatttcaacgggaggtggtgctagcttggagctgttggaaggaaaggaacttcctggagtcattgcacttgatgaagctgtcactgtggccgtatgaggctaagtttcattttgttgcatcttcttcatgtaccattctaaacttgctatattctactcctttctcgcacctcttcaaccactcgaaatgtaagagaccaatgttttatagagatgctggaaatcgtttgaataacttcccagcattttgtgtttgttggatataccttacctcaggaaacataattatcaatacctt

SEQ ID NO: 16088 - DNA, 988 bp, Oryza sativa
  ref <308>: DATABASE ACCESSION NUMBER: AK066595
  ref <309>: DATABASE ENTRY DATE: 2001-12-06
gggtccgactccgaccgcgcccaaagaaggtccaagagcccaactgaaccggaggagtcgagccgccgccttcctcttcgcacacctccaccgaccgccgccgatcgtgcggtgcggccggcgtcatggcggcggccggcgacctcaccgacgaggagcgccgcgcgctccggggcagcaagttcgcgccgcttccagcgcctactgccccttcccgcccccagcccaggatggctcatcctggaggaccactaactacaaacaaggctgctgctttagcaaaattccttgagagaaagcttcagcagcctgatgggctggaatctctgaacccagaccttgtcaaattggctgtgagaaatgcaaaagaaacaataaaggctagcaagggtgaaccgtcaacttcaggaagaatagtacggcacgtttcatcattcggagattcttctgaggattctgatgattcaaaagatggagaagaaaccaagggggtcaaaagaaaaaggaagaataagaaggataagagttttcaaaacggaggagaacagagcaagaaaaagaagaaaaataaaaagaaaaatctaaaggctgctaaagattccaagtcccaaaaagcatcgaagaagaaaaagttgaaatccctatgattctttaacttctctggtattagggagctgaaggcgttgctgttgtcatttttcttgatttcacttttttgtgagtcccatttcttgtaagcattgtaagcacttgctcttcctggcattttgacactggaaatcccatttgcgggctgcatgcctgtcacatgatgaccggaagccacatttgtcgagagaggcaagacctcaagactagcacttgtatacaatttacagtgaacaatacaaaacctgtgaaatccagtgctgcaaaactgaattatgggtgctggcttgctgtttcctcacctggggcattgaactcagtcaaacacgaatttcgttgc

SEQ ID NO: 16089 - DNA, 1618 bp, Oryza sativa
  ref <308>: DATABASE ACCESSION NUMBER: AK066596
  ref <309>: DATABASE ENTRY DATE: 2001-12-06
gaggagtggagaggagaatccgccgctgcgccgtcttcttctccattgaagccaagctcccccaggccttctcgttctccccctcctcctcgagctctcgctggtgcggggagcgaagtggagaggagaggccgagagggacgagagatcgagagggagagggagcaccgaagcagcgggcggcagcatgcggccttcgctccgtactatctattttcttcttttgctacttccacatgtggttttttctagaccactctttccactaccaagcaagagtaatggaatagagaagagacccttacaaacttttcgaccatataacattgctcaccgtggctcaaatggggaaattcctgaggaaacagctgctgcttacctgagggctattgaagaaggtgcggattttatagaaacggacatccttgctagcaaagatggggccttgatctgctttcatgatgtaacactggatgctacaactgacgttgccagccgcaaggagttttccaatagaagaagaacctacgaggtggaatggttcaacgctactggctggtttgtagtggacttcacacttgaggaacttaaaacactgaaagtcaatcagcgatacccattcagagaccaacaatacaatggcaagttttcaattatcacatttgaagaattcatttctattgccttggatgcaagcagaactgtcggaatatacccagagatgaaagatccagtttttatcaacaagcatgtcaagtgggatggtgggaagaagtttgaggacaaatttgtggataccttactgaagtatggatataaaggccaatatatgtcagaaaattggctgaagcagccgttgtttatacaatcttttgctcctacttcccttgtacatgcatcaaagttgacagactctcccaagatattcctgattgacgatttctcagtgagaacacaagatacaaaccagtcatactgggacatcacttctgatgactacctagcatatattagtaactatgttgttggccttggtccatggaaagatacggttgttccagcagccaaaaactatacgatggcaccgactgatcttgttgcaagagcacatgctcataatcttcaggtacacccgtacacatacaggaacgagaaccaattcctgcacctcaacttccatcaggacccttatgctgagtatgatttctggataaacagcatgggggtcgatggattgttcactgatttcactggatccctgcaccgttaccaggaactggtagctccacatgcgaaggatgaaactgcaaacagcctcctagtaaaaattgctcaaatgatctcccaatatgaaggtttctgatcatgttttccatttttccgttaatcgacatgcttatatacacgcattagtgatcaagggtgaccttgaatgttacagaacaaaaaaaaaaagaaaaaaatacttgttttctggtggctagcagttagaacggattgtagacacctctataactataaatccctgaattgcggggagaaatttctacagttgtaataattgtctttaaaacagttgtatctgattagttccttgaaacaaagttcattgatgggc

SEQ ID NO: 16090 - DNA, 2382 bp, Oryza sativa
  ref <308>: DATABASE ACCESSION NUMBER: AK098961
  ref <309>: DATABASE ENTRY DATE: 2002-08-28
aattggcagtattgtccggccgctgattctgctcacagaccggccatggccgccggcgtcctcatgacaaaaccgttcatggctgctgcggctgctgctctagtcagcttgctcgtcatgctgcgctgcttgcctagcgtcgtcgctaccactgtatctttcaactactccagcttcagcaacgcgagcaagaacatcaccctccagggcagcgcggcgctcgccggcgccgaatggatcgagctcaccaaaggcaaagggaacaacctgtcgagcggcggcaccatgggccggatggtgtacacgccgccggtgcagctatgggacgccgccaccggcgaggttgccagcttcaccacgcgcttctccttcaacatcaccccgaaaaacaagagcaacaagggcgacgggatgaccttcttcctcgtcagctacccgtcgaggatgccgtacatgggctacggcggcgccctcggcctcaccagccagaccttcgacaacgccaccgccggcgaccggttcgtcgccgtcgagttcgacacctacaacaactccttcctagaccccgacgccacctacgaccacatcggcatcgacgtcaacgccctccggtcagtgaagaccgaatccctgcctagctacatcctcatcggcaacatgaccgccatcgtcgactacaacagcaattcgagcatcatgtcggtgaagctatgggcaaatggctcaacgacgccttacaacctcagctccaaggttgatctcaagagcgccttgccggagaaggtcgccgttggcttctcggcggcgacgggttcatcctttgagcagcatcagctgcgttcttggtacttcaacttgacgttggagcagaagcagccaacaggacaacattcgcgtggcggagttgtagcgggagccaccgtcggtgcaattctgttcatcgtgctcctcttcaccatggtagcaatcctcgtacgacgacgtcagagaaagaagatgagggaggaagaggaggacgactcggaaggcgatcccatcgtggagatcgagatggggacggggccgaggcggttcccgtaccacatacttgtcaacgcgacaaagagctttgcggcggaggagaagcttgggcaaggcggtttcggcgcggtgtaccgtggcaatctgagagagctcggcctagacgttgccataaagaggttcgccaaagactcctccaagcaagggaggaaggagtacaagtcggagatcaaggtgataagtcggctgcgtcaccgtaatctcgtgcagctcatcggctggtgccacggccgtgacgagctcctcctcgtctacgagctcgtccccaaccgcagccttgacgtccatctccacggcaatggcaccttcctcacatggccaatgaggatcaacattgttcttgggcttgggaatgctctgctctacctccatgaggagtgggagcaatgtgtcgtgcaccgtgacatcaaaccgagcaacatcatgctggatgaatctttcaatgcaaagttaggcgactttggtcttgcaaggcttattgaccataacgttggggtacaaacaatgacccacccctcagggacgccaggctatcttgatcctgaatgtgtgatcacaggtaaagcaagcgctgagtctgatgtctatagttttggcgttgttttgttggaagtggcatgtgggaggagaccaatgagcttactggacaaccagaacaatagcctcttccgactggtggaatgggtctgggacctatatggccagggagtcgttctcaaggcagcagacgagcggctcaacaatgactatgatgcaaccagcatggagtgtgtcatggctgttgggctctggtgtgcgcatccggaccgatacgcacgtccatctatcagagctgccatgacggtcctccaatccaatggaccactaccagtgttaccatctaagatgcccgtgccaatatatgcaccgccgatggcctcgtcagaggggcaactttcatcatcgacaggaatgtcatcctcaagtttgacaataacatcaattacacctcgctagggtggcaagttttctcactcataggatatgtatagcaagacaacttttgtcatatctagatttttatccatacccacaagtcgaactacctgcatccctacacctcagttcctttcgcatactttagccggtttgaagggctcatcttcgttaattgctccgtacagtagtattagccatgtttggttcattttacatgttgtacatttacaaattgccgcttgaataggatgtacagctcgtgaggcaattggtttgctctttagagagctgcctaattggcaatatgagtaatgtgttcagttt

SEQ ID NO: 16091 - DNA, 2495 bp, Oryza sativa
  ref <308>: DATABASE ACCESSION NUMBER: AK066597
  ref <309>: DATABASE ENTRY DATE: 2001-12-06
tatttttgttcttgatttttttttctctcccccccccctccaaagtatatactgcttgccattcgtatctcgagtgtgtgagcgcctaattttggctcaagcctatattaaggaggggcgtaccgtatcgtttctattttgtttcgtgaaactggtgtcaccggaagcggcagtagcaggagtgctagatccttcacgagctgcgtgggggtggttgaccaggacacgcctcccggatcctgaaataaggccaccgctcgtttccccctccccctcttcctcttcctcttcctttgccaccccctcgcatttagccagcctcccacggttgtggagctgtgtgggccatttcccaaccgtcgctccggtgggtggccgggagggtggtcgctgcgacccatgggcatccaggtcgcggccgtgacgtcgtcgccatgcgccgtcacgacgtcgtcgtcgtcgtcgctgtcgccttcgtcgtctgccgccgcgacgacgtcgcggcggcatggcgttcttggaggtgtcaggctgtcgagagggcagtcgtcgctggctagctggagcgtcggtatgacccgccggcgcgccggcgggcaccagatggcaaggcgcgctctcagcgctagcattgacagcatcgggagcgacggcggggacgacgaggagttcttgcggaggattcaggagctggcggtggggctgcaccctggcgccgctggctgcgggtggccggcgagcgtggagcggagcgcgagcagcgtggggttgccgctgtcgctgcggatgctcaagcggaagaagcagcagcagcagcagcagggccggtgggacgagcggctgatcgactgcgccggcgagtccgcgcgcggcgcggtggggcgcgcgttctcgtcgatggtgctcatcatccgggagctgcagagcttcacgctgcagatgcggcaggcgctcttctacgaggacctgcagcgcgtgctcgcgcgcgtccacgccgagatgcacgcctccttcgtgtggctcttccagcacatcttctccggcacccccgccctcatggtctccgtgatgcttctgctcgccaacttcaccgtctactccatgggcgacagcgtcgcggccgccgccacgctcccgcctccccagccccccgcggcgactgtggcgatggtcgacacccagcacgcggagcagtctcattcccaccagcggttcgaccatgcctcgctcaagacgttgtccatcggccgaacggcctcggtgggtggcaacagcggcggcggcggcaaggtgcggccggtcgccggggcaaccggcgacggtcgctcggacgagtggtcaaatcggcaaagcggcgcggtgttgccgcaggatgcgtcacagggtacgccgggagctggcgcggaggaggccgtgcccgtgtcagaagcaatggccgtggaggagacagaggacgaactggtcatctggaaaaggatagccgatgaggctaccaggatgcaggcgagcgttcgcgccgaggcgctgatggacccggacacactggggcagctcgtggcgccggtggaggccaagctggacacggaggacacggcggagttcgcggcgtcggaggagcggtacgagcgagccgtgtccgaggagccagacaactcgctgctgctgtccaactttgcccagttcctgtacacggtgcagcgcgaccacgatcgggcggagcactacttcaagcgggcggtgcgcgcggagccggcggacgcggaggcgatgggtcggtacgcgactttcctgtggaaagcgcgcaatgacctcgcggccgcggaggagacgtaccaggaggccatcgccgccgaacccagcaactcgcaccacgcggcagcctacgcgcacttcctctggaacacgggcggcgatgacacatgctaccccctcgactgatgcgcgtgcatgagccatgcctccgcgatccaacacctccctcccccaacaaaactcaacacacacaaaaagaagcaaaggatatttttttaccacactccaagaacaagacgcacttctccaccctgcacgtgcttggccgaccacgccgctacactacactacactactacgcgctagtagtacagattttttcttcttgtggttgctcgtctcgcggtgagccggtgagtaatattggggtgatccgcggcgtacgtgctgctgcttcccgttctggaaatccggcgagcggggcacttggccggaaacggcgggagccgcgctaaagctggtgtgatcgatcgagttcgctgctcgcggccctacgggtttgccagttgcgtttgcccgagggacccgtcctattggcacggatgctttgcggcgtcatggagagagatgagagtttgctgtgtttaccagtggagtgaatactgtaatacaagtgcatagcagcaatccaatttgcaacctgtaattgtgcagacgaataagaggctctttttttccgcacc

SEQ ID NO: 16092 - DNA, 3939 bp, Oryza sativa
  ref <308>: DATABASE ACCESSION NUMBER: AK066598
  ref <309>: DATABASE ENTRY DATE: 2001-12-06
gggtggcagccatataatttgcttgcgccaaaaccaaacatagagcagcaatagagaggaggagagggagatgatggcccatctccttctcctccatccacctgccagctcgaagatttctgtctgaatcgatcggatcaagatcaaatcaaggagggaggaggttgagcaattcctgacagggacagatcgggaaagctctcacagctttttctttgtttttgtttgatttgttcctgcttttcgattggaaaattgggaggggaggaaggtgatagccattgaggtggtggcatttgctgtcaccacctttagctatcgccttcctcttcctcgtctcgctcgccccccggtctagcttctttctgcagggccggacggaaaaaacaaaacaaaagaaggcaccagccagccatggcgatggtgctggactccttcgtcacccggtgcacggcgtcgctggaggacttcgccgggcaggaggcgtgcggcgccctcggcatcggggacgacgtgcggtgcctcctggccacgctccggcgcgtccaggccgtcgtctcccacgaggagcgccgcggcagggtgctgagcgccaaggtggacgcctgggtggcgcaggtgaaggacgcgatgtacgagaccgacgacgtcctcgacgtccccatggtcgagggcggcaagatgctcgccgagggggacagcccgccgacgcccaaggcgcgctgctccctcatgttctcctgcttcaagcctgcatccgccccaaagttccaccacgagatcggcttcaccttcagggagatcgacgccaagctgagggagatcgaggaggaaatgcccaggctccccgcaggatctttgcactctgaatcaagaagggattggttcagtagaggcatctgcagtaacttctctgacgccattaggccactcgcggttgggacacaggttcagaaatctctggatggccttgtgcctaggatgattagagagggcaagaagaaggtggatgtcttggccatcgtcggcgcagtggggatcggcaagacaatgcttgctagggagatttacaacgacgagaggatgaccgaaacatttccaattcgtgtgtgggtgaagatgacaaaggatttgacagatgtggatttcttgaagaagatcatcatcggtgccggtggtggtgtcaatgttggtgagattgagagcaagaaggagctccttggaatcgtcagttctactctttcgaagaggtttctcattgtattggatgacttggacaacccaggtatatgggatgatctgctcaaagatccactgggagatggtgtggcccgaggcagaatactaatcacaacacggagcgaggaagtggcaacaggcatgaaggccatggtccaccgcgtcgacaaaatggatgcagagaatggctgggcattgttgtgcaggcagtctctcccagagtgcagttcagaagagctcgcgtcactgaaggatgttgggatcaagattgtggagagatgtgatggccatcctctagcaatcaagatggttgctggtgtcctaaggtctagaggcaagagcaaggctgagtgggagatggttatgagaagtgatgtttggtccatgcggccaatcattcctgagctgcctcaagctctctacttgagttatgttgatctgccttctgaattaaaggagtgcttcctccattgctctttgtatccagaagaattacccattcagaggtttggtcttatccgacgttggatagctgaaggccttgtaagtgacaaagacaataagttgctagaagattctgctgaagagtactatgcagaattggtaagcagaaacctgttacagctttatgctggtaatcttgatcagtgctggataacgcatgatcttcttcgctcactagcacgctttctgataacagatgagagtatcttaatcagcggccaacagagattgagcacagacccattgtcattgtcaaagccacgacacctgacattgtgcaacatggaaaacagatttgatgatccaatttcagtaaagcagcagatgagcctaaggtcattgatgctcttcaatagcccaaatgtcagatcaatagataatctcgtcgagtcagcatcatgcttgcgtgtcttggatctgagcaagacagcattaggtgctctcccaaaatccattggtaacctgcttcatttgaggtacctcaatcttgatgaaactcaggtcagagacataccctcttccattggctttcttataaacttggagactttgagccttcagaattgccagagattgcagagacttccttggaccgtcagggcattgctacagcttagatgcctttcgctcacaggaacttctcttagtcatgtaccaaagggtgttggtgatttgaagaatctgaactatcttgctggtttaatcattagtcacgacaacggtggacctgagggttgtgatttaaatgacctacagactttgtcagaattaaggcaccttcacatagagaacctggatagagctacttcaggcgcttctgcacttgcaaacaagccattcctcaaggatctacacctctgtgaacaggcaccattgatagaggagcagcaatctgaacaagaacaagagaatcaagatgaccaaaaggaaacagaggaagaagagaaggaagtacttgatgtaaccaatagccaatttagtagagaggaatcaatcaaagcgagcgaaaagatatggaacgaactcaccccaccccagaacattgagaaactagtaattaagaactaccgaggtggaaagtttccaaactggttgacaggtccaaagctgggcatatcattccctagtcttgtgtacttggatatcgacaactgcatgtcatgcacggcactgcctgctcttggcctcctaaaccaactccagtccttgcaaatctcgaatgcagactcagtcgtcaccattggtcctgaattcctcggtgctgcttcatcatcatcggccactgcttccttccccaagcttgagatattaaagctcagaaacatgaagaaattggaagagtggtcattagccgtggaagagaatcagatattgttaccatgtcttaaatcactgcacatacagttctgccccaaacttaaagctctaccagaaggactgaagaatgtttcgctgcgtgagcttcatgtcgagggtgcatatagcctaacagaaataaaggacctgccgagaatatctgatgatctccaactcaaagacaacagagcacttcagaggatctctagcttgcccgtattgcagtctctcaccattgacaactgcccaaagttgaagcatgtttcaggccttgacacactgcagcatctcaggctggcgttccctccatccacagagacattttattttgatgagctgatcatcttctggagtattgcattcccacggtggctggagctgttgatccgtaagcgcgatgggctgtgccatttcgagcttcagtgcagcctctcattgctcaggagctgcctggacggtggcaagaactggagcatcgttcagcagatccccgaggtgcggatcaccagcacagatggcaagaggtacatccggtacaacaaacgccggtgcatctatgagacgaatgctcaatctgaagattgaagccttcgtgaaagtcccagtgcagtacgttttttttttttcatcttcattgtgcagttcatcttgtcaaggttctcttgttcagttgtgtggtgtcattacttacagaagtgtatattttcgttgatttattggcagtggtttgggttgttacaaggacacatctcagttttcctgggtagtccttccatgagttttgtttgcaatatttgccaacacgtgcattcacacaggctattatgtaagcctttgttc

SEQ ID NO: 16093 - DNA, 2403 bp, Oryza sativa
  ref <308>: DATABASE ACCESSION NUMBER: AK066599
  ref <309>: DATABASE ENTRY DATE: 2001-12-06
ggcagccaccaccaccacccccacaccggagcacagcgaggcggcgccgcagccccatcttctccggcgaagcgaaatggcgacggttccggagcctttgatctgggagattgtcaagaagaacaactgcttcctggtgaagcagttcgggaatagcaatgccaaggtgcagttcaccaaggagcccaacaacctgtacaatgtccactcctacaagcactctggcttggcgaacaagaagaccgtgacgatccagccatcaggcgtgaaggacgcggccgtggtcctctccacaaccaagaccaagaagcagaatgccccagcgaagctctaccacaagtctgtgatgcgcaaggagttccgcaaaatggctaaggctgtcaagaaccaggtattagcacgtgaaactacttctttgcatagcttcttgtccttgttatgccttgcgatgctagaagctttaaatgcactgctatgaacataaagcatcctatattttggcttcattactcttttcttatttactgctgtgatgagccgtaacacataaggaggccaaccgatcaattggttcttcaatgaaatactcttgttacgcttggcttctgagcattttgtattgtcttgatatgttgaagtggctctcatttgtggggttcagacgttaggatggaactgtgagatcttcatacggaacaattaaaactcatacaatgttttttacagaagttggtataacttgctgttaaaaaaaacagttaggtgtcaatgaactgcaagttagtttgtgagaattcctgtttttcgttttcagaaccatctttttttccctgtttttgttacattgctaattctaactgctgctgtgataagccgtaacacataagaaggccaaccgatcaattggttctttgatgaaatactcttgttacacttggcttctgagcgtcttatactggcatcatgcctttttgatatgttgaagtgcctgatctgtgaaaaccttcagattttcaaatggaacattttgatacttaaaacaccagttttagcagcagttgatacaactttatctgaaaattcaggtatttgacaatgaattgcaagttagattttaagtatttgctttttaataaccaagtttttgccctatctgagttaaattgataatgcaagatgcagctgtgatgagccgtaacacataaggaggccaaccgatcaattggttcttcaatgaaatactcttgttacgcttggcttctgagcattttgtattgtcttgatatgttgaagtggctctcatttgtggggttcagacgttaggatggaactgtgagatcttcatacggaacacttaaaactcatacaatgttttttacagaagttggtataacttgctgttaaaaaagcagttaggtgtcaatgaactgcaagttagtttgtgagaattcctgtttttcgttttcagaaccatctttttttccctgtttttgttacattgctaattctaactgctgctgtgatgagccgtaacacgtaagaaggccaaccgatcaattggttctttgatgaaatactcttgttacgcttggcttctgagcgacttatactggcatcctgcctttttgatatgttgaagtgcctgatctgtgaaaaccttcagattttcaaatggaacattttgatacttaaaacaccagttttagcagcagttgatacaactttatctgaaaattcaggtatttgacaatgaattgcaagttagattttaagtatttgctttttaataaccaagtttttgccctatctgagttaaattgataatgcaagatgcagctgtgatgagacgtaacacataagaaggccaaaccgatcaattggttcttcgatgaaatatatttgttacgcttggcttctgagctgaatctgcctctagtatttcttctctatacggcagctttcctttatgtaccttactgaacaatcatcagtagtttgttctttaatttgctgttattctgcccttcaggtgagtgacaactactacaggcctgacctgaccaagccggctcttgcgaggcttagctcagtgtaccgcagcctccaggtttccaagtctggtgccaagaagaagaacaggcagccaactaagctgtaaatcgcttaaagctcgcttttttttttgtcaaggggcctcgtggtgttcatgtttccagctacctctgttcgtaacagtgattgagacttgaattgatatctatgctagaattggatcaactatgctacaaatctactctagtttgtactcgctacaattttggtctgctgtgtcattgttcacgttgcacttgataatagcagctaagctaatgtcatcaaattgctggtgccgttttgctttgt

SEQ ID NO: 16094 - DNA, 1940 bp, Oryza sativa
  ref <308>: DATABASE ACCESSION NUMBER: AK066600
  ref <309>: DATABASE ENTRY DATE: 2001-12-06
gggagaagagcgaacacttctccttctctctcttcttcttccctcatccccgcgcggcctcccgcctccgcctctgctcgcgagccacccatttcccggcgacagcggcctccctccgccgccgccggcgatctgacactggcgcccgcgccaccggccgagaaaggagcaggatggaaggggagatggatactgtggtgggttcatcatccaagccatgcgggccgctgacggattaccgcattccggattacatcctgaggccggatgcgcagcgggtgcttcttgatcatgcgcccccgtgccccgtgctggtgttcatcaattctggatctggtggtcagctcgggagcagcctgatcaaaacctaccgtgaacttctcggtgaagcgcaggttttcgatgtctccgaagaggctccggataaagtgttgcaccgtttgaatgtcaaccttgagaagctcaagatggatggagacattcttgctgttcaaatttggagaactctcagaataattgttgcaggtggcgatggtacggcaagctggctgcttggggtagtcagtgatctcaagctttcacaccctcctccaattgctactgtgcctctgggaaccggaaacaaccttccattttcatttggatggggaaagaagaatccttgtactgaccaagagtcagtaaaatcattccttgggctagtgaggcatgcaaaagagatgaaaattgatagctggcatatcatgttgaggatgcgagctacaaaggaaggtccatgtgatccaatcgcccccttagagttgcctcattcattacatgcatttcaccgtgtgtcaagtagtgattccctcaatatggaaggttaccacacattccgtggaggattttggaattactttagtatgggtatggatgcagaaatttcttacggatttcattctgaaaggaagaaaaatccagagaaattcaaaaaccagctgacaaatcagggtacatatgctaaggttggacttaaacaaggatggttttgtgcttctttaagtcatccatcttcaaggaatattgctcaacttgcaagtgtgaaaatcatgaaaagagccggtagccactggcaagaacttaacattcaccacagcattcgatcaatcgtctgtctcaacctgcctagtttctctggaggtctgaatccttggggcacacctggcacaaggaaagtagaagagagggagctgacggcaccttttgtcgatgatagacttattgaggttgttggattccgtgatgcctggcacggacttgtcttgctggccccaaatggacatggtacccgccttgcgcaggcccaaaggatccgtttcgagttccacaaaggcgcagcagagcacaccttcatgaggatcgatggggagccatggaagcagcccctcccaaaagatgacgacaccgttgttgtggagatctcccaccttggtcaggtcaccatgcttgccaacgagccctgcaagtcgaagagcgtccatgacgaccaatcctcccacgcacaacacagcggccatggcaacaacgacgacgacaaggacagcatggaggacgaagatgagtgggaggatggcaggaggaagtttggtgccgcagatacattcaagatccctgacgaggttgacattgctcacctcagctgaactcagaattggtatcttttctaggttgcattcttgatgttcataatcttcttcagtaaagtgatttttgtcttcgattccttcaacattataagagtggaatttagtaattcgttcactgcaaaatttggaatgtatagaccataggtttggaacatctatagtagaacccaagttggtaacatttctgatttcttgtttattgttcagcagaaatttgtgttattttgggaagaaaataaagttattaaactgttg

SEQ ID NO: 16095 - DNA, 1210 bp, Oryza sativa
  ref <308>: DATABASE ACCESSION NUMBER: AK066601
  ref <309>: DATABASE ENTRY DATE: 2001-12-06
gacttctcctcctcttcttcttcaattccttcttccttcttccccgacgagcggcgcccaaccgccatgggcaactgcctcaacccggcctccaaggcgcgccgccacggcggcatgccgccgccggaggacatggacgaggaggaggggtggtgctacgcgacgcccgagccggcctccgccactgccaccgccacgacgacgatcggacacctgctgagggaagaagaaccggcagaggaggaggatgaagaggagacggctgcatcggcggcggcggcggcggcggcggcggcgggggtgaaggtgaaggtggtcctgaagcgcgccgagctggagtggctcatgtcccagctcaagaccggcgaccgccgcctcgaggacgtcctcaaccagatggccaccgcccgcgccctctcctccgcccaaccgccatgggcaactgcctcaacccggcctccaaggcgcgccgccacggcggcatgccgccgccggaggacatggacgaggaggaggggtggtgctacgcgacgcccgagccggcctccgccactgccaccgccacgacgacgatcggacaccgccacccccctccccaccgcgccggcgacgggtggcgcccgcggctcgagtgcatcctcgagtgccacgagctcgccgccacctgacctttctaattccatctcctcctcctcctccatatatatgtgtgtttcttgctcgccgctgcttggatcagcgtcggtggcatgcatgcgtccaagttgttttcctgacttgcttcaattctttcctcaaggcaaattaaagggaagatgaagcagtcagtcagtgaccctgttagaaggcaaacaacaacagctttgtttaattagctgaggtgatgtaggatcatatcatatcatatcaaacacttaatactattactctatagtctatagagctagcagatctttgatctagtgtgtgtggtgttgcttgacagattagctttcttttttcttgtttctttttttgttttgtaatcttctctttttctttatcttgttgttgttgttgtccactttgccatgtggtgtgctccatttctgtttctgttttgtacatacttgtgatgggatggcaaaatcacagatcaaaagctgtaactttatcaggttttggatctggttgtttatacagctaattaaatcggtgtgtgcttgggacc

SEQ ID NO: 16096 - DNA, 2354 bp, Oryza sativa
  ref <308>: DATABASE ACCESSION NUMBER: AK066602
  ref <309>: DATABASE ENTRY DATE: 2001-12-06
ggatgacaacaattagtgacggtttttcttttgtgacacatatagtgtaggtttacttccagcttcgtcgattaccagacggcaccggcgtcgcgcgagcgagcttgatcttgcgccttgtgcctgctagctgcttcggcggcggcggttatcttcttccggtgattaatcctatatacctactatttgcttgcttaagtgacgcccatatattgcgcgcgattaatcttgatatgtaaagtgttctcgatctgttccgctgctgttcgtcgtctcaggctaaatggacttggaagttttcctggccattctttactcagattgtccggattcattacattttgagtatctggcctgcaagtgctgtttatgaaaatgatcaccctattcggcattttcagatttatgtaatgcaatatttttctgtgtttctaaaatttgccaccttgtgctcaatcaccagctccttccgatcttctaattgcccggccttcattcgaattctctagacacatcttaattgaacttaatttaagctagcgctctgttcactcaaattattttctaatttaagtcgtgttatttctctcctaatcattttatatgttaaacttaataatatttgtctttgcaataaaagtagtaatagttcactaaacacttagctaaacgtctaaaaaacagttggatcaaatggaattatcaaaattccctgcataccaatttacatgctttagttatactctcgctttaaatattgcactctgtatttttttcattttttaaagactagaaagaaaagacctttgcgttgcaaagggtgaaggctatttaatcttattattattatatgatttagttaaggtaaaattcaatatggaaattcgattggatataggagtatatattttagaaaaccatgagcttcagttagcaatccgatcgtttaaagttagcatgcatgttttttttataaagagatttcttatatgactcctatatttccaaaagcgaacaactgtaaaaccgactcaaatatggaaattatttccaaaagcaaacgagattaaaaaccaactcaaatacggatgacgtaccgaagtaccggcaaaaacatctttaatttttataatagtagagaagagatagagatgtgtaaattatagtgcatgtaataaagtatcatctttcataattaaaccatgattgcaaaagaaaacatattgatgaaaacaatattacctaccatttatctaaaatatatttagaaagtttcaagataactcttttttttaaaaaaaaaaccaatttcgataccggaacaccaaattgtaggtgctaaaatcaatgatttataatttagaactgcattagaaaatgttgaggtgcacatatattaatctgaatcatatttatatgattctcatgaattaaaagtttaagattcaaattgaacaaaactattaatacgtcacaggcaatcattttcccgccatttagttttacacaaaaccacgagttgcgtagtcgtttccgctgtggccatttattagtgcagggcatgctgcccatagcctctgatagactgacaatccatgtgcctatttctactacctcgatcaacgatctgatcttaatcatcttctccataatttgcagatctgtaacagccccgatcaagaaaggatccaacccacctaggaggactaacctgaacgtgctaatgagttcaaagctagtaacatcacctctgaaatccatggagcagggccatctagagcaacctctgcgcgatccgcaggcgccggcggagcagcatgacatggggttatctcccctgacgctcctcggcttcgccttcctgaccttcaactcgggaatggcagtgtacagatcagatagagacttggcaaccatcttcttcgtggtcttctcctacgttgacctcgtatcgctcttctacttcctccgattatttgagaagacgccgccggagtcgcctcgccgccaccacatcaagacggcggtgtggctcctgacgacgatgctcaccgccgtgttttcatataaagtggcggccatcatgcctttcccggttcaggtgctggtttgggccatgtccgcagcaactgtgcttggagggttctacgcattcttcctccactccgatgaaaaaaagcctattgaggtaacgtaacataagtattattactccaaattgaagtttaaccatcatcatgatgtatgtatatatagggactgacagaatgaaagtttaagaacttcatcatgagatgtgatcgatcactggaagaatatttcacagaaaccaaacgaaagggacctattgattg

SEQ ID NO: 16097 - DNA, 2212 bp, Oryza sativa
  ref <308>: DATABASE ACCESSION NUMBER: AK066603
  ref <309>: DATABASE ENTRY DATE: 2001-12-06
gatagatccagccattccagcggcagcctctcctccgggctgcacgcgaggaggccgcaccagccactccggtagcctgcccagccaccaggcgcgcagcgcaccgccgcctcctccttcgtcccaccccctccgtcgatgcgcggccgggactcgggagccctgccgggagccgccgggaggtgtcgtcacgcggccgggagtcgggagcgccgcctgtagccattctcgcgccgccgggaggtgtcgtcgcgcggctgtgggagtctgcagccgtcgccgcgccgccgcctagtcctagctctctctccctagctcctccctccacattcccccgccgccaccaccccctctccctctctcaaatctgacgcgcgccaccacatgcttggccaccttgcctacaccaggggagaggcggcgctggcaaggctgaaggcgtacgagggcgtgccgccgccgtacgacaggaccaagcgcatggtcatccccgacgcgctcaaggttctgaggctgcagcctgggcacaagtactgcctcctcggccagctctccaaggaggttggctggaactactatggcactaaacatgcttaaaacatacagcggatctggatattaggagtatctgttggaatttggaagtctacacactatgccggttcaggctagctgtgacgggcctaaaccgtcacctctgacggattcagcccctcgtcagagattaatggtcagtgatgactctcctcacctttgacgggtgaaggcccgtcagtggtgaccagcccgtatagaacccgtcacagatatgccgtcaaaggtgtgaggatctggcgtagtgacaagaagaagaaattcgcattgacagagcaaagcattccaagaacgataataagaatgaatccttctaagcaaaatgatgaagaaaacactgaacattttttgttcaagcaaagggtataacagctccattaatgtgcatggagaaaagcaacagttcacttcatatatctgttcaagagtacttctttcggtgtatatataaaatagttccattatatgtgtatggacaaaaaaacactggtccagtaactagatccataagtatgtctgtgtcattcagatggagctctatcaaaagctctgaaggtatgaactactgtcctatttccaaatatgagcagcaatattcgttaaattgataaattttcactttaacatttctatttgtcaattggtccataccatcatggagcaccatggtttcaagatactgacaagttgaaatagggttgtctcgaccaaaatctgaatattcataaattgacaattccaagttcagtgaagttctctgattcttcacttatgtgtgaacaacagattagtagtatttttcctgagacatttgggtagattagtagtattattcctaagacatttgggtagattagtagtattattattcctgggacatatttgggtatacgacatatttcaatttataagtgctgaatgtgatagttgatctaatgcacttgcatttattccgatctcgatcaatatgcaaaattgcaaatcacatcagctcgatactcaataggtccaaatggcagtaccgttccgtgcggcaaagccacgggtacttgctagttatgtattaaaatgagtcctctcgtaatttacttttcagattttacctcagcttcatggttatgctgatggtttttttttgatcgacatgtcatatttatttactttaatttaatcatgtgccctactgcattcagctagctaatacataggagtatattgatggactactctttggaatcttggagacaatataagatgcctaggaggactacattgaggttgttgcagagtatggttggctgagttggacattgattttttttttttttgctgagttatttgtgggtggacctagtgtggacttagtgaatctagtttgctcttgtggctgcatttgttaagttaacctaggaggctaggaccttattttgatatctaggatctggtggaattgaacctagtttgcaattgtagctggatttattttgctatggtatgtactgatgtgaggatacatgtgaatgggctttgattgtatgtgattgggctttacctgtatgtgtttgggatgataaatggacttgtgctatattgaatgataattgggcctttatgtatt

SEQ ID NO: 16098 - DNA, 1950 bp, Oryza sativa
  ref <308>: DATABASE ACCESSION NUMBER: AK066604
  ref <309>: DATABASE ENTRY DATE: 2001-12-06
gatcgtctctcttccattctgcttgaactaccgcccgcgccgccgatggccgccgccgccgcggcgacgtggcgcctctggaggccctactcctccgctctcctctctcgccgggtgaacccgaggttcctccgtactacgccgtgcgtctcctaccccggcggcgccgcggcttctgcggcgccaccctcgcctccgcttgccaccacctgctccgacgattggggcggcgggatgaggtgggagtccgcgcggaagaagagggtcgtgctccgcgtaggctacgtcggcacggagtaccgaggtcttcagaagcagcgggagctcagcgcggactcgacaattgagtcagtcttggaaacagccatcttcaaggctgggggcattcttgagagtaattatgggaagctgcaaaaagttggctgggaaaggagtagtagaactgataaaggggtacattcactggccacaatgatctctctgaaaatggaaatccctgatcgagcatgggagaatgatcctgatggcattgctctttcaaacttcattaactcaaatttgccagacaatgttagagttttcagtgttttgctgctcaaaggagtttcgatgtgaggagggaatgcttgtatcgggaatacttgtatcttcttcctgctgaaataattggaattaaaggtggttgtagctctgaagaagtaatggaacacctgtcagaattcaatagcattctgaaaggttttgagggaaaccatccatttcataattacactgctcgtgccaagtataggaaagttctagcaggaaggcatcgtaaggtaaaaggggcaagctcagctgtaaattccatgcccactgaaatgagtttggaccaaagctcctctgatgacggaactacttcagaccatgatgaagaagacttgaactcttcgtcgataattggttctagtgtaccagaagacagttataaggataatcccgaattttctgagaagcaggttcagattcgagctaggtggcttcatgagcctgatgaaaatgatcgactgaatgcttcacatttcagagatatcctcacattctcctgtggagagctccagatttcatcaggaattcaatttgtggaattgactatatcaggagtatctttcatgctgcatcagatccggaagatggttggtacttcggtggcggttaagcgtggattactacccaaagatattatagcactgtctcttgcaaagttttctcgcattgtgttaccaattgccccttctgaagttttggtgcttagagataacagtttctgcctgaggaacaagcaagggactatagttcgccctgggatccaatcaatgaatgaatctgaagaagtcaagaagggggtaatggaattctacagggcagctcttgttccagagctagcaaacttcctggatgcatccatgcctccatggaaagaatgggtggagaacttggaccgattcacgagcataccagatccacagctggaggaagttaggagcgcttatagggtgtggaaagcggactacgaccgagtaaaaatggccagaaagagtgccagcagcgactaatttgttgccaagcccatcgcacagtgaatgatgggctaaataaaattcttagctgaagagaaccccatgattctatctcggatatttcttcatacaggagcaggagcagcctgactgtcgggcagagccttgttttgatcatggccagtgagccattgagactgagctattggttgatcggactactacaaccttcagatttggttcaattgaatgtttttgcttaccgttttgcctaagccaatgttatgttgtatcccggccactgcaaaatctttgcagagcaatactctgatcagttgttaaaggaaaaccgaaggtagaaacatcgttaattatctgacgatattcaggc

SEQ ID NO: 16099 - DNA, 1637 bp, Oryza sativa
  ref <308>: DATABASE ACCESSION NUMBER: AK066605
  ref <309>: DATABASE ENTRY DATE: 2001-12-06
gctcttccccctctccctcagtctgtccgtcctcctcccctcccaagctcgcccctcctcctcctcctcctcctcgatccgcttcgacgctccactcaggcactcacctccccccgtgcgacgacctcctctactgctgccgctgcgggcgcttctctccgagcctgagcggaaggtggagatgaagatggtgggcgaatcggagggggggggggggggcgctccggtcggccaccagctcaaccccgtccacctctccttgtggcggcggccccctttgccggcagcggcgacgacctcctctccatccccctcttccagtgttgggccggcacaggagcatgcggcggttggagcgggtgctgcagcggcgaacacgacggcgacgagagctgtcgtgggtggcggtggtgggctcgctgaggctcctccatccccctcctttttttgtgcagttttttctcctttttgattttgattttcccctttgttgtgattgaatctgtgatgaatcggttgcccgacaaggcgagtctgtgatgaataggctgcgaatctgtgggttgtttattgggttgatcttttttttcctcttttttatttactcttttcttgtgattgaatttgtgatgaattggctgcccgatgaggtgaatttgagacgaatcggctgggaatccatgcgtgttttattggatttcaattttgattttgttgtttactttaggctttttccccttcaatttcgtttatttttttctctagttttactgtttccaatcttaaatattgaagtgcctcatctatcttaatttgggcttgtgggcttaatgtggcaaactgaagtaggaatcggtgtggggtattttttgtgcgtgatacttgtgtgcggtgggaagaaatcggataacgcgggacgaaaaatcgctggtgaaaaggatgtgacgacaggaaaaatccgaatatttatgttagcctcggcgattttccggtagtggcctggtggtcgtcggtagggacgccatcctccgtcccccggaagagaaggaggattaagtgatgtcgtcggctttctttcgtcccacaaccttttttcaaggcagttggggatctgaaattgaatccaatcacttcttcatagccggtgaaggaggggtggcggaggccatccatatgctgcaacatatccagcggccatccatatgctgggagccacagcgtcgcctgtggtgggagaggacgccacatatcagatccagcacggatatcggcaggcactactggtgagtgtctagatcgtaaatgaaattctactactgcaaagcacatagcaatctagtgaagttgtatcccagttacatcttagacgttcctctgactgaacccgctgcaagcttcacacgagattctgcaccggcaagtggtgatgccgccggcgttgatttggctgtgctatagctaaacaataattattcattgtgattatccatgagagtatggatgtgtaatttttcgtttgtagtcagtgttgctgatgtaacaatcatcagtaaaaagataatctattgattgatattacctatgtaaccttttatctgaggagatattttgaagattgaatgtgtaatatgtatagt

SEQ ID NO: 16100 - DNA, 1667 bp, Oryza sativa
  ref <308>: DATABASE ACCESSION NUMBER: AK066606
  ref <309>: DATABASE ENTRY DATE: 2001-12-06
gaatacccaaaggaatccacccaagccgatggtggttttagccacgggtctcagtctcactcccagattctactcccgctcctccatcgtcgtcgccgcgagtttgctcctctcggcggcgccctcctcgtcgtccccgcgcgctcgtgccgctgctccggccagcgggtactccccgtggcgaggcagcattagtagaatatcatcgcacccaacagctatggctaccacacaagcctcagaagcagccactgagaaaggattgcctttggggatggatgtctccatggtggatgaatatgcttcccagtccaagctgctgcaggaattcgttaaaattcccactattggcaacgcttggatcttcaattccaagactgaaaacacatctagggcgatagtttctgttggccaaacagatctgttggcaaacaaaaagaggagcttcctattaaattcccacatctcaaaaaattcctcaaattctgtggatttccagtggtctcccttcccaatcgaaatgagtggagtttcagcagtaattccatcgccatctgggagaaaacttttactaatacggaattctgaggatgattcccctacaaaactagaagtttggggcccctgtcagttggagaacgagattcacattgcacaatctgttcatggatcactctatgtcgacgaatggtttgaagggatatcgtggaatcaagaagagactttagtagcttacgttgctgaggagcctcctcaaccgaagccagaattcaatgattcaggatacaagaaggctggctcgtctgaaaaagactgcaagagctggaagggaaaaggggattgggaagaaacttggggagaaacgtattccaagaaaaggatacctgcattgttcgtggtcaacatttcaagcggtgaagtgcgagctgtgaagggcataccgagaacattaagtgttggccaagtgatttgggctccatcatcatcacatagcctggtttttgtggcgtggtcatctgataatggttaccaaaagacaccaaggaaacttggaattaaatactgctttaacagaccttgtgctctgtatgctgttcctgatcctttcatggaagaagctgataagccatcacttaatgtcagtaagggtgaaactgcacctacaaccaagttaacatcagagttgagcagtgcttttttcccacgattcagtccagatggaaagtatcttgtgtttatctcagcaaagagtgctatagatagtggaacacacaatgcgacaaattcaatgcataagattgactggcctgcagatgggaaattggagggcctcagtgttgctgatgtggtacctattgtgatgtgccctcaggatggttgttttcctggtctgtactgctctggcatacttaggaatccatggcttactgatggacaaactatgattttatcttctatttggggaagtaaggaagtaatactttctgtaaatgttgtgagccgtgaagtttcaagagttagtcctcaggattcggattattcatggaatgttcttgcactagacaaggataatattcttgcagtttcaagcagccttattacagttcctcaaatatactatgggtctgaggtttgtcagactggaaaaccaaaccaatgggagtggc

SEQ ID NO: 16101 - DNA, 2344 bp, Oryza sativa
  ref <308>: DATABASE ACCESSION NUMBER: AK066607
  ref <309>: DATABASE ENTRY DATE: 2001-12-06
gatcgcttctcaagttctacccctgctgtggcagttgcttctgcccccgccgccgccgccagttctagggttagctcgtcggcgtccagccctctcactctccccctccgctctcacgatggcggagagcgcgaagccgacgccgcagctggagctcttcaactcgatgacgaagaagaaggagctcttcgagccgcttgtggaggggaaggtccgcatgtatgtgtgcggcgtcacgccctacgacttcagccacatcggccacgcccgcgcctacgtcgccttcgacgtcctctacaggtatcttaaattcttggggtacgaggtcgaatatgtgcgcaacttcactgatattgatgacaagttccttagttgccctcacccttggcaacttgtcattgtcatggatgcatgatgcatagagcagaaaccaggtctggaaattgaacaacaaatactggctggcttttagcacttgatacatagagcagaaaccaggtttggaaattgaaccacaaatacaggactggctattagcacttgcatggttctgttattttatattttctattcatggcaacactttgaatcaagatatatgacatatgtggtatgttctatctttctcaaaatttactctcattctgaattttgttactgatgtctgatacacttctttccctttcttttttagtgatgcggtgatttgaaaatatcttctgattttgcagattatcaaacgagcaaatgaagctggtgaaactgtaactagcttgagcagccggtttattaatgaattccttctcgatatggctcagctccagtgcttacccccaacttgtgagccacgtgtgacggatcacattgaacatattatagagttgataaccaagataatggagaatgggaaagcctatgctatggaaggagatgtttacttttcagttgatactttccctgtgtatctcagtttatctggaaggaagttagatcataatcttgctggttcgcgggttgctgtcgatacaagaaagcggaaccctgcagactttgcgctgtggaaggctgctaaggaaggcgaacctttctgggatagcccatggggccgtggtagaccaggatggcatattgaatgcagtgcaatgagtgctcattatttaggacatgtgtttgatatccatggtggagggaaagatctgatatttcctcatcatgagaatgagcttgctcagagccgggcagcttatccagaaagtgaggtcaaatgttggatgcacaatgggtttgttaacaaggatgatcagaaaatgtcaaagtcagataaaaatttcttcacaatccgagatattattgatctgtaccatcccatggctttgaggtttttcctgatgcgcacacattacagaggagatgtgaatcactctgacaaagcacttgagatagcatctgatcgtgtctactacatatatcagactttatatgactgtgaggaagtgttgtctcaatatcgtggagagaatatctctgtcccggtccctgttgaggaacaagatatggttaacaagcaccattcagaattcttggaatctatggcggatgatcttagaacaacagatgttctggatggctttactgacttgctgaaggcaattaacagcaatttgaatgattttaagaagttgcaacagaagctagagcagcaaaagaagaaacaacaacagcagaagcagcagaagcaaaagcagcagcaggcacagaaacaaccagaagaatatattcaagctatgtttgcacttgagacagaaattaaaaataaaatatctatccttggtctgatgccaccttcttccttggcagaggcactgaagcaacttaaggataaagctttgaagagagcagggttgactgaagaactgttgcaggagcaaattgagcagagaactgctgcaaggaaaaacaagcagtttgatgtgtctgaccaaatcaggaaacagctaggcagcaaaggcatagccctcatggatgaacctactggtacagtatggagaccatgcgagccagagtctgaatagtcacatgattgatttgtgctttggttaacaggtgatggtacaaactggaaaatttaaccaagcacatctgctgaattggtgtaaattgatgcagatcaacatttttttttgtaattttgtaggggtttaagttcactggccaactgaaacttgcgtttctcgtggtgtaagaagcaaaaccccatatactgatatactcgaggactcccttgttggatgttatgctttggatttgaatattgaagtcaaatcataattacatttgcatgatc

SEQ ID NO: 16102 - DNA, 3640 bp, Oryza sativa
  ref <308>: DATABASE ACCESSION NUMBER: AK066608
  ref <309>: DATABASE ENTRY DATE: 2001-12-06
gaccaccacccaacccagccaaaatggccaacgagtccatcctcgtcctcctccacctccgcctacagaaccctgaccggggtcttccccaaaaccctcgccgagtcgccgggctccgccgccgtccccatcgcgaactactcgcaggctactcctccggccatgaggggctcggatccggaccggggcggaggcgagccggacatctccaagctcttctgccactacaacgccctctacttccacgactccctcggcacctgcgccgtctcctgggccaccgacgaggatccactccccaatcggtaaagcgtcgccactccgaattctcgccgttctcggtgttatatggggggggggggggtccggtttactgaatactgcggatttaggtcttgtgtggatgttgagttgtgtgcggtggttgcaagattgctccgttcatgtcctgccactaagcatgcgtatcttagtagattcagtgcagtatgatggctttatagggggaacagcacacgagaacaatcctgttctgtaggggttctgattcggacattcggtatatgttggttcaccccgcatcaaatccactcattcatccaccagtggatcaatgccaaaaggaagtgcttaacccatatatcccttgttcgttagaactagaacatcaatcccctaaaaatgaattagggcatcaaaggggattatccatattcgggtattttgatctaaacgttcagccagaacataggtgatccatattattctacacgattatgccttgtcattatctgcagttctatctgttaacctctaaatctttgcgtcgttctcttgttcattgaccgtaaaaactacactctttgagagtatggatcaatgcctaggtctaaaccatgaaaaagtggaaagatttaatgtatgcttttggcatgctttctagaaagaaatgggaaaatagtgtaaaaacatttacttttgggaaggagtgaacaaatttatctagacagtagaatgaaaaagtcgcttgaactcttagactgattacatagacatctctgctccagttgttttgaacttcgaagacactggtatcatatctatgggcctattcattctgttcattttgttgccacgttctaccattgctattctaccaaaattggtagttctgaaagtttcccattcccactcataatgacacaaccaaaatttggaaagaaatctaacaaaacacatccaagtatccaacgctaccaaaacttgccacttcctaccctgccaaattttggtaaggttgtttttggcaccaaagtgaacaagccctatatacttcccaaatatgtttgatttgcaaatctattggtgaatgtgcatagcattttgaatggaacacagtgactgatgtattgctatgcacaattatgaagtatgtcagccacatttatggcactgtcatgtgcatatttttctagcaagcatgttcaacaagattcgtgagttgtctgtcatagtgtcatttagctcataatcgtcaactataattgactggaaatgatgctgaccatccgacccttccatattttcatcttaacactatctttttcacataaactctgtactattggataactttgtgagttattgcctataattgttttcttctatagttattctctgaaataagaaactttcatcaaagaccatagtacctgctattaccagtatgattgttttgaaactttccatttttaatcattttgatgcagtgaagtaggtggctgtgaatattatcctggtggtggtggctgtattatacttctttccagatccttgtatgaacaccacacagatttggatttaaagaatgcgctgcttcatgaaatgattcatgcttatatgtgcatcaaagatagtaatgataaccataggtactttttagtaccatgactggcctcttcttgtattacacctgaatttctgtctactttttttttctcgttttgactaatttaaaaactgtgatcaagcagtgaccatgggccaaaattccagaaactgatgaatacaatcaatttaaactctgtagccgatcctcatcgtcctcttggtggctacagcataactgtgttccatgagatcagaaagaaattttatatacacaaagtaagaacctgatctttaaaagtaaatcttattttctaatttcagattggcagctaacaatctctgtagtgtgaaagctgtggagatttgatcaagtcaaccaaaatcaaaggaccatcacaggatgactgcattgaggcaatgggtgctaatgacttgtgtgacagtttaatttgtcactggcattggtattagctatatatttctttgcattttttttgttccatgcatgccttattggtatatctctaaaggtgtgttcggaatccccagttcccaactcatccatctcgttttccgtgcgcacgcttttcaaactgtaaacagtgcgttttttacaaaaagtttctatacgaaagttgctttaaaaaatcatattgatccattttttaaaaaaagattagctaatacttaattaatcatgcgctaatgaaccgctccgttttccgtgcggaggggataggttcccatcctccattactgaacacagcctaagagtgcacataaatattcatagaaatataagctagatgtacattttaaagctaactgtgtaatttccaaaatgtgtaatttattactctctgccttgttagtgtatccttgcaatgtgggaggtaggatgtaaacctcagtttgtgatgaacaaataaatcaactattattattgttaaatttgacaaagagagatgttaaactaagaaggtaatgatgggtgtctgcttcaatatctaacattttctttgtgttgtcctgtcactttggcaattgcataatctaaaaagtggtaaatgatctgacataaatttttctttattggaggtgaaatcgacatgtccagcagccaaacaagattagtaatacctgaacaactatcatgctctttctcctccttggggtcctgggatgcaacttactctaaatttagtgtcattgagttcatggatggagtcatgatttggctttctgtattaatatatatataggcacaagaagcggtgcactggtagctatcacagagttcaaggatcatcatcaggttgtgtagagggttcaaaagaagcacctgattgcaaagttgaagaatcagcccctggaagttggcacaatgcgcatgcatcaattaagggtggaaaaggcaataagcatgaactggaagaaacctctgctgggtttcctcctgatgactctattggtatttctggaatggagtcctcttcaagagacacagctaataagaaaatcaaattgtcaaaggatattggtttggaccgtctaaccgccacaactgttcaggaagcaccgaagcgtccaagaacaacctcactaaagaagaatcaagagtgcagcagacagaagaaaagaaaaataagcaagtgggatggttcctactctgtaatcattgaatggttgaattactattctgtggatgagtcagatgaagatgaggtgcctttgataaataaaagaaccg

SEQ ID NO: 16103 - DNA, 843 bp, Oryza sativa
  ref <308>: DATABASE ACCESSION NUMBER: AK066609
  ref <309>: DATABASE ENTRY DATE: 2001-12-06
ggctatctctcgtcatctccatcctctctcgccatctctcctgtctcctcgaatcctaagccccggcggctgctgctccctccctagcggcggctgctgctcttcctccccggcgtggtggcggttgctcccctccccgtcctggtggcatctgctacgcccccctccccggctgccccctcccctccccgacgtggagccgaaggcggctcctgctgcctctccccggtgtgggagcgtggcggcagcggcggcggttgcttccctcccggcgtggtggcagcagctgccccccctccccgacattgtgttgacggtggctcctactctcccttcccggcatggtgacggcggctgtggcggctgcttccctcccccggcgtggtggtagcagctgcccgctgcctcctccttcccggctgcccctcatctccccgatgtggagccgaaggcggctcctgctgcctctccccggtgtgggagcgtggcggcagcggcggcggttgcttccctcccggcgtggtggcagcagctgccccccctccccgacatcgtgttgacggtggctcctactctcccttcccggcatggcgatggcggctgtggcggctgcttccctcccccggcgtggtggtagcagctgcccgctgccccctccttcccggctgcccctcatctccccgatgtggagccgatggcgcttctctcctccatcgcgacggtttgatttgggaatattttgaggattttgtgatttgggatgttgattcagtaaccaccgtgatgaggattaagtttcttgcgatcaaattcatgagctctagattgaatttggctttttct

SEQ ID NO: 16104 - DNA, 1505 bp, Oryza sativa
  ref <308>: DATABASE ACCESSION NUMBER: AK066610
  ref <309>: DATABASE ENTRY DATE: 2001-12-06
ggtagtgtatccaaagctcgcgccgtggaagctagctacccacttcagctaccctccaaatctggtctcctaggctgtgaatctgtgatccgcaccgcacgcaacacgcgtgcgtgggcatggacgtggaggcgaccaaggacgtgggccacgagcaggcggcggtgccggggcgtggcagggcggcgcgatggctccttgtggcgctcaactgtgggatgctggtggtgggcaccacgggcgggccgctcatcagccgcctctacttcagcaagggcggccataggcagtggctctcggcgtggctccagaccgccgggtggccgctgctgctggtgcccgtggcggcgtcctacctcagccgccgcgcgcgagaccgccgcgcgccgctgtttctcacgccgacgcgcgtgctgctggcgggcgtcgggctcgggttcctcaatggcgccgacgactttatatacgcctacggcctcgcctacctgccggtgtccacctccgccatcctcatctccacgcagctcgcgttcaccgtcttcttcgcgtgcctcatcgtgcggcagcggttcaccgcggcgacgctgaacgccgtggcgctgctcactatcggcgccgtcgtgctgggcctgcacgcgtccaaggaccgccccgccggggttaccagtgggaagtactggatgggcttcttcctcaccctcggcgccgccgcgctgtacgggctcatcctgccgctcgtcgagctcgcgtacaagcacgccgcgggaggcggccgcgccgtcacgtacgcgctggtgatggagatgcagctggtcatgggcttcttcgccaccgcgttctgcaccgtcggcatggtcgtcaacaaggacttccaggcgatcccgagggaggcgaagcagtacgagctgggtgaagcgcggtactacgtggtgctggtgttcaacgccgtcctgtgggagttcttcttcgtgggcgccgtcggcgtcatcttctgcgtgcacacgctgctcgccgggatcatcatcgccgtgttcatcccgatcacggaggtgctgggcgtcatcttcctccacgagaagttcagcagcgagaagggcgtggcgctcgtgctctcgctctggggcctcgcctcctactcctacggcgagtacgccgacgccaaggccaagaagaaagcggctttggaagctgaagaagcctcatgaatccgtgtgtatatattgcttactttgcttttgttgtgccagtggccacggatttattagtttttataggccataaagtgagctgcatctgcagcagttcaactgctcgtggagcaaaatagcagactgtgtgcacattgcactatttgtgtactgtatgtgatcgaggctgtttttgtgggtcggcgaaaacaagctacttcactgtatctgtaatgactgagtacggtgcaatgtttgttcttgtactcactttttgttcttattaatctggtcatgcatgtccatgaccaatctacc

SEQ ID NO: 16105 - DNA, 1023 bp, Oryza sativa
  ref <308>: DATABASE ACCESSION NUMBER: AK066611
  ref <309>: DATABASE ENTRY DATE: 2001-12-06
gccctcgacttgttctcccaagtaaaccacttcagtttcagagttttcgagcgagcacgttttcgtagcttccgtcgatcgaattcatggccgttcggtgttgctcttccatggcgagcgccagcgttgtcctcttcttcgtcgtcgtcggcatgtcggcgtcgatggtctccggctgcgacaggtgcgtgcgccggtccaaggccggattccgcgactcgtcgatcgcgctgaacgccggttcttgcgggtacggctccctcgccgcgtccttcaacggcggccacctcgccgccgcgagcccggcgctgttcaggggcggtgtcggctgcggcgcctgcttccaggtgcggtgcaaggacggcaagctgtgcagcacggcgggcgccaaggtggtcgtgacggacgaggcgcggtcgacgaaccgcaccgacctcgtgctgagcgccgccgcgtacgccgccatggcccgccccggcatggccgcgcagctcagaacacgccgcgccgttgacgtcgagtacaagagggtaccgtgcgagtacgcagctggtcgcaacctgtcgatacgcgtggaggagaagagccgtccgccgcgcgagctgtccatcaggttcctctaccagggtggccaaaccgacatcgtcgccgtcgacgtcgccacggtcgggtcgtcgaactggaagttcatgacgcgggactacgggccggcgtggagcacggcgcaggcgccggcggggccgctgcagttcagggtggtggtcaccggcgggtacgacgggaagtgggtgtgggccgacggcgaggtcctgccgcggcggtggacggccggacgggtgtacgacgccggcgtgcagatcgccgacgtcgcgcaggaagggtgctacccgtgcgacacgcaggagtggaagtgacacacaccgcattaacatgtacagtttttttgctttcctttcttttttctctcccctttttgggacgcattgagcagctagccatccatcgaattaagagccacagccc

SEQ ID NO: 16106 - DNA, 996 bp, Oryza sativa
  ref <308>: DATABASE ACCESSION NUMBER: AK066612
  ref <309>: DATABASE ENTRY DATE: 2001-12-06
gaaagtagcgcaggcaaggcgaggggcaaaggaggaggagggagggatggtgaagaagaagccggccggcgatgcggaggccgacgagcggcgccgcctccgctccctcgccttctctaatggcttactccagcgcggggagccggcggcgccgcgctcggctctcgcgccctccactgccgtgtcgcggctgcagggccgcgacatcgtgcgccgcggcgggcagcgcaagagccgcttcctcttctccttccccggcctcctcgcgcccgcggctgctgcctcgggcggccgcgtcggcgagctcgctgatcttggcaccaaaaatcctctgctctacctcgacttcccacaggggaggatgaagctgttggggacgcatgtgtaccccaagaacaagtatctgacactgcagatgacgtcttcgagagcctgattgttttttctgaagcctggtggattggaacaaaagaagaagaaaacccacaagaactgaaactggattttccaaaagagttccagaatactggtaggatgaggcggttgcagattctgattttaaaggtggagcaggtgcttcctgtgatgaagctgtttccatcaataaaccgccaaaggaaaccaccacaggatccctttcccctaagattgaatctgacattgattcttccgaggattcagaccttaaggacgaggataacacacaaagcactagtcaagcaccttcagttaggcagtctgctagaactgctgggaaagccttgaagtatactgagatatcatctggagacgattcatctgataatgacgatgagattgatgtccctgaggacatggatgagaagatgaagagtccagcagttaagaatgaatcccaaagtgaagacattaaacctgcagattggtctgcgcagcctatctcagctaagaaggagccactcgttcaggccactctgtctagcatgtttaaaaaagcagaagaaaaaaaagagatgt

SEQ ID NO: 16107 - DNA, 2062 bp, Oryza sativa
  ref <308>: DATABASE ACCESSION NUMBER: AK066613
  ref <309>: DATABASE ENTRY DATE: 2001-12-06
gccacgtaaccgcgcatcctcctcctcttccacctctccccaccctccctctccgctcctccgcctccgcctccgcctccgcgtgctcccgtaaccgcgccgccgcagcctccgcctccgcgcggttcctcccgcaagcggcttctccgccgcgcgcgtccgtttctctcccgatccccgccgcccgggggggtgccgtgcactcgtcgccgtcgctgggcgcctgccgtgtcggcggcggccggtgggcgagattttgtcgccgcgcgcggggcgggggcacggttggttttgaggcgagattgattgccaggttcacaatgaatacagaaggcctggattcttgtgtataggttctctcttctgagagacatcactgaaaattctcacagaatgttggagggtcaatcttgcttgatctcaaggtctttgccaagctcctgtgatcaagaatccagattagcatacatgacctaccacctccttgagataacgaggagtaagcgcatatcaagtactccgaggattgaacctgatagtgttgctgcagtagcagtactgaccaaacgacctaaatctgccaggaaccatgagtgtgagcagctggattgtcaaggcagcaatgatcagggtttttcggattcaagtaccctaataagttctatcggtcgagataactcaatcagttgcctcgcccgttgctctcgttcagattatggctccattgcatcagtcaatcggaacttccactcacttgtccgcagtggggagctttacaaggaacggcgtcagttggggattgcagaacattgggtctatttctcctgcaacgtgcaggagtgggaagcttatgacccttaccgttcacggtggatgacactcccaaagatgccacacaatgagtgtttcatgtgctcagacaaggagtcacttgcagtgggcaccgaactcctggtttttggcaaggagattctttcccacattgttctgagttacagtattctgacaaactcgtggtcgcctggtgttgatatgaatgcccctagatgcttgtttggatcagctagctttggagagaaagcaattgtagctggtggcatggatgctcaaggtcgggtgctacgctctgctgagctgtacaactctgaaactaggagatggataacactcccatgcatgaacaaggctaggcgaatgtgttctggagtctttatgaacggcaaattttacgtaattgggggaatggccagtaacacggaggtgctgacctgcggagaagagtatgatttggagaaaggtacctggagggtgatagagaacatgtctgaggggctcaacggtgcaagtggtgcacctccccttgttgctgttgttgaaaatgagttatatgctgcacaatatgcaggaaagctagtaaggaaatataacataaaggataacacatggacaacactgggagagttaccagagcggccagaagctgtgaatggctggggtattgcattccgaggatgtggagagcggctcttggtgattggtggaccaagagtgatgggaggggggatgattgagctccattcatggatcccgagggaggggccgttgcggtggaacatgatcgggagcaagccttctggtaactttgtttataactgtgctgtcatggggtgctgatttgtgccaccctcttgccgaacatactgtgaacatgaaagattgtgatattggtttcctcaaatgtcataaagcaccgattcgcctgatgggtaatctctgcctttctttttgacatttcagattttacacgtggttcaatagagtagttgtttcagtgcatgcgtcactggtcacccttaggtaaattttccacattcgatttgcagctgggaatttgtaccttgttctaccctctatcggaacaagttcccgatggatgcatttagtcgacaaactgtaattgaggcaccattgcatctgtacaattgtatgaggttctgatttggtgcctgtcgatcccattactcttttgtgcaaatgtttcttgacaggaagaacatgaatt

SEQ ID NO: 16108 - DNA, 3250 bp, Oryza sativa
  ref <308>: DATABASE ACCESSION NUMBER: AK066614
  ref <309>: DATABASE ENTRY DATE: 2001-12-06
ggtctgtcgatctgtccgtcgtcgacgacgtctcgatcgatcggtggtggtggtggtggtggccatgagtctcgtttgagaggtgagccgccggccgggccattgatgagagcggcggcgtcgtccgggcgacgcgatgtccgttgcggcggcgacgtcgtgcacgggctgttcgtgctggagacggtcgaggagaaggcggaggaggaggaggaggagcggtcctccattggcgccgactccgaggatgaacaggatgatggtgaggaggaggtggagagcaaggcgtcgtcggcggcggtggcggccgagacgtgtcggaggaagacgaagacgaagtgcggcggcggcggcggtggcgcgctcgcctgcctcgacgccctcgacgacgcgctcccaatcaagagggggctgtccaacttcttctccggcaagtcgaggtcgttcgccaacctgcaggacgtggccgccgccgccgatccccatccatcctgcgaggcgcgagcgagcagggcgccgtcgttcgtcatgctgcttccgccgcatcctgctgaaatctgtttacgatgaaagtggaggagaaaaaaagatctataacagttgcccccttcgagtgtgcttgggatgaggagtttcggttcagggagactggtcgcgggtgcatcacctttgaggcatctgcacacaatgatgttaccctggtgttccgcgaacaacctgggagccagcattatcactacaaaatggataacagtcgtcactacattgtgatcttgggcagccataggaacaaaagattgaaaattgaagtagatggaaagactgttgttgatgttgctggcattggcctatgttgctcctcgtcttttcagagctactggatcagcatctatgatggactgataagcatcgggcaaggaagacatccaaataacaacatcctgttccaatggcttgaccctgatcccaaccgaaatgttcagtatgtgggactatccagctgggacaagcatgttggatacaaaaatataagtcttatgccatcagctcctcaaaacagcatcctttggagccaaattgagtgtgcatatgttgagccggatggtgctggagggcatacaagaaaacaagaatcaaaagatggcttagaccaaagggcacttgcaaactttctagagaactgggatttctcagattctatatttgtggttggcagcgaaagaaaggttgtcccagctcacaaagttgtcttgggttcttgtggtgatttcccttttaacctgatgatgagtcgaccagctattgagcttccatctgtctcctacccagttctgcactcccttcttgagtacatctacacaggttctacgcagatttcggaatggcaactggtttcactgctggagttgagttcacaatttaaagttaaaccattggtaatgtattgtgaagaaattattggctgtttgaagatgagtgatgcagtttctgagtctagcaaaaaaatacagttatcaagtggtggttctcaagctcatcaattttattatttccctttcaaagctccattaaatacacagaaaattgaacagttccttgtaaatggtgagcacagtgatgtaaatatctatgtaaatggacatggtcttgttactcatgctcacaaactcatccttagcttgtggagcatgacatttgacaagatgttcacaaatggaatgaaagaaagcagtgcttcaaatgtatttttcgaagatgttcccgtcgaagcattctttctcctcatccaatttatgtacagtggggaacttaaggtggatatcgaggaaatcacaccagtgttggttgagctgctcctattgtcagaccagtttgggatcacggctcttcagtttgaatgctgtaaaagaattatcgaattcctctcaaaggacacagtatgttcagttctacgagcagtttcgtcaattccatcttgtaaactgcttgaagaaatgtgcaagaggaattttgcagaacactttgattattgcacaactgcttgcacagactttgtgttgttggatgaggcaacatttaaggatattcttcagcatgggcatatgactgtaacatcagaagagagggttctggatgccatattaacatggtgcatggaggcttgtgactgttttaactggacctctgtgcacgagctcttaagcacttcaagaccagagaaactctttggagggaggctcactgccatcaatactttgctaccatttgtgcggttccctttagtgcaaccatctgtccttcacctgatggagaaaagtaatctagcaaaaaacatagaagcgttcagacagttggttgcagaagccattgagttctctaatgcgggactacggatggcaacaaatacatgtgagagatttcatcatagacgctccagctataaagagcttcagtatatttcggatggtgataacaatggtgttatctactatgccggtacatcatttggtaaacaccaatggatcaaccctgttttagccaagaatattacagtgacagcgagcagcccaaattccaggtacacggatccaaaggctttggtttcaaaaaattaccaggcgacttgttttgctgggcctcgtcttgaagatggcaagatgtgttcttggtggatggtagacattggaccggatcaccagcttatgtgcaactactacacggtgaggcaggatggctccgcgaccttcatgaggtcgtgggttcttcagggatcaatggacggccgtagctggactagcctgcatgtccacgaagacgaccagaccatctgccagcctggccagttcgcgtcgtggccgatcaccggccagacggcgttgctgccgtttcggttcttccgggtcatgctgacggccccggcgaccggcgtctccaacacctggaatctctgcatctgcttcctcgagctctatggctacttccggtgattgggacagctttgctgcacacccctgagaagagatcggcagtgagcaatgatctagctaggtggctctgtaatccggtgtgttcatatctgcactagtaaagaacttttcgttttagtttgctttggtcactttggttttttttttttctttgcggtataattaccatagaaaaagtgaataatgcttatacgtccttgtaatacacatgtgtcatctgtaagttggtacaaaaccgtgattacacgaggaatgcttggacg

SEQ ID NO: 16109 - DNA, 2252 bp, Oryza sativa
  ref <308>: DATABASE ACCESSION NUMBER: AK066615
  ref <309>: DATABASE ENTRY DATE: 2001-12-06
gatctatctgtaccggattatcctaatcgcgtttactaaactccgctaaaatctcttgtattcccacaaaatttccccaaaattttttactaaaacttttttctcaagatagaaaaaactatatatccttttggtttgcaaaggttttactaggttatttgcccccctcttctagaacgcatccagaattcgtggactctgcgacccaactcacacggcgaagcacacagaattttttttcccaaatccatttattttcctctcttctctctctcgaatcgaatcgaatcgcctcgcctcctttgttgaattgaatccaagctcgattcgccgccgccgcacgccgccatgggcaactgctgcggcacgccggcgacggcggaggagggcgggaagaggaggaggagggggaagcagaagaaggcgaaccccttcaccgtcgcgtacaaccgcgcgccgtcgtcggcgggggcggcggcggggaggcccgggctgatggtgctgcgggacccgacggggcgggacctcggcgcgcggtacgagctcggcggcgagctggggcgcggcgagttcgggatcacgtacctgtgcacggaggcggagacgggggacaggtacgcgtgcaagtcgatatcgaagcggaagctgcggacgccggtggacgtggaggacgtgcggcgcgaggtggagatcatgcgccacatgccgtcgcatccgaacatcgtcagcctccgcgccgcctacgaggacgaggacaacgtgcacctcgtcatggagctctgcgagggcggcgagctcttcgacaggatcgtcgcgcggggccactacaccgagcgcgccgccgccgccgtcacgcgcaccatcgtcgaggtggttcagatgtgccacaggcatggtgtcatgcaccgcgaccttaaaccagaaaacttcctatatgctaacaagaaggatagttctcctctgaaggcaattgattttgggctatctgtgttcttcaggcctggtgagcggttcactgaaattgtaggcagtccatattacatggctccagaggttttaaagcgacactatggccctgaagttgatgtctggagtgcaggagtgatactttacatacttctttgcggtgtaccaccattttgggcagaaaccgagcagggagtagcgcaggcaattatacgctctgtggtagatttcaaaagagaaccatggcccagggtatctgagccagctaaagatcttgttaagcggatgttggacccaaatcccatgacaaggcttactgcagaacaagtacttgaacatccatggttacatgattctaaaaagatgcctgacattcctcttggtgatgctgtccgagctagactgcagcaatttgctgcgatgaacaagttaaagaagaaagcccttaaggtcattgctgagcatttgtctgcagaggaagcagctgacataaaggacatgtttgataaaatggatgtgagcaagaatggccagctgacctttgaggatttcaaggctggcatacgtaaacttgggaatcagatgcctgattcagatcttaagatattgatggatgctgctgatattgacaaaaatgggatcctggactatcaagaatttgttgctgtgtctatccatgtgaggaaaataggcaatgatgaacatatccagaaggctttctcatattttgaccaaaataagagtggttacatagaaattgaagagcttagagaggccttggttgatgaaatagatggcaatgatgaagacattattaatagcatcatccgtgatgtagatacagacaaggatgggaaaataagctacgacgagtttgccgtcatgatgaaggccggcactgactggaggaaggcatctaggcagtactcaagacaaaggttcagtaacctcagtctgaagcttcaaaaggacggatccatcagtgacgacacgcaatagactggacagagaaaaaaactacgcttacgttttttctttgctgtgtgctggctgttacattattttttcacacagtaacttagtggctttgtatagatagcatttgtggttttgtgcttaccagcagcgattatatttgtcagtcaggcggcagatatgtatgtacccaaaagagggcgggatggggaagcagatggtgtgcttacagtttactagaccagaattattggtacaattgtttgtagttttgtacgtaccataatacaagcggcgtgaaattctcaact

SEQ ID NO: 16110 - DNA, 3051 bp, Oryza sativa
  ref <308>: DATABASE ACCESSION NUMBER: AK066616
  ref <309>: DATABASE ENTRY DATE: 2001-12-06
gaatcaggtcttcgtcttcttcttcctcatccccgtgccaataccgatttcgcgagctccgatggattccgcgagagaggagacgtcgccatgagaggggaagccgagctgtgcgtgtagctcgctgcaatcgctgcgccggtcaagaaaccagccggaatcggcggctgatttcggtggaggaagatgcggcggaaggcggccggagatgctgctctggtaggcggctgcttcttgctgctcctccaccctctcctctcccatggcgcggacatgccgttgggctcctccctctcgccggcgaaccaggcgttgtggtcgtctcccaacaacaccttctccctctccttcacggcgtccccgacctcgccgtccctcttcgtcgccgccatcacctacgccggcggggtgcccgtgtggacggccggcaacggcgcgaccgttgactccggtggcgcgctccgcctctcgtccagcggcgacctccagctcgtcaacggctccggcgccgtggtctggtcatcgaacaccggcgggcagggggtcaccaccgccgcgctgcaggagagcggcaacctcctgctcaggaactcgtcggcgacgttgtggcaatcgttcgaacaccccacggacacggtggtgatggggcagaacttcacctccggcatgaacctcacctcggcgagctaccaattctccctcgaccggaacaccggcaacctcaccctcaagtggaccggcggcggcacggtcacctacttcaacgaggggtacaacaccaccttcacggcgaacaagacgctgagctcgccgacgctggcgatgcaaaccaacggtatcgtctccctcaccgacggctcgctcacctctcccgtcgtcgtcgcgtacagcagcaactacggcgagagcggcgacatgctgaggttcgtgcgcctagacacggacggcaacttccgcgcctacagcgcggcgcgcggcagcaacgcgccgacggagcagtggtcggcggtggcggaccagtgccaggtgttcggctactgcggcaacatgggcgtgtgcggctacaacggcacgtcgccggtgtgccggtgcccgtcggagaacttccagctgagcaacccggccgacccgcgcggcggctgccggcgcaagatcgagctccagaactgcccgggcaactccaccatgctccagctcgacaacacgcagttcctgacctacccgccggagatcacgacggagcagttcttcgtcggcatcaccggctgccgcctcaactgcctctccggcagctcgtgcgtcgcctccacggcgctctccgacggctcgggcctctgcttcctcaaggtgtccaacttcgtcagcgggtaccagtccgcggcgctgcccagcacgtcgttcgtcaaggtctgcttcccggggatccccaacccgcccctcggcggcggcgggtcgccgtcgggcagggcgtcgggcgtccgcgggtgggtggtcgcggtggtggtgctcggcgcggtgtccgggctggtgctgtgcgagtgggcgctgtggtgggtgttctgccggcacagccccaagtacggcgcggcgtcggcgcagtacgcgctgctggagtacgcgtccggcgcgccggtgcagttctcgtaccgggagctgcagcgatcgaccaaggggttcaaggagaagctgggcgccggcgggttcggcgccgtgtaccgcggcgtgctggcgaaccggacggtggtggcggtgaagcagctggaggggatcgagcagggggagaagcagttcaggatggaggtggccaccatcagcagcacgcaccacctcaacctcgtccgcctcatcggcttctgctccgaggggcgccaccgcctgctcgtctacgagttcatgaagaacggctccctcgacgccttcctcttcgccgacgcgccgggcggcaggatgccgtggccgacgcggttcgccgtcgccgtcggcaccgcccgcggcatcacctacctccacgaggagtgccgcgactgcatcgtccactgcgacatcaagcccgagaacatcctcctcgacgagcaccacaacgccaaggtctccgacttcggcctcgccaagctcgtcaaccccaaggatcaccgccaccggacgctcaccagcgtgcgcgggacgaggggctacctcgcgccggagtggctcgccaacctccccatcacggccaagtccgacgtctacagctacggcatggtgctgctcgagctcgtcagcggccaccgcaacttcgacgtgtcggaggagaccggccggaagaagtactccgtgtgggcgtacgaggagtacgagaaggggaacatcgccgccattgtcgacaagaagctccccggggaggacatcgacatggtccaggtggagcgcgcgctgcaggtgagcttctggtgcatccaggagcagccggcgcagcggccgtcgatggggaaggtggtgcagatgctggaagggatcatggatctcgagaggccgccgccgcccaagtcgtcgggcagcttcttgagcctgacgtcggcgaccaccgccaccggtgtcagcggcagcggcagcaccagcatggtctccacgtttacttcctcggcggcgccgccggcgcccacgccgtcgccgaacgtcgacgaggtccagcaggagatggccgtgggacgctcggcgtcggccaggatccgcgaccgggcgtctcgttcgctgctggggcaggagccatacatgacaatgtaaaacttcatcttctcatgaggtgaatagcaaaatgattttgctttttttttttgctccagtaaatgggaaaattgctctggttagtgagcaattagggagttgatctggttgattttgttttggtggaacatagaagcagctgtcggtggaagagaagtgcttttcactgatggtgagcaatttcgtacttctacttgagaggatatctatgtgcctgatgagctgaattctgcaatttgtaagtacagattagatcaaactcaatggtatattcgcgttgtaacttgt

SEQ ID NO: 16111 - DNA, 2553 bp, Oryza sativa
  ref <308>: DATABASE ACCESSION NUMBER: AK066617
  ref <309>: DATABASE ENTRY DATE: 2001-12-06
gatggagccatggacacgttgctcatgctgcttaactgaatcaggttcccttccctctgcttgcttcacgaactcgcggaaatcccgtcccctcccaaaatctcaccaacgagtccaccccaaatccatccacgaatctcttcctcactccaactgcctccctccgccgtcaaaatccaatctttcctctcacctccgccgctttcggcacgccccttcaaccccaagatcgatactctctccaccaatccgatccaatccgcagctgggttccacgaattgcaaaggtctaggcgcggattggagcatggggctccgatcccccaactcgatgctgtggctagtactactggtgtgggcggcgctgctgtgcggtagctgccatgggaggttcgtggtggagaagaacagcctcaaggtgacgtcgcccagcgacatgaagggcacctacgagtgcgccattggcaacttcggcgtgccccagtacggcggcaccatggtcggcgtcgtcgcctaccccaaggccaacaagaaggcctgcaagagcttcgacgattttgacatctcctacaaggccaaaccgggctcactccccaccttcctcctcgtcgataggggagattgctttttcacaaagaaggcatggaatgcacaaaacgcaggagcagcagccatccttgttgctgatgacaagactgaacccctgattacaatggacacgcctgaagagagtggaaatacagactatttagagaatatcaccattccttctgcgctgataaccaagagctttggggacaagctcaagaaagcaattgataatggtgacatggttaatgtgaatttggattggagggagtccctgcctcaccctgatgagcgtgttgagtacgaattttggactaacagtaatgatgagtgtggccctaaatgtgatagccagattgattttgtcaagagcttcaaaggagcagcacaggtacttgagaagaagggatacacacagttcactcctcattacattacctggtattgcccagattccttcattctaagcaagcagtgcaagtcccagtgtatcaaccatgggagatattgtgcacctgacccggaacaggatttcagcaaagggtatgatgggaaagatgtggtagtccagaatttacgtcaagtctgtgtttataaagttgctaaggagcatggaaaaccttggctgtggtgggactacgtgacagattttgcaatccggtgcccaatgaaggaaaagaagtacaccaaggaatgcgctgatggagttatcaagtcacttggtcttgatcacaaagccatagataagtgcattgctgatccagatgctgataaagaaaatcctgtgctgaaagctgaacaggatgcacagattggcaagggctctcgtggtgatgttaccatcttaccgactcttgtaatcaacaatagacaatacagagggaaacttgataaaggagcggttcttaaggcaatttgtgctggttttcgagaaaccactgaaccagctgtttgcttgagtgaagatatacaaacaaatgagtgcttggagaacaatggtggctgttggcaagacaaggctgctaacatctctgcatgcaaggacacttttcgtggaagagtttgtgaatgtccagttgtgaaaggtgttaaatttgttggtgatggctacactcactgtgaagcttcgggatctggccattgtgaaattaacaatggagggtgctggaaggattccaggcatggccggacatattctgcctgcacgaatgatggttgtaaatgtccggatgggttcaaaggtgatggagtccacaaatgcgaagatattgatgaatgcaaggaaaggactgcatgccagtgcaaggaatgtaaatgcaagaacacatggggaagctatgagtgcggttgcagtggcggcttgctttatatgaaggagcatgatacatgcataagcaaaaatgcagcaacagaggtaggatggaacttcttgtgggtgatcttctttggcctagtggtagccggcattgcaggatacgcagtatacaagtacaggatccggaggtacatggattcagagatccgcgccatcatggcccagtacatgcccctggacaaccaaggagatgttcccaatcattctcaccatatcgagctatgaaaagagtgaggatagcatgcaacttccccccatgttgcccaaatgggatgagaagaggtgaacaactcctggagatcatgacacagcctgacgatatgtgtagtagtatcactctgacgatcttatgtttagcaaatttagcccatgtaaatttctggattatcctgtggccgcataatttcaatcgtacctggctgctttgctcccatatagcgctggggaaatatggagattgcaaaattaggcaagtttgtgatctcgaggaagaacactagtatggcatttcccaccaaaaaagactagtttggaaagcatgaattttgtatagaattttcgtgtgaatcagttttgcttggttcttgcgg

SEQ ID NO: 16112 - DNA, 1551 bp, Oryza sativa
  ref <308>: DATABASE ACCESSION NUMBER: AK066618
  ref <309>: DATABASE ENTRY DATE: 2001-12-06
gtcctctcctccccctcgacctccccgccgcgccaccacctcctcctcctccaagctctccaccccacgcactccggaagcttctagaacctccggcctccccttcccccgggggaaccttctcgcctcccgccgccatgcagagcgccgcggcggcgttcggcctcgtccggccgtgccccgcgcggccgccgctccagctgggccccggcagcagtagctgtcgtcccatcctgctccatgcccggcccctcgccgccggcatcgcctcctcttcgcgagggcccgccgccgtggcggcgcggtcgcttgggcggctgctgctgctgccgccgccgccgccgatctcgccggaccgggcggggagggggagggcgcgccacgtggcgtgcggcgcggcggccggggacgccaaggcggaggaggaggaaagcggcctcgccaagacgctgcagctcggcgcgctgttcgggctgtggtacctcttcaacatctacttcaacatctacaacaagcaggtcctgaaggttttcccatatccaataaacattacaacagttcaatttgctgttggtactgtcgttgctttgttcatgtggatcactggtatccttaggagaccaaagatttctggtgcacagctctttgccatccttcctctagctgtggtccatactatgggcaatcttttcactaacatgagcctggggaaggttgctgtgtcattcacacataccatcaaagctatggaacctttcttttctgttctcctctctgcaattttccttggcgagttgcctacagtttgggtgatactttcacttcttccgattgttggtggtgtagcatttggcatctcttactgaggcttccttcaactgggctgggttttggagtgcaatggcttcaaatgtcaccttccagtcaaggaatgtgctgagcaagaaactcatggttaaaaaggaggaatctcttgacaacattaatcttttctcaatcataactgtgatgtcatttttccttttggcccctgttgccttcctaacagaaggcatcaaaatcactcctacagttttgcaatctgctggtctgaatgtaaaacaggtgcttacaaggtctttacttgctgcactttgtttccacgcgtaccaacaggtgtcctacatgatcctcgcgagggtgtctcctgtcactcactccgtgggcaactgtgttaagcgtgtcgtggtcatcgtaacatcggttttgttcttcaggactcctgtttctcctatcaactccctcggcactgccatcgcacttgccggagttttcctgtactcacaactgaagagactgaagcccaagcccaaggctgcgtaactgaagcatgcagttgccatcttattgtagcagtctttccaagatgaattgtcgtagcacacgtttggaaatttatagtgcatttagtgtagagggaagctgaacatgttcacgttgaagctaagtgtagtaggatcatgtatgtggtctaactcttacagttaaagcagggttttgaagtacatgagc

SEQ ID NO: 16113 - DNA, 3405 bp, Oryza sativa
  ref <308>: DATABASE ACCESSION NUMBER: AK066619
  ref <309>: DATABASE ENTRY DATE: 2001-12-06
gatttgttccaaaccagtggaaagctagggttccgctgactcgcgagtggagggcgctgctcgtcgccaggctcgtcgcgccgtcctcgccggcgggagggccggtcgtccgtcagcatcctctcttccgttggtcatcctccctctctttcgctagccgccatcgctctcttccactggttcgctctctccgtcaagccgtttggtttcgccggctctctgctacgcccctctctttcgtcgactctctccgttgagctctctggtaagggctaggttgggcatctccttccctttctcacctccttcagtttcttctcctctcttcctttgatttcagccgatttgtttggattagaccgtgtccccttcataaatatgctagatctactccattatctaaaaaaaatgctagatctactaaaagctgatatctttcttggttgatttcgatggaatgaaatgtctagtggcttgcttttttgttctaagatggccaatgatgactaatgttgctgatttgtgatgcttatgaacagatttttcctacacttattcctattttcctgttgatttgtgttatgccattgtatctttggctacaaatagaagttactgataaggccagattcaatagtgcgttcttttaaattgatactgacagatacacacttgattaatagtgcttatttgtgatgcataagaacatatatgcctgcacttgaccttattcgataaggtcaggcaaccaaacatgccctttctaagtttgtctttctgtgatctttctcagtattttatagttgaaattatctttagcagaactgaggccacctctacacttgaactgagcagaatttataagagtacatgaacagatttttctacacttgttcttttttcttgctgttaggctgggaaagatggccaatgatgatatatgctgctgtttgtgattcatgtgaatagatttttgctctacacttgttctcattttcttgcggtttcttttttcctacacttggtcttattttccttttccttataccttttcttttgctacatttgatagatactactggtaagaacagataccaatgatagtagctaattcacattcttcatatatctgaggccattgttctgcatttatttacctgttggaaatgaggctcaatgatgtcaaatttctgcacatatttgctacattttcgagttattgatgtcaggcaaatactatcaagttccttgttcatcttttgatatcaacagatgtactcactttttttaggtaaccacacttgattttgacatgatcaagtttttatatgaaaccgatacactctgcacttgctcttttggtaaagatcatactactattaagtgttgatgctcttgcaacctgatctctgcaactcagatcctgtactatttcaaaggtacatgttatccttttacttttactatgtttcaggaaaatgtgataatggaaaaacttgtgagatcaagtgtagatatactaaggttgatgagtttgaagaacatagctgaaacagatggtttagttttgtatgcggttactaatttgtttatcaaattggttactgtaaaaaatttgccatgagcacgtatatttgtatgtttgttttgaattgtcaaatgtaccagtgtcgtcaataaaattatgtacatgatttttgctagaataatcactcttgcgtgttcatccaggccatttcgttacatttgataaaaaaaatgatcatcagtgctgctcattggttttaaaaaatgacaacatcagtaaagcatacatacccagtacatcgattctctaagagaaaaatgagcttaggaatattagtaggtgggcacagacccagagtaacataatttaatctatatatctacgatggattaaacttatcacacataaatagattagggactaggaaaaaatctcgtttcacaaactttatggggtaacctaaccacccacaagaataggtatttacacataagatgtatccatccaaccaaacaacatctcctgcatgctaccattccatccgccccttgctgcaaccaaccaaacagcatctcatcatatccaggttcatctcatccaagcaaccaaacacctacatgtgtatcctctaaaccaggctaaacttagcctggatgagggagatgggccaggctagagggatacgagcaaccaaacatacccttactgcataatcttcaccttctgtaaaccctctcactgagcaattggatatagggagtaagtggaaatggatgcagatggtagctccaagaaaggccctccaggtcgtcgcactagaaagaagctgaagttcaagccaaaagtgccaccacaaaagccaagaaaatcagttccagaaaagccaaacctggaacagtcaaagccaattgatgaagaattgatgaagagactgaagactggccaaggagctacaaaaacattgtcaagtataaaagatgaacactcaacacagaacccaccctcaactgtttcttctgcagctagtgttagcttaacactgccacagtcaggagggcacaaccaaggccaactggaagaagaagccattccacatcacaagagcggttcctcttgatgctattccaggatttttatacgacgatgaggatgatgatgacgacgacgacgatgagggcgataacaatgttgaattagaggagattcgaccaagttcaactgaatgtgaatcttccatccatccagcagaagagctgaatttactcgagcaaggtgacacgagaagaatgctcctattccagttgccaaaatctcttccgttgccaagaatatccgctgcagttgaaaggaatggaaaagccagggacaaggaggtgaaagaaggatccaacttgaaagaattgccacaaggatatttgggcaaaatggtggtgtacaagagcggcaagatcaagatgaagttgggggatgtcatgtttgatgtgaacccaggagaagagtgtaggatggcacaacatgtggctgctatcaacaccaaagagaagcattgttgtttacttggcgagatcgagagccggcatgtcgttgtgactccagatgtggactcgctgctgttgaatgacaatagaggttaggtaattacgtgtgcataagtgcattggtcagctgtgagctacagtcctgcaatgacttgccagattagtgtgcatagctagcaatgtgcattttaactgtatttgtagcggttgtaaaattgtgtgcctttagaagatttgctgcttgtagtaaatgaatacttagcttagattgtacttatggtagtattgttgatgtgtcatgttatgatttttatggagatctcactaaagcttttatcg

SEQ ID NO: 16114 - DNA, 1575 bp, Oryza sativa
  ref <308>: DATABASE ACCESSION NUMBER: AK066620
  ref <309>: DATABASE ENTRY DATE: 2001-12-06
gctcgcctcgaaaccaaccaaccttcaacctaaccccgcaagcaaacgccctgaccgactaaccctcgccaccgagcaaactcgagacccaaagccacgcaactttctttgtgttctttgatttgttcttggcaatcgcatcagagatctattgattgattttgaagcagaggaggagcagagaggtagacgaagagctgcaagattctttgcctgttcaatcgaccgtgctttgtgagagcatacgacggcggcggcggcgagggcgcggcgtctcacctgccccgacggcacggcgaccgaggaggggaggccggcgacgagatgggctccttgccgctgaggagtggtagcagcctgcctccaccgtccttctccaagtcgccggcctcgctgctgctgctgtccaagtcgctcaccctctactgctgagagagctcgagctcgagctcgagagctcatgggcggtgtcacctcgtcgtcggcggggggaggcggaggaggggagaccgcgctgggggacctgccggagagctgcgtggcggaggtgctgcgcaggctggacccgccggagatctgccggatggcgcggctcagccgcacgttccacggcgtctgggaggccaagctgccgcgcaactacgcgcgcctcctcgccgtcgccgccgacggggaagccgccgcgctggaggcgatccccaagaaggaggtctacgcgcgcctctgccgccggaaccgattggacggcggcaccaaggagttttggctggacaagggtggtggaggtgtctgcatgacaatctcttcaagggcactttcaataactggcattgatgataggagatattggaatttcattccaaatgatgagtcaaggtttcatgcggttgcttatctctcacaaatttggtggtttgaggtcagaggggaggttgaattctgcttcccagaaggtacatatagcctatttttccgtcttcatctaggcaggccactcaagcgactaggacgacgggtttatagctccgagcacatccatggctgggatataaaaccagtgcgcttccagctatcaacttctgatggacagcaagctcagtccaagtgctacttaactgatcctggtgtctggatcaatcaccacgtcggcgatttcgtcgtgaagagctctaatgaactagtgaagatccaatttgcaatggttcaaatagattgcacacacacaaaaggtggactctgtgtcgattccgtggctgtaaaaccacaatacctcgcgaagaagaaagcatctcggatatatgtgtaggttcttcgatcaagttcagctgattctcatcgataccgcatagctttgtttttatgcaccacttgtgtgcttgcttttgagttttttacagatcctgtaatatgtagttcatggggtaagtgatttttatttcctcttgtccctctagaagcatgttacacttgtaaattgttaatttagcatacagatagcttttgtggctcatgatccttgacaccctgtgcaccaatgttgttcttctggtagtgtatcaaaagctttcatggagc

SEQ ID NO: 16115 - DNA, 3042 bp, Oryza sativa
  ref <308>: DATABASE ACCESSION NUMBER: AK066621
  ref <309>: DATABASE ENTRY DATE: 2001-12-06
gggttcccattctccccttcgaattcgccgcttccccagtctccctcccatccaagatccaacagggccttgtagtggcgtcgccgctccgtcgacggaagctcagatgaggccaccgccatggccttctcctcccccggtctacggtcgccccaccatcgccctccctctctcgtccacggtcccagatgccgccatcctcacccttcctccgctcggcgccagagcatcgcacacggcttcctcggtggcggagtggaggggaagcaaagatataatggccagctccggtggccgaccctcctcgctttgtggagtttggccgacgctgctccttcccgctgttgtggccacttagatctgtgcaggatttgcgcattcggatcttcaatgttttggcagatgagcaatacttatattttctgaatcttctggttggtcccgtcatcagagcattcggtggcggaaggaagaatagaagggttattagtatatggcagctaggctggaaatcatccggtgaagcaaacagcttggtgaagggattgatgttcaagctgatgacaacaatactactgatcccattgtcactgctcgtccttcatcctttgttggttttatactggtgcatcatagttccagcaacacgcttgagtcaacaggattatggtcagggtgacggcgactcctccaaagccaacctgaagccagcaatgatgatcttctactctctagccctggctcagggtactctctacatgctatggttcattctcaacgcagggaatgcgatgatggttagggttgtggccagtaaatgcgattttgaaaagagttggggtcggaagtcggttgatcagtacctctctgataccaagttcaagtgcctcaaggacccatcatccatcaaggacatgaacctaatcaagtttgcagcaggtctacttgactcggactccgaggatgactacattacgggagcaaggatgcttgtttccttcattcagaagcaaaagctaccggtgaagttgctgatcctctaggatcaggacacagaagctgatcacaatgctggggtggacagatccagctgaccgggagatcaggatgcttgctgcgataatcgtggggcatgttgctagcaacatcaacctttcacagttcccaggagcactgcaatccatcggttcactactagacccccgcgatgacttatctttctatgaccaggatgatcaacatgaccatgacaaaggcatggggcgatgccagctgcttgtgcaaggccttttggttattgagaggcttacttgtgatcataacaattgcatactaatctgcagagaccattgtctgctcagccatatccgctacgcaatcaggttgagaaagaaggtaacctttccggacatgtgccctgtgtggcccgagatgctcaagggctcgcttagagcgatggcctatttgatagccggtgttactgaagtagaactcgagacgcttgaatctatcttcaatgaactcccactagggatgatcatgggacacaaacggttcccagacataatgataccaaccattgcattgtacgcaaatttattatactaccgggacactacatttcctagcgaacacttctttgaaacgatgctgccagtcttcctatcttgtactgatattgaacaaggagaagaaatcacgtcagtatggaccaaggttggagtgttggcaggggcatcactcgcgaagctcttgcttaaatcagaagactcagttagtcgagatgatatcatgaagggtgagcaggtctttgatgggctcactaagctgctaactgcaccgaacacaacaatcagagaaattgcggcagaaatcttgcagcatgtgtactttcatgattatacgcatagactgagtctcacggaaaagttagtcgccgaactattccgtaccaatagtcaaatgggaacacaagctcagagtggtgcacttgcaatcacagtggaagcagaacacgatggagtgaaacaattcctaggtgataatgcccaaactagcagcctgaacagactggagcatgaggagcaatcaaactacacagaactgcagacaaccttactacacgtccttgcgtctacgactgaacatggaactgattgtttggcaaatgtgattcagaaaattgcacctggggacggtctcagcagatttgtggggatgctcaagtcgttggttgaaaagcacagcagagtcgttactgaagatggcctgataatcataaaggctaccgcctggctgatcatgtggatgttgaggagaagtgagttcgttcaggaaatcaggcaacagaagatcgtcgaggcactgcctgaggctacaaaaattgtttcccgtacatctctaacaaagaagaaacaacccgcatctgatctcgacatctggaagctcttgggttacaatatatattataaacggttcgcgagtaatatccggcttagcagtcgattgtctagtcttgtggaagatgcacaggacgaacttgttcgtcaacaagaagttaccgtacaagtggagtgatggacaggcggcatgcttatggattacgcgtgctagctgctagatcgattcatcttccgtttgccaaattaatcagcattgccgttgcattcgtggcgaacgcaccagcaaaccaacaacctagtagtattgttttcttttgtatatgttgaatcagagccatgccatgggcagccctgtagccgtccaaacagcccgagcaaacatattgttattttagtccctattgggatttgctatacatcaccagcgtgttcttttctgtaagtcggattgggatcaggtgcagtcactatagtgacttcaactttggatccaaccatctagctgataacgaacgtgcaggattcagttctgtattcttcttttcccctcaaaaaaattgtgtattcttctttagctgtttgaacatgaaatacttgcatgcttatttttcatttgagaagaagcttgatactactattt

SEQ ID NO: 16116 - DNA, 1641 bp, Oryza sativa
  ref <308>: DATABASE ACCESSION NUMBER: AK066622
  ref <309>: DATABASE ENTRY DATE: 2001-12-06
gcccctccacttctccttctcctgcgccgcctcatcttatctcgccaatcccccttcgtcgcgcgcgcaaggctaaaccctagctcctccgcggctccgcccccaccgcctaaaccctagttcggagagttgcgtgcgggcgtggtgcgggaggatggccgagccctccaaggtgatccacatacggaacgtcgggcatgagatctccgagagcgaactgctccaggtggtgcagccgttcggcactgtcgccaagctcgtcatgctgcgtgctaagaaccaggctctcgtccagatggaggatttagcttctgctgtgaatgtgatccaatactacaatacaattcaacccagtgtaaggggaagaaatgtttacttgcaatattcatcccaccaagaattgactactgatcagagctctcatggacgaaatcctgatcaggctttcaaaccctcatacaatatcagtcacgtcaaagtgcaatacaagcttatggtgctttacatggacggaacatatatgatggttgctgccagctagacattcaatattctaatctcagcgaattgcaagttcactacaacaacgatagatctagagatttcacaaatccatctttgcctacagaacaacgctcaagatcatctcagcctagttataatgatccaagcagtttgtttggtttccagcaacctggagatccgtatgcacagatgagtaaggcagcaatgatcgctgctgcttttggtggaacattgcctcctggagtgtctggcatcaatgaccgttgcacacttctagttagcaatctgaacactgataaaattgatgaggataagctcttcaaccttttctcaatgtatgggaatatcgtgcgtatcaagatactcaaaaataaaccagatcatgccctcatccagatggctgacgggcttcaggctgagcttgctgtactgtatttaaagggagcaatgctattcggaaagaagcttgaagtgaactactccaagtacccaaccgttactgctgatccagatgcacgtgactactcaacttctcacctcaacagatttaacagcaatgtggtgaagaactaccgccactgttgcgccccaaccaagatgatccacatctcagcgcttccacaggacataactgaagataccatccattcccttgttggtgagcatgggactatcgccaactcaagactgttcgagacgaacggcaaaacgcaggcccttgtgctgtttgaaagcgtggaagaggcaacagaggcgctcgtggagaagcacgcaagcaagctggaccgaaccaacatcaggatttccttctcacagatgcagaatatatagttctttcctgggaattgtgaggagccaaagctataagcttaccttaacttttggatttcgtgcacttagcttgcatgaaccgatatatgtttcacctttgcccaaaaagtggtgtgaactgtctttcatgtatggatggatggatcagttaaacccgtgttctctgttatgtgatgccccctcttatgcaattcagcatggatatgttaaacctgtgctcgtatgccctaaaaatggtgtacactttcttaatgaatatatatcactgcagtggtttgacgatcg

SEQ ID NO: 16117 - DNA, 1102 bp, Oryza sativa
  ref <308>: DATABASE ACCESSION NUMBER: AK066623
  ref <309>: DATABASE ENTRY DATE: 2001-12-06
atgagggccctgcaggacttggtccccaacacaaacaagacagacagggcagctatgctagacgaaatccttgattatgtgaagtttcttcggcttcaagtaaaggttctgagtatgagcaggctgggtggtgctggtgcagttgcgcagctggttgctgatattccaatctcagttaagggggaggcaagtgacagtgggagcaaacaacagatttgggaaaagtggtcaaccgatggcacagaaaagcaggtagcgaagctgatggaagaagacatcggagcagcaatgcaattcctccaatccaaagcactatgcatgatgccaatctctcttgcgatggcgatctatgacacacagcattcgcaggacggacactcagtgaagcctgaacccaacactccttcatagtatagtaacaataacactagcatgcacacctactactactaggcgtcgacctatccaaagtgtaggatatactggacattttgatttgctaactggaaaaggcctaaggatcctctcctcaaagtagtacccatggtatatgatgtcgtctcctcttttcttcttttcttcaaaggtgctttgattgcaaagatatggtaagcgatgttctcatgctcctacatctttcaatgcccctatcgagtgtgagtgatgggtagagctaccaaagagtctggcatgcgctcatatcatttccttttgggtctgtagtgcactagccatacactttgtggtggggtcggtcagtcttttggtagtggacgtttggactaatgaaaagaagctgatgtatgtgtgttaagtctgcacaaatggttgacacaatttaaaagaatgttcagatggaagatgatgttgacggtgaatggtggtgctatttcttgtctatttttccaaagcggcaacggatgttttagtcaatggaggcgaagcgtgtattaatctggttgctagtgggagcgtgctccttatgtgctttacttttctgtctgcaagtcatagtcttgataagaacctgccctcttaaagtttttagcctcttgtattattggttcactcatgaaactatatatatcatctgtgctgactt

SEQ ID NO: 16118 - DNA, 1030 bp, Oryza sativa
  ref <308>: DATABASE ACCESSION NUMBER: AK066624
  ref <309>: DATABASE ENTRY DATE: 2001-12-06
gatactcatcagttcatcacagagagaaaagtttgcacacagctagcatggcgaacaagctgcagctcgccatcgcgttcgtcgtcgtcgtcgtcgtcctcggcgccatggcggcatcggcggcggcggcggtggcccccatgctgacgatgcacaacctgtgcccgtacacggtgtggccgatcgtgtcgccggacagtggctcgccgcccatcgccgacgggatacggctggagggccgcggcgtcgggctgaggtcgctcaacctcccggcggggttctggtcggggcgcgtcgtgccgcgcacatggtgcagggacggcgggcggtgcgacaccgggaacgcgccgccgggcgacggtggtgaggctgtcgttcaacggcgccggcgggctggcggagtacagcgtcaacctcggggaagggttcaacgtgccgacggtggtgagcccgcacgccatcggcggcgggatgtgcccggcgctgggctgcacggccgacctcaacgccgggtgcgcggcggggcagcgcgtgtacggcggcgacaccggcggcgacgtcgtggcgtgcagggggccggcgagctacttcaagcagcggtgcccgctgacgaggacgggcgggggcgacgtggagcccgtgccgcagcactgcatctcccccggcgagatcaagctcgtcttctgccaggccgccatggtcgccggcgagccggagctcatccgcaccgtcgacgtcgccgacaactagctagcctagccggccggtccgttaattaattacgtgtgttttaattagtgcgtgtttaactagttaatcagatcatcaagcagttaaataattaattaattactccggttggcccgcgctaactgctaataagtgcacatggaataacaaaggcggggtacgtacatatgtacgtacccttatgtttgtacgtgcgcatatacgtgttttaattactctagtattgtatacatacttgtgtacgtacgtctacatcgtatattcgtattgtgtttttgtg

SEQ ID NO: 16119 - DNA, 971 bp, Oryza sativa
  ref <308>: DATABASE ACCESSION NUMBER: AK066625
  ref <309>: DATABASE ENTRY DATE: 2001-12-06
gagtccggtatttcccccaatatgtgtcagccaagaaagctccaaagagtggcgtgaggtagcaggcgcccgaccaagcagaggaattcctcgcggcgttcactttgctctcgtggagaatcttggtgaggtaggtcaccaggttcttggagatcccatagtaagccaaattctcactgaattcgacacctggttaggttgagtgattaactttagtttgcaattttagttcaaaaggttgtgagaaacagatatatggaagatcagcgatttgaattgaattgctgttgctaattattcttggtacctaggatcatgaagcatgctctccaattccccgtgctgcgcttgagagcaggctggttgttgacgtccaccgatccatcacctgtatactctgaatctgcatccccctgcagaaaaatcatccaaactatgagctgcagaagctgaaacttgaagcaaagaatcttggtggattgttcgactttgttccaatgatatgcatgcagaagtcaagaagcaatggtaggtaggttagatacccgtgaaggttgaggttgaggttgaagcagaggcgccctctcctcatctgctgcttccatggccatctacctgatgagaactataccttgagaattcagagtgagcagagaggatggagtaggttgatggtgaagaattagctgtacggagcagctcgattccatggcagcatagctactagtagtagtagctgagcaggagggaggcagggagagatggagaggggaggataagaaattttgtgtgcacgggaaggattgaggcgtcagactgacgtgcacaacacagtgatcatgtattgttgacctgtattattttgttttcgtttctgcatgtgcaatgatctgttcgtcctattgcagttaagtccctgtcgcctccctgtgggttggacctacaaaaataaataataatttagatctggc

SEQ ID NO: 16120 - DNA, 3058 bp, Oryza sativa
  ref <308>: DATABASE ACCESSION NUMBER: AK066626
  ref <309>: DATABASE ENTRY DATE: 2001-12-06
ggtcgtctcagacacagaggcactccatcaccaccgccctcggccgcctcgacctcgccgcgcagccgcgtttggatgtccggccgccgcactaggttcgccgtcggagagcttccgccgccgccgcccgccgccttctggaaggtggagaagacgcgggcgcgggggaggaagcggagggaactcctgctgcacggcgcgcatggcgccgacgagctcgccgtccacgccgtcgccgaaccacgtggccaagttgagcgcgaacagtgcggcgtacaggcagcacgacgagcagagcggcgccaagaaggcggcgtgggtggtgtcgcccaacggccaagtgaagcgagaaaaggcggtggaaacggcgcgcggcgagggagctgcagccggagccggagaagaagaagaaaagcggatcgacttggccgtgctccgttgccctatctgcctccttcctagctgttcatccaatccatctgacattcttcttcttgttgttgttctttcattcgattcgtgagggctcggctagtggcaatttcttggcgtgcagtccgcggcggggcacttggcgtgcagcagctgccatggcgacgtcccggcaagcagtgccacgcgtgcggcggcgccgccaagatcctgtgccccaacgacctgttcggctgctggagctacgtcgcctattacgacgtcgccggccaccagcgcgcctgcccgcacgcgccctgctcctgctcggagtcgcgctgcgacttcctcggctcgccgccgatgctcctcgcccacctcgtcgccgacatgtggttggtgtcgatttggaatggggtgaaatggactggaaaagtgaactgaatccatatagatgaaatgggttgggttgatttgggttgaaatatgatatgggttggattggtttggattctaagagaagacaaatgaattagagtggtttggacttgtgtagcttactgctttggtttgggctggttgtggattggatttcaaaccattggcaggcttccacgcatgcatgtctctcttgtttggtttccctccatgtactttgatcgcaggagtactaatttgtggttgataataactttgatagtgtgtccgctcttgccgcgttgaaaccaaagagttagagaaatcctatatatttatataaagttcatttctacagtggttattaatgctatttatatcttttcttattaagccacatcatctaaattgtttctttatccctatgatagttgagataggtatattgttcaaattatctctcacgttttcttttgttattaagccgtatcacctttgttttatatttaagatgatgtacttagccacatcactattgttgtgattttaaatggccaatctagtttaaattattataaataacatcctaattgtatatagttttttttctgcagtcgataaagatgaaattatataatgttatgcctactgattatatgttatttctattattactgtataaaacttacgcagcaacccgtgagtttcatgaagtctgatttcactattgcgtagctttcatccgcatgattactaatggtgagttaataaattaaccatgcagcggctgctctgaacacgatactagggagatggggcaagaaggcatcaccggagtggaacatcagcggtgagctctgcagcggtttcgcagctgataaaaccgattgggataactaccgcgacatcaacccgttcatcaagtgcgattgcacattcaacaacaacaccctctgccacattacgagactgagggtaacttatttggatgtagttggtcaaatacctgcggagctacagaatctcacccatctagtggacctgaacttattccgtaattacttgactagtcccattccgtcgttcatcggaaaatttacttcaatgcaatacttgtcattatctttcaatccactatctggactacttccaaaggaactaggaaacctcaccaatcttctttcattgggcattagctcagacaattttacaggaagtcttccagaagaactgggtaacttgaccaaacttcagcaattgtactttgatagttctggattcagtggtccgttcccttcatcgttctcaaaacttcagaacctgaagttcttgagtgcatcagataatgtattcaaagggaaaatacctgcttatttgggcacaatgactaatttggaagacattgctttccacggaaactcctttgaaggaccagtcccagaaagtctgtctaatctgaccaaattaacaagattatggattggagatattataaatggggtctctccgttggcatttatcagtaatatggcatccctgagcacactaatattgaggaactgcaagatatctagtgatctcggagcagtagaattttccatgtttaaacagttaaaattgctggacttgagttttaacaatatcacaggagaagttcctcaatccatcttgaatttgggaaatctcaattctttgtttcttgggaacaatagccttacaggaaagttgccggatggtataagctcttcattaaaagtgatagatttttcgtacaaccaactcactgggagcattccttcttgggctagacaaaacaatttacagttgaatttggtggcaaacaacttcttactcgataccaccagtgaaagtacgctaccttggggaataaactgcctccaacaagacaccccttgtttccgtggatctccagaatattattccttcgcagttgactgtggcagtaatgcatccataagaggctcagatgacactatttatgaagcagatcctacaaatcttggagctgcaacatattatgttaccggtcaaacaagatggggtgtcagtagtgtagggaacgccatagatgcaaagaatattatatatagctcccaaccttttcaaaatgtagttgattcagagttgtttgaaactgcaaggatgtcatcatcatctctgaggtactatggacttggacttgagaatggaaattacactgttttgctcc

SEQ ID NO: 16121 - DNA, 3167 bp, Oryza sativa
  ref <308>: DATABASE ACCESSION NUMBER: AK066627
  ref <309>: DATABASE ENTRY DATE: 2001-12-06
gaccattaactccccactcactctcacgtctcaccggcgcaggaaggagaagtcctcgtgtttcgtcctctctccctcctcgatcctaccccttgccggcgtcttgcttctcctcctcccacttgagcggcagccgtcgccgtgatgtagcaggcagtcccgccgaatcgatcccgcggtagctagctagctgcaggctgcagcagctaagtccaacaattttaggggggaagaacccaatcttgtgaacgaaagaactagtctgggtcagccaagaatccagccaagattatttctatctgtcccgcgggggcagtttaaggtttcttcatctgctccagaaactcaggacagaagcagtttactgattataatcacttttgctctctgggacaagaaaggaagaggggcaaatccaaaagagtttgatacttttatcacggattactgttagtcgatggagaataataatgatggagtgattggaatatcctggcgtaattctaatccaaaggttcacagctcaatgtgcagtgaattgacaatgatgttagataaagtctcttctattcttccctcaatcgaaactgctcaaccaggatgtaaagcgggtatagaggaactatgcaacctgtacaacatagttgacaaaggaaaactcataatccagaactgcattgagtgcagtagtctttacttggctattacaggggaggcaactgcaatgcggtgcgaaaggataagagatgcgctgaggcgaagcttgttcctggttcagaatatggtcccgtcatcattagctaatcaggtggctgatgttcatgatgatcttggggatgtgaaattcattgttgacccagaagaagatgaggctggcaaagccattttggagatgcttcggcagtctgatgcaacccaagaacatgaactccagactttcttgtttgcagcgtcaaagttaaatttgacgtcaccaaaggctatcttaattgaaagacgagcaatcaagaaactactggacaagatcaatggtaatgatcccaaaaaggaaggaatactcaaattttttcaatatctagttaggaaatatggaaagactatgaagcctgagggtagtgcaaagaatgaaggtgtggatgttgcaaacgttacttcgagtacaaacctaattgctagtggtaccgatgctccacagaaatgcttttcacctacaaactcttggactggaagatgtgaagagcagaataatttgtcacgattttctactcctccagagttctgctgcccactatctatgaagctgatgtacgatcctgtgataatagcatctggacaaacctatgagagagagaacattgagaaatggttcagtgagggatatgatatttgtcctaggacacagttaaagttagaaaatttcacgattactccaaatacttgtatgaaggctgtgatctgcaactggtgcaaagataatgagcttgaattcacttctttacctgaacaatttcatagttactctgtttcaagtctacacaatatctcagcacctctagttgctggaacaaagagagattacatgtctgatcatagcagttcatctgttgcattatctggttctagttatgtatcatctccaatgcgggaaacagaagagtcaaggactaattctactcagtttttttcaaacgcttattaccagttgtatttgtccttcagcagcttcaacaaggagatgtttctgaatttcttttacgagctgtccgagcttccaatggaacttcaagtgaaggctgtcagagatttcaaaagtgttctgaatcgtgaatatcaaatttggcgttctatgatttccaatggttttttagaagcatttcttgagtttcttaagaacgataatggaaaatgcacaatggaagctcaaagaactggcattcagttttttcttgcttttctacgtaatagcaggacccgaattccatccattagtgaagatgcagtgcgtctcgttgcttcatttcttgattcagagttaaaaactgaagcattggagatactccatgaactgctgcatcaaccaagttgtcggaaatctcgtctcatggcatctgttgttgctccatctgtgtttctagcttgggatagtgcagactccctgtgcctagaactagttttgaagatcatctgcgagctttcattcaaaaatgatgtacaatctttcctaatttcttctggaataatctcaaagctatctccaattctcagtcaagggaaatcgcctgagtgttgcctaaagattctactaaatttaagtgaagggaaacaagctgcggatctcattatcagaactgatcaatgcctcagttctatttcagattatctggacacaggaagctccgtggaacgcgagcatgcgtcaggtatccttcttgccttatgctctcgcagcatcgacgattgtgttcttgtcatgaaggaaggtgtcatccctgcgctggtcgatttgtcggtcaatggaactgaggttgcaaaggcttcttcaatcaagttgcttcaacttctcagggactctagacaaagcgaccagtttggcaattcatgttcaagtgaggtggctgtcaatggtgcagcagagaattcgcccattggcacgatctgcaaacaaccaatatcaaaatcagctcggtatatctcaagaaagctcagcattttctcgaaacctcgatcgctgaccctcgtctgatgagtcgagtttgattttggttggagctttgtacattttcaaacactgcccaaccagctggtgtacagtttgtagcagatagtagtgtccagatgaaatgcttgatgggatgttttttcaaccccatgtactagtgtttcttctagagtttgtatttgcagtacttttgcttttctttactaggttgttttagataaagacatacggtgaacaggttttatgtcgaaagttgcattttattctctgctgttgcatatacagttgaaaatctgaaggggcaggcagcacatgtcagtctgaaggatgcaacacctttgataatatggcgtctttgttatgtgtgtgtgtgcgtgtgtgtatttaaaaggatgaatagtcgaagtttaaatatgaatagtattcggttaccgtatactttatttcc

SEQ ID NO: 16122 - DNA, 2930 bp, Oryza sativa
  ref <308>: DATABASE ACCESSION NUMBER: AK066628
  ref <309>: DATABASE ENTRY DATE: 2001-12-06
gatataccaaaatcgaaggggaagaaggctcatcaccaccgtcgaaaacgacctgcacccaccgccaccgccaccgccgccgccgccgccggccggccaaggccaaccacgcaacccgccgtggccgcgacgctccacttcccccctgactccgtcctcccacccgcccaaccaaccgaccgaccaaccgagtgaacaagtgaccaaccaccaccaccaccaccatcgccaccaccgtcttcgatctctctccgcctctccggcatctcttcacggcggcggaggaggagggagcagcgacgatggccgtgcccacctccgaccagcgcaagcggcggcccttcctcctctcgctgtcgctcttcctcctcgtctccgcgctcctcgccctcgccttcctcttcctcgacccctccgcgcaatccctctccgtcctctcctcccgcctcaccgcccctactacgacgctcgcgcctcccgcggtcgtcgccggcggcgccgaagccggggagagcgccgacgcaaccgaaaaagccgaagagaccgcatcgcgaccagacgacaccgccgccgccgtcaacgccgacgctgcagcaggggaaggtggtggaagtagcgagtcgccacggctcgatgcggataagggcgccgccgccacggagggagtggcggatgacgacggcggcggtggcggggacgagccggcggcgaaggtgaggtgggagacttgcaggccggggagaggggtgtcgtcggcggactacatcccgtgcctcgacaacatgagggcgatcaaggcgctgcgctcgaggcgccacatggagcaccgggagcgccactgccccgtggcgccgcggcccaggtgcctggtgcgggtgccctccgggtaccggtcgcccgtgccgtggccgcgcagccgtgacatggaagctactgtcgtgaggcagaatagagaatgccagataagagctgtaatgttgggtgtcaagcagattgtgcttagtgatcctttaatgtggctaaatttccttttgtgcatatactattttaaccactagtatcgttttataggctttcaactttcaaggcagtgagtgcagtgtgtgtatttatgatagttacatgaatatcttatggttaagatgccattaactgactatttgaagccatctcatttcatttccaaatccagatttggtacaacaatgttcctcaccctaaattggtggagtataagaaggaccaaaactgggtaacaaaatctggtgactatcttgtcttccctggaggtggaactcaattcaaaactggcgttacaagatacattcagtttattgaacagactttgagggggctaaacacaaaggctatgcttgcattgactctgttggggttcggtaatttgaatataatgcccaccattcaatggggaacacacacaaaaactgtcctggatgttggatgtggtgttgccagctttggtggatacttgcttgacaggaacgtcattaccatgtcatttgccccaaaggatgagcatgaagctcagatacagtttgcattagaacgtggtattccagcatttctagctgttattggaacacaaaaacttcctttccctgatgaggcatttgatgttgtccactgtgcaaggtgcagggtccattggtatgcgaatggtggaaaaccattgttggagcttaacagagttctcaggcctggaggatattacatttggtctgcaacccctgtctaccgtcaagaaaaaagagatcaagatgactggaatgcaatggttaaacttaccaaatcaatctgttggagaacagtggtaaaatctgaagatagtaatggaattggtgttgtcgtatatcaaaaaccagcatcaaactcttgctacctggagagaaggacaaatgaaccccctatgtgttctaagaaagatgggccccgttttccttggtacgctcctcttgatacatgcatttccagttcaattgaaaagagcagctggccccttccttggcctgaaagacttaatgccagatatctaaatgtgcctgatgattcttcaagtaccgacgagaagtttgatgttgatacgaagtattggaaacatgccatttcagaaatatactataatgattttccagttaattggtcatccacccgcaatgtaatggacatgaatgctggttatggaggttttgcagcagcacttgttgataaaccattatgggtaatgaatgttgttccggtcggtcagcccgatactttgccagttattttcaacagaggccttattggggtatatcatgattggtgtgaatctttcaacacgtacccacggacctatgatctccttcacatgagctatcttcttggaagtcttacaaataggtgtgacatcatggaggtagcagctgaaatagacaggatattgagacctgacagatggtttgtgttgagagacaccacagaaatgataaaaaagatgcggccagttctcaagtccctgcactacgaaactgtagttgtcaaacagcaatttcttgttgctaaaaagggtttctggcgttctggcaagtgagcctcctgatcagaatgacgctcaaatgttttcagggtagtcatcaacagcaaacaattcaattgattctttacatccctattgattagttcttatacagaagacagagtttgatcaaaccaaggattaggcatgttgattctacaaaatacttatacagaacagttagttcgacaaaaatacatatacacatcttgtttatggggggccattacagtaataggcttaggctagtccactagtgctcacaagtttgtaatcatattattattcttttacattcagaaacagatacttttcagggaaacattatgctctttcacgaatacatcctctgtcc

SEQ ID NO: 16123 - DNA, 1745 bp, Oryza sativa
  ref <308>: DATABASE ACCESSION NUMBER: AK066629
  ref <309>: DATABASE ENTRY DATE: 2001-12-06
gcgtctggccaaattcgcgcacctcctccacctcctcccccatctcccccagatctcgccgcgatggccaccgccgcggccgccgcgcgcgccctcctcctcctcatcgccgtcgccggagcgctcctccgtcccgcggcggcggagatcaagcaggagtccttcaaggacgactcccgcgcgtccatcctcttcgagaagttcgggttctcccgccgtgggttcgtgtccatcgccatcaccggcgcgaggacctcctcgaagctcgccaaggcggagccggatcagttcgggttcttcctcctctccgacgaggcgctcttcgaggccatctacgagcagccgccgcccacggatctgaaccccaaccccgagcccaacccgggatgcgtcctctccagcccctacgtcaagccgctcttcagcttcgccgacctcgacggcaacggcaactacaaaaagaccttcccggtcacccaacccgacgagtacagcctcttcttcgccaactgcgcgccggagacggccgtcaccatggaggtccgcaccgacatgtacaacaccaacctggatggctccaaggactacctctccgtcggccaggcccccgtcccggcgatctacgccttcttcacggtctgctacctcgtgttcttggccgtctggctctacgtcaccctctaccgcaaccgcctctcggcgcaccgcatccaccacctcatgtccggcctgctcgcggcgcgcatgctctactgtatctccgcggccgaggaccagcactacatccgcatcgcagggacaccacacgggtgggatgtgatgttctacctgttccagctggtgaagggtgtgatcttgtttgctgtgattgctctgattgggaccggttggtcattcctgaagcccttccttcaggacaaggagaagaaggtcctcatggttgtgatcccattgcaggttgcagctaacattgctgcagctgtggtcggtgagactggtccattcttgcagggatgggtaacatggaaccagatcttcttgtttgttgatgtcgcctgctgctgtgctgtgctcttcccggttgtgtggtcgatgcggtcgctgcgggagtcatccaagacagacggcaaggcggcccgaacccttgccaagctcacccttttccgccagttctatgttgttgtgattggatacctatacttcactaggatcattgtgtatgctctgaagacaatcaccaactacaagtacagatgggtgagtgttgccgcagaggaggtggccactgtggcattctacctgttcatgttctacatgttcaggccagcagagaggaaccaatatttcgctcttgatgaggatgaggaggaagctgcagagctggcactccgggaggaggagtttgagctctagagtgttgtgatccagtgagaggatacatgatgggaaatacagcctgacctgttcaatttctcctccattgatgtcggtcatactatacagatgcaggatttagcctatatttatctatgtgttatggatatattcactcttttcacttctttcttctagcatcaaatgttgttgagaagtccaaagataattgggctgcttgtgttgcaaattaggggcatttattcaatgttgccattttgccaatactcaggtttgcttcttcgtacttatcagctgttctttatcatttacgagctgtagaattttgttgctatcgggataacattggt

SEQ ID NO: 16124 - DNA, 1415 bp, Oryza sativa
  ref <308>: DATABASE ACCESSION NUMBER: AK066630
  ref <309>: DATABASE ENTRY DATE: 2001-12-06
gtcttcccccacctccgcctctctctcgatccatctcccccctctctcctctcctctctctctccgttcccaatctgcggaggcggaggcggagctagggcgcggcgtcgccggcgaggagttccgcaggcgcggtgtggacggggctcctctgcttccgcacacggcgggcggcgacggcgagcagggttggaggggcggcgcggcgacctcctcgttcctgccttgcctgcctccatctggtgttggaaatatcataagttttgggacaagcaagagaggacatggagccatcatcacaacctcagccggcaattggtgttgttgctggtggatcacaagtgtaccctgcataccggcctgcagcaacagtgcctacagctcctgctgtcattcctgccggttcacagccagcaccgtcgttccctgccaaccctgatcaactgagtgctcagcaccagctcgtctatcagcaagcccagcaatttcaccagcagcttcagcagcagcaacagcgtcaactccagcagttttgggctgaacgtctggtcgatattgaacaaactactgacttcaagaaccacagcttgccacttgctaggataaagaagatcatgaaggcagatgaggacgttcgcatgatctccgcagaggctcctgtgatctttgcgaaagcatgtgagatattcatactggagctgaccctgagatcatggatgcacacggaggagaacaagcgccgtaccttgcagaagaatgacatagcagctgccatcaccaggacggatatgtacgatttcttggtagatatagttcccagggatgacttgaaggaggagggagttgggctccctagggctggattgccgcccttgggtgtccctgctgactcatatccgtatggctactatgtgccacagcagcaggtcccaggtgcaggaatagcgtatggtggtcagcaaggtcatccggggtatctgtggcaggatcctcaggaacagcaggaagagcctcctgcagagcagcaaagtgattaagaagagtaaatgatccctgtgaattgtcaagaagcttaccacctgattcagaattttacttttagccaggttgtcgtctattctgaatttatgaataggattaggattctctcatggtagttgcatttctgctgtagtggaaaaggatttatgacatgagagtatgagactaatgggtttcagttactataccgtttcctgtcaatccaaaagttggcctttgcgaggccattgatattgaacctaatgtggttgaactgcccatgccaacgtttgtaagctctgatgtgggtcattctgtatttcatgtttgcatggtttcatggaatcttctttgtttagacaatgaaaatgttttacattcgtggcatctgccat

SEQ ID NO: 16125 - DNA, 3311 bp, Oryza sativa
  ref <308>: DATABASE ACCESSION NUMBER: AK066631
  ref <309>: DATABASE ENTRY DATE: 2001-12-06
gagtctccactagcctccctaaaacgaaaaaaaaaggaaaaaaaaagaaaaaaaaaaactgcggcgagccggagacgtggctccccgactcctcgcgcgcgcggccggcggcgagaagggcggcggcggcggcggggaaggccatcctcccctcatgagcggcgtggcctcctcgcgcgcgcgtcgggggagcaggcaggtctggaggggcgacgccgccgacgacatccttccgtctcggttcggatcggattgaaggaatgcatgaggaaccactgaagatttattggtggtaatggagaatgatcatggagatctagatgatgtgggatcagggtggcttgaagtgaaaaaaaaacaccgatccagctcaaaattcacattgcagaggtcttcaggaggttccaatgataataaaatttcaaactcgtcctcacaatctcagaccaactttggcagtgatagtgcaaagtggtgtgacaggttacaatgctcacctcagatcacaaaggttaatgtttgcgttaatgaaccgggtagcgtagtcacaatggttgttcatggtgaagaatgtgctcatgcagatgctagcaatctgaagagtgaattaagtgtttcagcctcggatcatgcaatagaaaaacctaaaaaactgctagtgactgaagaaataagtgaacctcccaacgttggtaagattgactgtgctgattctccaactccacatcaatcctccaactgttcaagtggtcttgcaaaatcttcaggtttttatgatcatgttaaaggccctccaatgacagatagtataggtgttttatcgaacacttctgtcaggtttggtgattttgatgaagtgccaggtctagcattacctgcagatgcatgtagaaataatagttcatctcaaaaacacatacacattggcgatgctacagaattcataaatgaatgtaaagatgaaagtgaacttaaaactgagccgaattcttgtaaaacaattgttgagacatctcctgttattattcaaggggcagaaacgcccactgaagatgagagcaaggtattggatatatgtgaaataacagataatcgtttggatgttagtggttcaccttccttggacgacacagtctccttgtcctgtgcaaacaatgatcttgaagttccagttaagtcgtcttctgttgcttcaacagaaagccagacagttcttcatgcaccaacttcagcagattttggaggtgaaactgctggaagcaaagaaaggttcaggcagagactctggtgttttctttttgagaatctgaatagggctgtggatgaactttacctcctctgtgagttagaatgtgacatggagcaaattaatgaatccatccttgttcttgaagaagctatatctgattttcaagaactgaaatccagggcggagcattttgataacaccaaaaaatctactgctctaccaaaggaggggatgccaatggctgtgaaagctgaccatcgaagaccacatgccttgtcttgggaggtcagaaggatgacaagttcaccacacaggcaagagatattgtcttcatctctagaggcatttcagagaattcaattggaactggctcgcaaacaagctggtataacaacagagagctttgcatccagctcttctggagaagtttctggtagctcatcaaagctaaccacagcatcagcgactgttggaagtataagtttgaaagtggagagtcaggtgaaactttctgacactgagaaaaaaattgctggagagaggcaaagcaaggatacaatcaagtcaggtagatcacctccacaaaatatgccttcatcttctgcaaagagtcgaaaaggatcactggaacctatctctgaggtagagaagcataattttaggaaggataaggaattgccagaaaacaaatttgacaagctcaggtcaacagatacggcaaaaaggactacagttcatactgagaaggagaaacaaaatgcagcaccacggaagtcattggatgcctggaaagagaaaagaaactgggaagatatactgaaatctcctgttcggagttctcgtgtctcccattcccctggtgttggcagaaaagtaccagagcgtgctcgtgttctacatgacaagttaatgtctcctgaaaagaagaaaagaagtgctttggacatgaaaaaggaagcagaagaaaaacatgcacgagctttacgaatccggagtcaactagaaagtgagagagttcagaggctgcaacgtacctctgaaaagttaaatcgtgtcaatgaatggcaggctgtgcgcagctcaaaactgcgagaagtaatgaatgcacgccaccaacgtagtgaatctcgtcatgaggcataccttgcccaggttgcaaaaagagctggtgatgagagtactaaggtcaatgaggtccgttttattacatcactaaatgaagaaaacaagaaattcttactgaggcagaaacttcatggttctgaaatgcggagagctgaaaagctactggtgatcaaaacaaagcaaaaggaggacattgcaagggaagaagctgtattggaacggagaaaaattcttgaagctgagaagatgcaacgtcttgctgaaatacagcgtaagaaagaagaagctattattagaagagaagaggagcgcaaagcatctagtgctgcacgagaagcgagggctgcagagcagcaacgtagaaaagagataagagcaaaagctcaacaagaagaggctgaactgttagcccaaaaattagcagagaagcttcgtgaaagtgagcagcgccgtaagtattaccttgagcagatacgtgagagagcttcaatggatttcagggatcagccttcaccttttcagcgccgctttccaagtaaagataaccaaaatcgttctagctcagctaatagtggagaagattcacaaataataagcagtgccaacgctgctgagtctggtgttaaatcattcaattccacgcaaatgaaacgaaggattaaaaagatacgccagaggttaatggctcttaagcatgattttgttgaaccactcataggcgaaaatacaggaattgtgcacaggtctgctctaggtactgcaaaagctaagttaagtagatggcttcaggacttgcaaagacttcgtcaagctagaaaagagggtgctgcgagtattggtttgattgttagtgacatgacaaaggtacttcttgtttgttccatattgtgttgtaataaagatgtttactaataccactttctttttattttggcac

SEQ ID NO: 16126 - DNA, 1779 bp, Oryza sativa
  ref <308>: DATABASE ACCESSION NUMBER: AK066632
  ref <309>: DATABASE ENTRY DATE: 2001-12-06
gctcctctttcttggagcaaaagaagaaaaaaaaataaatccaataacaccacaaggagcccgaagcgaggagagagagagagatggcgctcgcaatcctggcgaggaggcgggcggcggaggcgctgctgcggcggccgctgggggcggcgggggtgtcggcgctgagggcgtcgtacgcggcggtggcgggggaggagagcgacgtggtggtggtgggcggcgggccgggagggtacgtggcggcgatcaaggcggcgcagctggggctcaagaccacctgcatcgagaagaggggcaccctcggcgggacatgcctcaacgtcggctgcatcccctccaaggctctgttgcactcatctcatatgtaccatgaagcaaaaagttcctttgcacaccatggagtgaaattttccaatctggaggtagacctcccagctatgatggcacagaaagacaaggctgtggcaggcctgactaaggggattgaaggtctcttcaagaagaacaaagtgacgtatgtcaaaggctttgggaaacttgcttcgccctcagaggtgtctgttgatctgagcgatggtggcagcacagttgtcaaagggaaaaacataatcattgctacagggtctgatgtaaaatcactccctggagtcacaattgatgagaagaaaatcgtctcatctactggggccttgtgcttgtcagagattccaaagaaattggtggttattggaacaggttacattggtctggagatgggttcggtctggaaccgccttggttcagaggtcaccgttgttgaatttgccccagatatagatccatcaatggatggtgaagtcaggaagcagttccagcgcatgttggagaagcagaagatgaagttcatgctcaagacaaaggtagttggggttgatacctccggagatggtgtgaagctaacacttgaacctgcagctggaggtgagcagagtgtcattgaagctgatattgtattggtttctgctggaagagtcccatatactgctggtattgggttggaaagtgttggtgttgagacagacaaagctggcaggatcctcgtggataagcgcttcatgactaacgtcaatggagtctatgcaattggggatgccatccctgggcccatgcttgcccacaaagctgaagaggatggtgttgcctgtgttgagttcattgctggcaaggaggggcacgtcgactatgacacagtgcctggtgtggtctatacacatccagaggtcgcgtctgttggaaagactgaagagcaggtgaaagctttaggaattccctaccgtgttggcaaatttccgctgttggcaaacagccgtgcaaaggccattgacgatgctgagggcttggtgaaggtggtggctgagaaggaaactgacaagattctgggcgtgcatatcatggctcccggtgctggagagataatacatgaggctgtccttgctttgcagtatggagcatcaagtgaggacatagctcgtacatgccacgctcatcccaccgtgagcgaagccttgaaggaggcctgcctgcaaaccttcacaaaggcgattcacatttaagttctgttttgcttttaacatccaaactgcttggcttcacaaattccaaaattttgtaataattttggatatatgggatcaaaaagccactgtctgtcattttactctcgttcgtgatgctgtgaattgacactagttgccacagccaatagtatatgctattgattccattcccttagatgcc

SEQ ID NO: 16127 - DNA, 3756 bp, Oryza sativa
  ref <308>: DATABASE ACCESSION NUMBER: AK066633
  ref <309>: DATABASE ENTRY DATE: 2001-12-06
ggatccaatttcaacttccaagttctgtactcccaaccttttcctcctcttcttctttcttctcctcgtcctccattgatatggccaccgaggtgctgcgcccgcacaacgtgctcctgccttccccggcgcagcggaggatccgtgccaccgccgccacgcaccagaggacggccaacaaccatcagagcgatgcgaggaccaagccgacgacggcgggaagccggagacgtcagggcaggggctcctccgccgccaggaaggcggccgcgaggcctgtagcggtggagatcgagggcgtcaaggtgcccgtcgacacctccaagcccaaccccaacggcctcgagttcgacaacctctacctcgacatgaacgggatcattcacccctgcttccaccccgaggataggccctctccgacaacattcgctgaggttttccagtgcatgtttgattatatcgataggctatttgtcatggttcgccctcggaagcttatgtatatggccattgatggtgttgctcctcgtgccaagatgaaccagcaacgctctagacgattcagagctgcaaaagatgctgctgatgcggccgcagaagaagagaggttgcgtgaagagtttgagagggaaggcagaaaacttccaccaaaacagcaatctcaaacatgtgattctaacgttattactccaggaacagagtttatggctgttttatcgattgctttgcagtactacatccatctcaggttgaattatgatcctggatggaaacaagttaaagttattctttctgatgccaatgttcctggtgaaggggaacataaaattatgtcctacattcgcggtcaacggaatctccctggatttaacccaaatactcgccattgtttgtatggcctggatgcagacctgatcatgttagctcttgcaacacacgaagtacatttctctatactgagagaggtagtttatacacctggacagcaggacaaatgcttcttgtgtggtcaggttggacatctagcagcaaactgtgaaggaaaggttaagagaaaagctggggagtttgatgaaaaaggtgaagctattgttccaaagaaaccttaccagttcttgaatatatggaccctccgggagtacttagaatatgagttcagaatgcagaatccacctttcccgattgactttgaacgcatcgttgatgatttcatcttcatgtgtttttttgttggcaatgattttcttccacatatgccaacattagagattcgtgagggagctattaacttgctaatggctgtatacaagaaggaatttccttccatgggtggctatctaactgatgcttgcacgccggatctgaataaagttgaacactttattcaagcagttggctcctacgaggataaaatatttcagaaaagagctcgtttgcatcagcgtcaagctgaaaggataaaacgagaaaaggcccaagcaaaacgaggggatgacctggatccccatgtcagggatgatcttattgtacctgttgcacgcttccaagggtctcgccttgcatctggacctgtgccttcaccatatgaacaaaatggatctgacaaaaacaatgggggaaaaaatagtcgtgctcggaaagctgcacgggtatcatcgtcaggttcaagcattgcggctgctattgttgaagctgaaaatgaccttgaagcacaggaacgcgaaaacaaggaagatttgaagacaatgcttaaagatgcacttcgtgagaaatctgatgtttttaattctgaaaatccagaggaggacaagataaaacttggagaaccaggatggagggaaaggtactatgaagagaagtttggagcaagaacacccgggcagattgaagaaatacgcagagatgtcgttctgaaatatactgaaggtttgtgttgggtaatgcactactattatgaaggtgtctgctcgtggcaatggttttacccttaccattatgctccttttgcttcggatttgagtggtctaggtcaactcaatataacttttgaacttgggtcaccattcaaaccgtttgatcaacttatgggagttttcccagctgctagctcccatgcactccctgtacagtatcggcaattgatgacagatgcaaattcaccaataattgatttttatccaactgattttgaagtagatatgaatgggaagaggtattcatggcaggggatagcaaaactgcccttcattgatgaagcccggttgctagctgaaattaaaaaagttgagcatactttgacgcctgaagaagcaaggagaaacagtatcatgttcaatatgctttttgtgaatggctcccatccactttcgccttatatctactccctcaacagcaaatttggacacctacctgacagagagcgaaatgaaattaaagaaaagattgatccttcttctagtggaggaatgaatggttacatctcactttgtagtggggatccgtgccctcctgtcttcaggtctcctgttgatgggttggaggatatcatggacaatcaagtgatatgtacaatctacaagcttccggattctcataagcacatcgctcgtccacctgttggtgtaatcatacccaagaagactgttgaagctactgacctgaaaccaccacctgtgctatggcatgaagacagtggtaggaggcctcatgataataacaacaggaggccttatgaaaacagcaacaggcaaaacccagctggagcaatatctggccgccaacttggggaagctgcccaccgacttgtggtgaacagcttgaatgctcggagtggcggacaatacaataccccatcgatgccatatcaaaccataatgaatggcatgccttatccaaatgggattccaccaaggatggagcagcctgctcctggctggcatgttcctggtgatctaccaaatggtcaggtaccaccagcttatgcatcatcatcaggtcattatcagaacgataggtctgggccttctcagtatggacgagataaccatggaaggtacccatatgcaagagacaaccaccatgattcaagaggaagggttccaccataccatcagagcggtggaaactcgtatcaatcacattctgctccatcagcaggtcctggacggtatgcgcaacccccaccatatgctggggggtatggtaggagctaccagcctgcaccgtatggaggtggtcagcagtggcagcagcagcagcaacaaccttatggctcctatgctgggtcagggccttatgggggtggggcacctcctgcaaggcctaattcacgaccacagcagtcgcagaaccgttacaataccttagataggaattctaacaggagacctccaccaggtcatgggcgacactaagcccaacctctgtttgttgtacctgtggttttgttgttagaaaacctgcgtactaaaatagagaacctcagcctagtaaaacagagaacctcagcttagagatatatatagagcaatttgcatagtctcgtgatcgacaagctgttatagcatcaaaggttctaagaggcatgtgttgtacaatagaattgtcagttcatcagatactggtggctgactgccgtttttcatttgtggcactcattattttagccccctaaggttgggaatatgtttaacaagttttgtatttttaagataataatgttctaggttaaatttcagttttggtggatatatgtct

SEQ ID NO: 16128 - DNA, 1858 bp, Oryza sativa
  ref <308>: DATABASE ACCESSION NUMBER: AK066634
  ref <309>: DATABASE ENTRY DATE: 2001-12-06
gggctttgcttaccgatccgatccgattcgccggcgtcggcggcggcggcggcgagatggatttgccggcgagccgcgggcggtggcggaagcggagcgcccggtcgcacgcgcccctcctcgtggccgtcctcgtgctcctcatcccggcctccctcctcctctcctcggcctactcctcgctgctccgctccatcctccccttctccggcttcggaggcggtggcggaggagggggcagaagatgtgggcggtcgccggagctggaaggggagaggtttctttggtacgcgccgcacagcgggttcagcaaccaggtgggcgagctccggaatgccgccgtcgccgccgcgctgctcaaccgcaccctcgtcgtgcccccggtgctcgaccaccacgccgtcgtcctcgggagctgccccaagttcagggtcgccgacgcttccgacctccgcgccgccgtctgggaccactccatgcagctcctccgggagcggaggtatgtatccatgggtgacataattgatctatcgccgataaaggctacggttagaacgattgatttcagggtgtttgtctcattgtggtgcggcgtagacatgcgcaagacttgcttctctggcttgtgctgtgctgtctctggtggtggatcgctgccaggtgattacgatagatgccgatcgatgctgtccggtttagggggcagcgaaaatggctgtgtgtatcctgtccaggacgattgccgaacaacagtctggacatatcaagagaataatgatggggcgcttgattcatttcaaccagatgaagacttgaaaaagaggaaaaagatatcatacgttaggaggcgcaaagatatgtacaaggctttggggcctggttctgaagctgaggatgcttccttgttggcatttgggacacttttctcaggaccatacaagggatcagagtcatattttgatatccacgaatcgccaaaggatcgtcggctacagactatacttgagaaggttgagttcctcccttttgcccctgagatcattgctacagggaaggagttcgctaggaaaaagatcaaggagccatttctttgcgcacagctaaggctgttagatgggcaattcaaaaatcactggaaagctacattttctgcactcaaggagaagttaaaggctgttgcgttggaaatgaagaaaacccagggtagtggtcctattcacatgttcatgatgactgatcttccaccagcaaactggtcaaagacctatcttgcagatattgcaaaagatgggagatataaattgcacaccctgaaggaaagtgatgaactggtggcacagaccgcagagcggcttatggctgctgaacatggtgtgagatctggatttattcccaaaaacatagcaaacacgaggaaggattgtgatccagttcaactaccagaaattttgttatatgttgaagaatctgtctgtagctgtgcatcactaggatttgtggggactgctggatcaaccatagcaggaagcatagaaacaatgaggaagaacaatgtctgccaattgtaggagaactgcacacatccttcgagcaaactgcctgaaaaaactaaccaccgttacttgactcgtcgactgtagatagcaatatgagagccgttacacaacagaagctgaatccttgagatcttccatccccagtgcatgcatgactgcatgagtatataatgctgaaagcccacgttttttttgttttttttatttgagtagaaaggtataacgtgtgccttaatcattcagttttgtaagtttggatacatttatttattttttggtatgtaatgtatccttcatcctcg

SEQ ID NO: 16129 - DNA, 3495 bp, Oryza sativa
  ref <308>: DATABASE ACCESSION NUMBER: AK066635
  ref <309>: DATABASE ENTRY DATE: 2001-12-06
gagcagccggtgacaccacaaaatcctctcgcgctctcgctcgcgtctcctccccctcccccactccaacgctttaaaaaaaccgggggaaatggcgtgcccgcgcctacgcctcgccgtgcagccgcgcgcgcggtataaattcgcacgcgagccgcgatgatctccctccactccgcccccttcaccctcctcgtaaagctccccggccggaggaggagcggtcttacgccgccgaggtgcgccgtccggggagccgggaacgtgtcgtcggcggcggtgcgggagatggcggtcgcggaggggcggcggcagcatgagtactccatcgacgcacgcctccggcagctcgcgccggagaaggtgtccgccgacgaccgcctcgtcgactacgagaccctcctcgtcgcgcgcttcctcgacatcctcgaggacctccacggcggcgacttcagacaagtggtggaggattgcctgaggctgtccggggagtaccagagcgagggcgacccggcgaggctgggcgagctgggcggcctcctgacgagcctggacgtgggcgacgccatcatggtggcgagctccttctcccacatgctcaacctggccaacctcgccgaggagatccagatggtgtaccgcaagaaggcggaggcgagccggcgcggggacttcgtcgacgaggcctccgcgcccaccgagtccgacatcgacgagacgttccagcgcctcgtccgcggccttggcaagtccccccgcgaggtgttcgatgcgctccgcagccagaccatcgacctcgtcctcaccgcccaccccacgcagtccgtcaggcgttcactcctccagaagcacgcaagcattaggagctgcctgacacagctctgcggcgagggcatctccgacaacgaggagcaggagatcgacgaggcccttcagagagagattctcgcggcgttcaagacggacgagatccggcggacgccgccgacgccgcaggacgagatgcgcgccgggatgagctacttccacgacaccatctggaacggcgtgcccaagttcctccggcgcgtcgacacagcgctcaagaacatcggcatcgacgagcgcctcccctacaacgcccccctcatccagttctcctcatggatgggcggcgatcgcgacgggaatccgagggttacaccagaggttaccagggacgtgtgcctgcttgccaggatgatggctgccaacatgtacttctccaagatggccgatttgatgttcgagctctccatgtggcgctgcaacgacgagctccgagctcgtgccaacgagttgcaccggaagtcctcaaggaagtacgccaaatactacattgagttttggaagaagatttctccaggagaaccttaccgcattatactcggcgatgtgagggacaagctgtacaacacctgcgagcgtgctcgccagatcttgtcgaagggaatttctagcattcctgaagaccagacttacaccaatgtcgagcagttcttggagccgcttgagctgtgctaccgatcgctgtgcgactgcggcgacaagctgatcgccgacggcagactgctcgacttaatgcggcaggtctccaccttcggcctctccctcgtcaagctcgacatccggcaggagtcggagcgccacaccgacgccatggacgcgatcaccacgcacctcggcatcggctcctaccgggagtggcccgaggagcggcgccaggagtggctcgtctccgagctccgcggcaggcgcccgctcttcggccccgacctgccgcagtccgaggaggtcgccgacgtgctcggcgcgttccgggtcatcgccgagctccccgccgacagcttcggcgcgtacattatctccatggccaccgcgccgtccgacgtgctcgccgtcgagctgctgcagcgggagtgcggcgtcaagaagcccctgagggtcgtcccgctgttcgagaagctcgccgaccttcagcaggcgcgcgccaccatggagctcctcttctccgtcgactggtacaaggagcggatcgacgggaagcaggagatcatgatcgggtactccgactccggcaaggacgccggccggctgtccgcggcgtggcagctgtacaaggcccaggaggagatcgtcggcgtggcggagcggcacggcgtgaagctgaccatcttccacggccggggcggcaccgtggggcgcggcggcgggccgagccacctcgccatcctgtcccagccgccgaacaccgtcaatggctcgctccgcgtgactgtccagggcgaggtcatcgagaagtcgttcggcgaggagaacctctgcttccggacgctgcagaggttcacggcggcgaccctggagcacggcatgaacccgccggtgtccccgaagcccgagtggcgccgcctgctcgacgacatggcgacggtggccactgacgagtaccgctccatcgtgttccaggagccgcgcttcgtggagtacttccgcgccgccacgccggagacggagtacgggcggatgaacatcggcagccggccgtcgaagcggaagcccggcggcggcatcgagtcgctgcgcgccatcccgtggatcttcgcgtggacgcagacgcggttccacctccccgtgtggctgggcttcggcgccgcgttcaggcacgccatgcagcagagcgacgccggcggcggcctcgccacgctccgcgagatgtacgacgagtggcccttcttccgcgtcaccatcgacctcctcgagatggtcttcgccaagggcgaccccggcatcgccgcactctacgacgagctcctcgtccccgacgacctacgtccattcggcgagcagctcagagccaactacgtcgagacacagcgcctgctcctgcaagttgctgggcacaaggatctcctggagagtgatccgtacctgaggcagcggctgatgctgcgggactcgtacatcacggcgctgaacgtgtgccaggcgtacacgctgaagcggatccgggacggcgggttcaggccggagacgcggccgccgctgtcgaaggagcttctgggctcgtcggcggtggcggagaagctggtgaagctcaacccaaacagcgagtacgaccccgggctggaggacacgctcatcctcaccatgaagggcatcgccgccggcatgcagaacacgggctgatcgatgcaaaagcaccatggccttgccggttaaaactttgtagagaagattggtgggagtggattgagactgtaaattggtgttgctgacttgtttctggtgcttattgggtcaagaacagatcgtactgttcttgtttcttcagttatctctgttttttagcagtgatggtacacggatttcctggttctagcttgaaccgtgatcactgttttctttcagtaacgtagcagattaacctggagtggggatatacctgagaattcagcttcccaagcatatctttttttg

SEQ ID NO: 16130 - DNA, 1480 bp, Oryza sativa
  ref <308>: DATABASE ACCESSION NUMBER: AK066636
  ref <309>: DATABASE ENTRY DATE: 2001-12-06
gtctccgccacgccgcacgtcttcccttcgactccgcttctccaccgacgccaccactgtccttctcgcttgccgtgcctcatcaccgccgcaccgcttctctccgtttggtcagatctcagatccaaatttgagctagtactaacatttttgtgtcgcgttggtttagttttaatccgatccgatccgcaccgcacggcacggcggcgcggccatctagcgccgccatgggcgcctcctgctcctcccccttcccccctcctccttcacctgccgaatccaacgccccctccgcctccgcgatgcaccacccgcctcaccccgcggccggaggaggaggacccgtcatgccgtacgccgacgccgaccgcaccctccgcgcgctggccggcgcggcggagggcttcggccgccgcgccatcggcgggctccacggcccgctctaccgcgtcacctccctcgacgacgacggccacggcaccctccgccaggcgtgccgcgcccacggcccgctctggatcgtcttcgacgtctccggcgacatccacctccgcacctacctccgcgtcacctcccacaagaccatcgacgggcgcggccagcgcgtgcgcctcctgggcaaggggctccagctcaaggagtgccgccacgtgatcgtctgcaacctccagatcgagggcgggcgcggccacgacgtggacgccatccagatcaagccctcctccgccgacatctggatcgaccgctgcagcctcgccgactgcgacgacggcctcgtggacatcacccgcgggagcaccgacgtcaccgtctcccggtgccgcttctcccgccacgacaagaccatgctggtgggcgccgacccgtcccacaccggcgaccgcggcatccgcgtcaccgtccaccactgcttcttcgacggcacgcggcagcgccacccgcgggtgcggttcgggagggcgcacctgtacaacaactacacgagggggtggggcatctacgcggtggccgccggggtggaggcgcaggtggcgtcgcagtgcaacgtgtacgaggccggggcggagaggaaggcggtgttcaggtacgtgccggagagggcggcggaccgggaggaggcggaggccgggtgggtgaggtcggagggggacgccttcctcaacggggcgcggccgtgcctggtggacggcggcgacgcggcggtgttcaggccggaggagtactacgagaggtggaccatggaggcggcgtcgccggcgctcaaggaggtggtgcagctgtgcgccgggtggcagcccgtgccgaggccaccgggcgagtgatccatccatccatgttactagtgtatatcaaaaagaaatattcatgtattatccatttagtgtgtcagtacatcattaccaagtaataatcgtgtaataatcatgcacgtgtgtaatcctcataaaataagtttaagcaatgaatttaacccacaatc

SEQ ID NO: 16131 - DNA, 767 bp, Oryza sativa
  ref <308>: DATABASE ACCESSION NUMBER: AK066637
  ref <309>: DATABASE ENTRY DATE: 2001-12-06
gttgcgatcgagctgaaaaaaaaagagaggccacgaagagagctcagctgctgcctctagcttacttggtgataaggaggaggaggaggaggagggcaccgacatggccgcagccacggcgtacaccgtggcgctcctcggcgccaccggcgcgcgcgtccccgccgctccacgctccgccgcgcttctgccgcgccgcggcggcgtgctccaaccgctgcgcctccaggacgcgccgcgactgtccctgctccgcgtcagggccgcctccgacgacacctccacctcggccagcggcgacgagctcgtcgccgacctcaaggcaaagtgggaggcgatcgaggacaagccgacgttcctcctctacagcggcggcgccgtcgtcgccctctggctcaccaccgtcgtcgtcggcgccatcaactccgtgccgctgctccccaagatcctggagctcgtcggcctcggctacaccggctggttcgtctaccgctacctcctcttcaaggagagcaggaaagagttggcgaccgacatcgagaccttgaagaagaagatcgctggaacggagtaattaagcagctgcatttgtccggggaagttttggggggtgactctctagagtgcttgctgctgcttcctctgtgtgatgtttgtatatctctacgagaatatgttctgctcccatgtgcagtaacagcgtagtgcaaaaactgtatcaaacctactatcagttgtttcttcgaaattcaaaacaatttcttcgc

SEQ ID NO: 16132 - DNA, 1796 bp, Oryza sativa
  ref <308>: DATABASE ACCESSION NUMBER: AK066638
  ref <309>: DATABASE ENTRY DATE: 2001-12-06
ggttgacttgtcatccatagccattgacgacgacgagctctactagcaatcgatcgatcgagttctcgccgccatgagcaagctcgactactgcttcagcaatgactacatggtgctgcgccctgacagggccggcgcgtacgagctcctgcacctcctcttctcccccaaggtcggccggaacaaggccgtcgactgcttcaccagcaccgagctccacagcttccggcgccgcctctccatcttcctcaacctcctcctgcagctcttcctcctctcgctagtcggccccctcgtcgccgtcctcggcggcgcgctcgagttcgccctcaacctcgccagcaacgtcctccatgggagaatggagtatcctgatcggaagtcggcgtcgtaccgatcaatcaccgggctcatcgacccgagggttgatctggagaggagcatcacgccggcggacagccggtaccacgccgcgctctgcgtcatggcgtccaaggtggcgtacgagaacgaggcgttcatccgcgacgtcgtcacccgccgctggcagatggagttcgtccagttcttcaactgctggaacgagttcgagaacgcgtacacggcgcaggcgttcgtgttctgcgacaaggcggcggacgcggagctggtggtggtggcgttccggggcacgccggcgctggacgtggcgcggtggtgcgccgacgtggacccgtcgtggtacaagatcccgcggctggggcgcgcgcacgcggcgtacacgcacgcgctgggcgcgcagcggaacatcgggtggcccaagtgggtggagcacgtgaagggcaagccgcagcgagtgcacgcctactacgccatccgcgacgccgtgaagcggctgctggaggcgaacggcagggcgagggtgctggtcgccgggcatggctccggcggcgcgctggcggtgctgttcgcgacggtgctggcgtaccacaaggagaaggcggcgctggaccggctcgccggcgtgtacaccttcgggcagccgcgggtcggcgacgccatgctcgccatgttcgccgagaggaacctggacaggccgaggaagaggcacttccggatcacctacggcgacgacccgctgccgcgccttccgcacgagagctccgccgcgcacttcctccacttcggcatccgcctccacttcgacagcttatacaacctcaaggtggtgaaggagttgccgggagatgggagctcgtcgtcgtcggcggcggagttcgcgacgagccgcatcaacgcggcgtgggagctggcccggagcgcgtacctggggtactggaggagcgcctactgccgggaagggtggctgctgatggcggcgagggcggcggcggtggcgctgcctggcctgccgttccacagggtgcaggactacgtcaatgccgtcacgctcgccggctcgaacattcccaaggacatgtgacgatgtatcgagtttctgaatgcaatgctgcagagactgcagctgcaggcatcaaacttggatgagagattgcaactgcaatataatggcagatgacgactgcatcgagcaggctatgggacttgtcacttgtgtaactgtaatgtgacgtacgtactggtagtaattaattacgggtgcaactgtatgttgtcgcgactaattctgcttctactgaataaacatgtagtgataagtgatatgcttgtgagttgtgacttgtaagcatttgatgtactgggacaagtactactagtataactatgagaagataaataattgaagttcttgtttt

SEQ ID NO: 16133 - DNA, 3127 bp, Oryza sativa
  ref <308>: DATABASE ACCESSION NUMBER: AK066639
  ref <309>: DATABASE ENTRY DATE: 2001-12-06
gtggacgcggcggggccgccgtggaggccgagtgagtccacggcgttccttccgttcgctgctgctgcggcggccggggaccgggtgggggcgtcgttgtccggtcgacgcgatgggcttgccgcccgctcaagcaacctcagctccgtcaggaagaggccttttgttgcaagattaaccacagacattgtccaaactttcggaaaatgcaatcctgagtttaagtactcagattcactgaaccccaagcgctttctcaccaacccttcagttccagctcacaatgatggccttgataatgcaaattctgacctcatcttgtatgtcaacttggaattggttaataaaaagtcggaccggaggtacgttattaaagaaatgcttggccaaggtacgtttggacaggttgctaaatgctgggatggagaaactaacagctatgttgcagtaaaggttataaaaaatcagcctgccttttatcagcaagctatcatggaggtctcactgttgagcatgctgaatgagaaatatgatcctgatgatcaacaccacattgtccggatgctggatttttttctctaccaaaatcatttgtgtatagcatttgaaatgcttggccataacctttatgagctgctaaaaaggaatagtctaagaggtttgcaactgaaatatgtccgaactttctctagacagatattggatgcattggttgtcatgaaggacgctggcattattcattgtgatctaaaaccggaaaatattctcataactccaaatgtaaaaacagcagctggggttaaagtaattgattttggatcagcatgcttggagggtaaaaccatttactcgtatattcagagtcggtattacagatctccggaagtacttcttggttacccatataccacggccattgatatgtggtcatttggctgtatagtcgctgaactatatataggattgcttttatttcctggagcgtcagaatacgatgtcctatgccgtatgattgagattctcggtggacaaccaccagatgatctgctacgggaggctaaaaatactgggagattttttaagcaagttggaagtatttatcctggtattgaaatgcagaatggccctatcagtgcgtacagaatattaactgaagaggagattgaaactagggagtccaaaaaaccaaaagtaggaagatggtatttccctcgtggaaggcttgacaaactcatatatacatacccttggaagaatttgaatggggaaaacttgccagagacagaaaagacagatcgcttagcactggttgatttcttgagagggcttgttgagtttgatcctaataagcggtggtcaccattgcaggcttcatatcatcccttcataactggtgaagcgtttactggtccatatgagcctatccaggagactccaagaattcctgttggtcgtgttgcagcagttgatcataatcctggaggaggtcactggttagctgctggtctttcccatcaggttggaagcattaacagaggcctaccatttaataacgcttttgcaccaaagattcccttttcatatggaagcagctgtggcagcttcggtagccatggtagctttaatgacaatgtaggtcttgcaagcagctatggaagctatgatgtcaacagtgtgaacatgtatcattcaccactaggcccttctggattcaatttacattcacaagccggaggaacatttttgggatctagtccagatattagacgacgatcttatctctatcatggtggtggcattcgattaagccctgggtgtccagggcctatgtctcttggggcaagtccatcacaatttactccaccaaattctcagatgcaaatcccaagtactgctacaggaaagtatggttccacttctcctgcaaggagcagtcatggctcattgggaaaagctgctgctgtaggccaatacaatagaagaagaaatcttggtcacccacctatatcaatgccgcctcatgaatacacatctcagctgactcagggacaccatggggatggcaccattagtaatcactttgatggctatgctcgtggacattctggttacccacaaagtgcactccctaatcctggtcatttcagttggagaccacatacatgcgctggcagtggtttatcaacagacacttcgaaccatgggtcctttccaccatctcgatacggtggttttcctcctacgcactcatccaatgtgtcagcagatacactggcttccacctcatcaataccggatccagctgattgggatccaaactatagcgaagagtcacttctgcaagaggacacttcactatcagatgcgttgagcgatctccacctgaaggatgcaagtggtcaaacaaaccaatccagcagattggcccatatccaaagccatgctattgcaaactcaaactctttatccatgaatcaaagaggtgaccgcctgttccatgcatcaactcttacagagagtagtgcctctacaggccatgtgacctatgatggttaccataatgcaaactattctcagctgaattttcaaagtcgccatggacaaccatttcagcggtataaccatatgactgcgagctacctacgtccaatggggaatcatcacaatggtcagcctgtatggcctaattatggcatggcagaacctccacctgctactatggctgacggaatgccttggggaggaaggcctggtcactcttttacagcaggcggactgccgtcttcctttgcaggaaaggattttggaaggattttctagtatggatctggaggaatgccattcaattggttgcattagtagtttgtatttgcaactcttggttgcattgcttacgggctgttgattttgcagtttgttgcattcctctaattgatcccttcgcaatgctccggctcatagaactgtatggtatgggtctgtaattgtagcattctctgttggtttcttcttttcgtttttggtttatttgttatacatcgagcggaggcttctgcctgctgcaaaaacccagcgggaaaaagaagttgagcagcccctactttcagaatgccatgcttttcatgcg

SEQ ID NO: 16134 - DNA, 2970 bp, Oryza sativa
  ref <308>: DATABASE ACCESSION NUMBER: AK066640
  ref <309>: DATABASE ENTRY DATE: 2001-12-06
ggcagccacgctcctcctggatctcctcacgatgggttcgcatcgtcaccgcagcgcagggcaatgcagcctcgtgcagccgccacgcctcatcacctgccttctcctactgctgcttctgcttctgtcgccaccggcgctcccgtgctcggcgtcgtcgtcgtcgtcgtcgtcgtcggtgatcactcacctcccgggattccatggtcgcctgccgttctacctcgagactggatatattggtatcgaggagaagactggcactgagctcttctactacttcgttgaatcagagacgaaccctgacacggaccctttggtattgtggctggtgggtgggccccgttgttcggccttctctggcttagcctacgaagtaggtcctttgaattttgtgttggaagcttataatggtagtttgccaagattggtttataatcagtattcatggacacagatggcaagcataatttttttggatagtcctgtcggttctggtttctcatacgcacgtgattccaatggttacgatgttggggatatatcatcttctttacaagtggtcacatttatgaaggagtggctcaatgatcacccacgctaccgctcacataatttctatgttggtggagcctcatatgctggaaaggtggttcgagttatcgtgcaatacatttcagaagcaattgaagaacaaaggcaacgaccattgattgatcttaagttacagggatatatagttggcaaccccataacaggttcgaaattcgataaaaatttccatgttccctattctcatggcgttggaattatatctgatcaattatatgaggctgcggtaacgcattgcaaaggagattttgtgaacccaacaaaccaattgtgtgctaacgtcgtatatactattaataaactcatgtctgaagtttcggatggaaatatcttggaggataaatgtgttaaagctgcaccaaaacctacaatagatgtttcagcaagcagggcactgctggaagaatacagccggctaagcaagccacctattcgaccttctatggattgcgcttcatatggttactacctatcatactgctggatgaatgacaatacgactagagatgctcttaagatcaagaagggaaccattggtgagtggttaagatgaaatagaggtgtatttccctatgctaaagacatcccaaacgccttggattaccattttaatctcaccacaagaggttaccgagcacttgtgatgagcggtgaccatgatctcaaggtgccatttttgagcactcaggcatggataagatcctttaacttcttcatagttgatgactggagagcatggcatgtggatggccaagctgctggattcacaattacgtatgccaacaacttgacctttgccacagtaaaggtgattttatcctttaatgttctttcgattgatcttttctagttgatggatcctatttgtgtgcatatagtgtccacccctttagatacataagtgacataaatgaagagttgtggatgattcatttggttggttgtgcagggtggttcccatgtcgctacagtaaacaggcctaaataatctttcgccatggggaaacggtggctagccaataagcctctatgatgttgccagctcctatttgtcagaaatgtttgcagggttttaactcaaccatgtgtctgctgtccaagtgccatggttctcgaaaaaatactatttgtaatggagcccatataaatagtgttctcttctgccgaaaggcaggtttcacttaaagtgaaatggaaaacacaatagttatatattaatttctctcgaaaaaatttgatccctactacacatccattgggttctatttataggtttacaaaaatagtgttctcttctgccgaaagacaggtttcacttaaagtgaagtggaaagcacaatagttgtatattaacttctctcgaaaaaatgtgttccctattgcacatccattgggttctatttataggtttacaactctaggatatagtaggctagtgatttcacataaccgtcctcatggctgggactcatttgacccatctgactggtccatgggcctcactgggctgcaatcacaccacttgttggtcctctctttattttggtatactgaggccggccgtgctttgtcgtcctttcgctttgcttcaccaccggcttgcttcgccatgccttgcctcacgctaccaggtctttgccttttggtgcttcgctccgttgttccaccttgcttcttgtcgcctagtcttcaccttgcaccactttgttaggctctaatgttgcttcggcatgtcggtcgaaggcccatagcttacctccaacaaatagataaaaaaataagagtagagtgcttgtgttattttggtctcgatgctctcaaaatgtagttatatgtctctatacttgtcaagtgtgtcatgctggtctcaaattgtgttgataatcctatgtagtgttgacgtgacatgcccattcatgttaatgtgtcatcttcaataactctacactaactagcaactaggtcatttttttcttttttttccttcttactttttcccctttttctctcccctttcctctttcttttcttcgagacgttgccaatattgctttctcttcttctacctttgactaaatctttgcctcgaggtggcatattctcggcgtcgcgcggctggagggtgaggatgggtgggaggtcgtctggcgacccctactcagtggccgctgctcgtgctgtcgatcggggccctcttcgctgcctccgtgcgctggccacacctgcttcctcagccatgaaagcgtgtattttttttcttttttatttcgtgcagtgtggtgtgatccaatgtacagtaaagcatttatctcttgatatattttttgtgtaaaataattactgcattgaaaggaaggc

SEQ ID NO: 16135 - DNA, 2798 bp, Oryza sativa
  ref <308>: DATABASE ACCESSION NUMBER: AK066641
  ref <309>: DATABASE ENTRY DATE: 2001-12-06
gactcgcgtcgcgtctcctttctttaattgcttctctctcttctcccaattgcagtcctctcccccccactaatcccacccggtaatccctctcacgatgaacggccgcggcggcgattctccggcgacgaattgctgcaggggcggttcttcttcttcgtcttcgtcttggcgccggtcgatgtgggtctggtcgttgagtttgtatgcgatttgaccgctcccacgcacctgtggcgtagttggttgtggtgcaactgttcgagctattgactgtttggctggctctctcctcggcgttattctgtggccgtttgggggattgggagtattggaatcctactcttccagttctcctaagttcttcacaggaacaagtctgcaatcaggatggtttctgaagtctttgctaactttgagcttagtgacttgatgggtaattgattctcttgggtgttgttgcatttgtgctgtaacgtggataggagtcatggaaggtgtggtaaccagttcagttggtgaaccaaatcaagacaatgagccaagggattcttcaatagaacttcccagagtcattactgacatggagacttcagccatgcatgatcctgaagctcaaaagctaattggacacgaagctgatactgaattaacgccttatgaaggaatggaatttgagtctgaagatgctgcgagggatttctacagcaaatatgcaagacatgcaggttttagaattcgaatcagcaggtacactcgttctagacgtgataattcaataatttctcgtcgtattgtctgctcaaaagaggggtttcatgaaactcgtgattgtgaaaacctccatgtggaccagaaacagcaagcaagggtaggaactagagttggttgcaaggccatgttaatgattaaaaagtttgggcctgacaaatgggttgttaccaaattcataaaaatccataatcatggaccggttccaccaagaaaacctcatgctggagaacatcatgattgtgatctaatggaaaatccacattctattgaggtggaccctattgatgagccagtcgagggtatggaatttgaatctgaagaagctgctaaattattctatattaactatgcgagggttaatggtttccgtgcacgtattagcaggtactgccgttcaagacgtgataattcaatcatttcacgccagatcgtgtgttccaaggaaggcttccgtgaggttcgagccagaaaagatattacagatggaggcaaaacaacgaagcgccctagaatgataacaagagttggatgcaaagctatgattgtagtgaaaaggatgaactctggaaaatggatggtttctaaatttgagaaggagcataaccattctttgttatcttctagagcagtccctattacatcaaatgattcttctagagaagttattgattttgctgcaacgagtaatgatcctaatgaagtaaaggctgaaggatgtagcacaggaattcaatgtaattctacagattcactaactgtcctttacaaccatctatgtcaggaagccataaaatttgcaaaagaagggtcagttacagaagaaatttaccatgtggcaatgaatgccttgaaagaggctgcagagaaggtttctgaagtcaaaaggagtcacccgacaatgtcacagagtaaacatgaagttatgcaaatggaaactatgagtgcttcgcaatgttcaaatgatgacaaacagaaaacaatgacaccacagctcaagtttttgcaagagcccagtcccagtcttgtgctaataccaaccaaccttttgactcattcaagctcgaattgtgctgacaatattccactctcatgtgatttaactataaatgcgggggaagtcaagcatgtatcagaaagttcttgtttggctgcgaacagaaaggaagactcttcgcagaaatcccagggaaaggatgaaaggtttcatgtactttctaaagaaactacggttgctattcctgcgatacctctcacgctgtacatgcctataatgaagaatccaactggagattctgcagatggccaatacaggttgttggccgctcctattgaagcagttccaatttcataccgtcctgcagaacccatccaacaaccacacggaagttttcctaattcagggccactacccggttttctacctaaactgtacaaacgaggaaaaggtccaaactcgctggtgcatgctactgctcttgcttgtggtgctcgtgtcgtgcctcctgaggaggctgcctcgctgatcaaggctattgagtccaagatcagatctggaggagccacaatagcaaaattgccttcaagcagcttgacacctctaattcctgaggtcgcctctatgtcatcttctagtgaagatgatgaggaaaatgaccacagtgagccactgatggcgagtgttgaacacaactgccatgatcagagctctgaggaaatgaagttggaggctgatccaccatcagagttggaaactgaagctgagaattgttctgcgcagccagaaaatgaaaacaacggtcctactcattgctgacaactgagaagtgagaactgaagtattgaagctttctgaaatcaaagccccacaaggtagtgattatatatatactgtaaattttgagcatttacataagattggatttaggattctaacagcttgtctcacttgaattatagattctaattgtgataactcaaataatttacttcaataaaggacttgtaaagagggtcgccttgctgtt

SEQ ID NO: 16136 - DNA, 1331 bp, Oryza sativa
  ref <308>: DATABASE ACCESSION NUMBER: AK066642
  ref <309>: DATABASE ENTRY DATE: 2001-12-06
attctactccagaagtccagaatcgaataagtaaaagacaaaatcaaaaattcagaccaaaaaaaaaatcagagaaatgaaaagaggctgagcaacaactcacctcacggcggcaatgggcctcctcgtccacctccccaacctcgccggcgcccgccgcccatcgccgtgcggcggccaccggagggcccgcggcggcgcgcggttctcggtgtccgccgcggcgcccggcgggggcgtcaaggaggaagaggaagaggaagaggaggaggaggagaaggggacgagggggaaggagagaatagtgattcgggtgtcggacccggtgcgggagaggcggctcccgccgccgctcttctcgtccccggacgccccctcgccggcggcggggcggcggcggaggaagggggaggacgaggacgacggggaggaccggcggcggcggtaccacgtcaacgtcggggacgccatccgggcgctgcgggaggagctccccgccgcgttctaccgggagcccagcttccatatctacagagatgatattgtcttcaaagatcctatcaataatttcacgggtattgataactacaaaaggatattctgggctctacggtttactgggcaaattttcttcaaagcactatggatcgacattatcagcatatggcagcctgtcgaggatgtaatcatgatccgctggattgtccatggcattcctagagttctctcggatggccctggcagatttgaaggcacctcagagtataagtttgacaagaatgggaagatctatgagcataaggttgataatgttgccaagaacacaccaacgaaatttaaggtcttgccagtcgtagagctcatcagatcacttggatgcccatctactccaaaaccaacatattttgagacgtcgtccctacagctaatatcgctcttgccattctggttcaaattgacttggatgagatgctacttgtcattgtaccttatcctagcaaatttatcaaaaggatgaggatcgatggttgaggtccaacccaatgcctctaaattttgcccttccattgtatggtagtgtatacctttgagcagctcgccaatacctacatgtaaacgattttgtttgtgtacagctcaaagtttctgtctaggaatgtaggcatagctgaagttattccaagatcttggctgagttttgtaagctgtatattgccccctacctgggtatgtaatcaacagacgaggcaagtaaggaaatcttacatgcttgcacgttgcctgatactgaactttttgctatcgaattgcaaaaggttttataccaaacc

SEQ ID NO: 16137 - DNA, 2168 bp, Oryza sativa
  ref <308>: DATABASE ACCESSION NUMBER: AK066643
  ref <309>: DATABASE ENTRY DATE: 2001-12-06
tccccgtgcagttgccagttgattggttcagcgtggctgcgcgcggcgcggggcggacgggcagacgcgatcgacgacaggcaccggctccggctccatggcgcgcctccttcttctgctcgtgctcatcggcggcatctgcgccgccgccgcggcgagctcgccgctactcccggcggcggagacgatgcgcgtgagcttcgcggggaagtcggagttcaggacggtgaacaggaagccgctgggtacgtgcctggacccgagcccgtacctggagatcagcgtcagcaccggcggggcgccgctccccgacgaggcgttcctcaacgtgaccgtctccggcgtccgcaggcccgaccgctcccactggctcgccatgatcacgccttcaaactccagtgtcttggggtgccctctgaacggtgtcaattacatcgagacaggtgatctggcgagcctccctcttctgtgccactaccctgtcaaggcccagtacctgacaagcgacccgggctacctgggctgcaaggcctcggcgtgccagaagcgccgcgcgtccggcacctgcaaggtccggacctgcgccgccacgctggcgttccacgtcatcaacttccgcaccgacgtcgagttcgtcctcttctccggcggcttcgcgacgccgtgcgtcctcaagcgctccggtgcgctcccgttcgccaaccccgccaagccgctccacggccacctctccagcgtcgactccaaggccacctcgatgaggcttacgtgggtgagcggagacgcgaggccgcagcaggttcagtacgggacgggcaagactgctacctctgtcgccacgacattcactcataaggacatgtgcagcatcgccgtgctgccgagtcctgcgaaggacttcgggtggcatgatccgggttacatccattcggcactcatgaccggtctccagccatctcagtcctacaattaccgttacggaagtgattccgtgggttggagtaacacaaccgaattcagaaccccaccagctgcaggttcaggcgagctgtccttcgtgatctttggtgatatggggaaggctccactggacccatcagtggaacactacattcagcctggatcgacctccgtggccaaagcagtagctgcagagatgcaaaccggaaaggtcgactcgatcttccacatcggagacatcagctacgccacgggcttccttgtcgaatgggatttcttccttcacctcatcacgccgctcgcgtcgcaggtgtcctacatgaccgccattggtaaccacgagagagactatgcaggatctggatcggtatatccgacgccggattcaggcggcgaatgtggagtcccctacgagtcctacttccccatgcctgcttccggtagggacaaaccatggtattcgatcgagcaagggagcgttcacttcgttgtgatgtccaccgagcacgagtggtcagagaagtcagaccaatacaattggatggaaatggatttgtcatcggttgatagatcaagaacaccatgggtgatcttcattgggcatagaccaatgtattcatccagcagcggtattccgcccagcgttgatccgaacttcgtttcctctgttgagccactcttgcttaaccacaaggtcgatttggtcttctttggccatgtacacaactacgagagaacgtgtgcggtataccagggcaattgcaaaggcatgccaaagaaggacgcaaaaggagttgatacctacgataacagcaactacgccgcacctgttcatgccgttgttggagcaggggggttcaacttggatggcttccctaagattggtctgcatagctggagcttatcaaggatttcagagtttggatatgccagggtacatgcgacgaaaactgatatgttggttcagtttgtaaactcgaacacgtcggcagtccaggaccaatttaggattgtgaagggagccagatgatccaaccttacaagcaacttgatattcacaaggagaaacagtagctacttttttttatttgttagtatatatagctaggtacgctgtaaatagatgctgaattacacacataaatgctatagactatcaggctgtgtacgcggctacaataaaattaatactatcatttttctccctg

SEQ ID NO: 16138 - DNA, 1164 bp, Oryza sativa
  ref <308>: DATABASE ACCESSION NUMBER: AK098962
  ref <309>: DATABASE ENTRY DATE: 2002-08-28
gagtcgcggagtcggtagcatcggggcgaggacttggaggcgacaatggcgtgctctctcctgccgccgctcgctcccgtttcccctccgcctcgtctcctcctcccctcctcccgctcggctctgctccctcgcggtcctagggttgcgccccgagtccccgtttccccaccgcgcgcgctgccggacaccgctgtgggggcggcggaggcgctccgtggcgcgctcgccgacgccttcctggcgtcgcctccgacgtggaggtcggccgccgtgagcaacctcgccatcttcgtcgccgactccccggtgctcctgtctggcctctccgcctccggtttcgccgccgcgtacctcctcggcaccctcacgtggcgcgccttcgggcccaaggggctcgtcctcgtcgcctcctacttcgtattgggcacagcagcaactaagttgaaaataaagcagaaagaagctttgggggtggcggagaaaagaggaggaaggagagggactggaagtgttattggttccagtgctgctggttgtgtctgtgctctgctatcaatctacaatgtaggcagtgcagcgttggctgagctctggagacttggcttcgttgctagttattgtactaaactaagtgacacagtttccagtgaaatagggaaggcctacggaagaacaacgtacctggtgacaacacttaaggttgttccgcgaggtacagaaggtgcgatcagtattgagggtactctagctggaattcttgcatcgataattcttgcaagtgttggttatctcctggggcaggttaatgtatcacaaggcgcagtatgtgtccttgcatcccagattgcaaatttttgtgagagttatattggtgccacactacaagataaagaaggttttgaatggctcaccaatgatgttgtcaatgtactaaatatctcaactggtggtatattggctgttctgatgcagcagttgctagtaagttggcgctcttgaatacttttttatgacttcttttgttcagcctccgttattataacttattatggagaaatgactggttgatggcaatgttcttacatgctgctgccatgtgaaatggaagtataaattccggtcttagagatcatatttgagcggataaacatttgtggatgc

SEQ ID NO: 16139 - DNA, 1864 bp, Oryza sativa
  ref <308>: DATABASE ACCESSION NUMBER: AK066644
  ref <309>: DATABASE ENTRY DATE: 2001-12-06
gaaagaaaagaaaaaaaaatctttgcccggcgcggtcgcggcgccacacgcgtgacacacacccgcaccgcacgccgagagccgacaccgccgcgccgccgctccccttccccaccgcgccgcgcgcggcggcgatggattccacggcctgcctccgcctcccgttcctccccgcccggacccgcccctcctcctcctcctcgtcgtctccccgacgcgccgctcgcgcgtcctccatcaaatgctgcaccgccgcctccgacgccggtgccagttcggcctccatctcttccgcgtcgccgcggcggccggacgtggtgaacggcgtggggcccgccggcgtagacggcctcgcgggtccgcccgtgcccgtaccggactcccccgcccccgcctcccgtgatctccactggctgcctcgccctctcaccagcgccgacctgatgggcgtcagcggggaggggctcaaggttgcctaccagggttgccctggagcgtacagcgaggcggcagcgaagaaggcgtacccaaattgccagactgtgccctgtgagcacttcgatactgcattcaaggctgttgaaaactggttagctgacagggcagtattgccacttgagaattcattgggtggtagcatacataggaactttgaccttttacttcgtcatagattgcacattgttggagaggtccgtcttgctgttcgtcattgcctgttagccaatcccggtgtcaagattgaaaacttgaaaagtgcaatgagccatccccaggctcttgcacaatgtgagcacacattgacagagttcggaattgaacatagagaagctgttgatgatactgctggtgcagcaaagactgtagcagaacaaaatctccaagataccggtgcgattgccagttcactggcagctgaactttatggactgaatgttcttgctgaaaatattcaggatgacaaagataatgttacccgttttatgatgctggctcgagaaccaattatacctcgcaccgataaaccattcaagactagcatagtcttttcacttgaagaaggacctgggcaactctttaaggcacttggggtgtttgcgctgagggaaatcaacctaaccaagatagaaagccgcccacacaagaaaaggcctcttcgtataactgacgacagcttttccacaccgtcaaagcagtttgactacctcttctatatggaccttgaggcatcaatggctgatccaaaaactcagaatgctcttggaaatttgaaggagtttgcaacctttttaagagtccttggaagctatcctacagatgtaaatgaagcttaaatagcaagcaccttctgcatatcacatgctagattaccagggatggattgagcgtgggctgtcaatttcacagcgagttgggaagtcatcaataatttctagactgatgctaatttgaagagcaataaagcatatccatgtattatcggcaaggaagctgcatgtgacttggttagaagatggaaaagaacaaaatagtgggttttacgttttactaagagctttatagtgatatacttaccaccatccatgccctatagtccttatgttgtaacttatgttcttctaagcaatcatgttcaacagaggtagagctcaaagggttgaatgtttggtaggtgccggtggttataggtagtggtgtagaacaatttcgctcgttcccaggggatgcgctggtcaaacccttcagtcggcttgccacccaactgttgtattttcttgtcctgtatgtgctcatggactcttagtcgtgagctcgtagcagatagttcaatcatgtttccctcgtgccaacatggcacagtacc

SEQ ID NO: 16140 - DNA, 1736 bp, Oryza sativa
  ref <308>: DATABASE ACCESSION NUMBER: AK066645
  ref <309>: DATABASE ENTRY DATE: 2001-12-06
gttcccgattcccactgcggagaagtcaaatacggccacctggttcgctacaacccaagcccaccgccgctgcgaagctgccattcgccgacgaacagctcgccggagaggctgctttcccggagctttgagcttcttggactagctctgctcggattcttgcttggttgggattatcaggacatgatggcagctgttgaaaattgatgacatgcttatgtggatattcacaagtgaaactgtatttgttgaactgcagaattaaggccatcatagtagttttagatttcggtaatgggttgtttttgtatatttggcaagagaagggcaacccgacagcaaagttctcagcataatgatgacccctctggtgatatgaatataacaaaattcacttacaaggagctttcaagggttactgaaaattttagcccgtctaataagattggtgagggaggttttggatctgtgtataagggaaagctaaggaatggaaagcttgttgccgtcaaggtgctatctttagagtcaagacagggagcgaaggaatttctgaacgaactcatggcaatttcaaacgtatctcatgaaaatcttgtcaagctttatggctattgtgtggaaggaaaccaaagaatccttgtctacaattatcttgaaaataatagccttgcacaaacacttttgggttatggccacagcaacatccagttcaactgggcaactcgagtaaatatttgtgttggcatcgcccgtggactaacatacctccatgaagttgtaaatccccacattgttcaccgggatatcaaagcaagcaatatacttctagataaagatcttacgccgaaaatatctgattttggtttagcaaagcttttgcctccagatgcatcacatgttagcacaagggttgctggaacattaggttacttggctccagagtatgccattcgaggacaagtgacacggaagtcagatgtttatagttttggtgttctgttactagaaatagttagtgggagatccaacaccaatacaagattaccctatgaagatcagatacttcttgaaaggacatgggtgcactatgaagagggtgatttggagaaaatcatagacgcttctttgggtgatgacttggatgttgcacaagcctgtatgttcctgaaaattgggcttttgtgtacacaagatgtcacgaaacatcgacccacaatgtcgatggttgtccgcatgctaacaggtgaaatggatgttgagctggcgaagatcagcaagcccgcaataatcagtgactttatggatcttaaggtcaggagcatgaggaaagaagtggacatagtttcatcctcaacatccacattgctatcttccatcatggcacactcttctcctttgttgtcgcaagagacaacagaagcctccatgacattcaccgcgatatcagatcgtgagtgacccgaggttgaatgcagatacgaagattgcatcgacaaaaggtagtgtaggagaaatgttttccagaaatctttttgctggtttgatttttttttcgatgtatagatttacttcatttatagcctgaaaagcagtctagagtgaagaaagtacatgatagtatatcttgtttgttcatggaatgtctcctgtttttgaatgtgcaatggacacttcttcagttcttaattgtacacgacaccttgtctgctgcttgtgttctgagataaattgcc

SEQ ID NO: 16141 - DNA, 2918 bp, Oryza sativa
  ref <308>: DATABASE ACCESSION NUMBER: AK066646
  ref <309>: DATABASE ENTRY DATE: 2001-12-06
gatccgccccgcgagcgagcagaggcggcgctgccgctcgtcccgctgcttccgccgcatccacatccttcgccgccgccgccgccgcctgcgccgatccccccatccatcccgcgagcgagcatcctgctgcttccgccgcatcctgaaatttggcttaaccttgatgtttgtttgttcccaaaaagtttgggggtgttgaactgaaccccccatgccccatgttagatccgcccatgaatggatcatgattcactccaaaacactatggagcatcctgttcctggagaggagcatgaggaggataacagcatgaaagtggatgtggcatttgatggagtgcacagcccgttccggtacaggcacaagaaaaggtccaaggtttgggaggagtacaagcccatctttctgaatgggaaggttcagtttgcggagtgtctctacagccataatcgcctcagctgcaaagattccaacggcacaagccatctatggcggcatcagaaaatctgccctggcaaggaggaagcggcgcagaggcgacagaaggattcctacttcccatgcgttttggtgaatgagaacgatccagtttcaccccacgatccggtcaatgatgttattacagagacgcttagtgatataaactcggtaacacccagcggtaacagattcacgtcaaaggtgtggaaggagtttacacctgtctatattgaggggaaactccaggctgcagattgcattcactgccagaagcgcctcagtgcgaataagttcggggggagaagccatctgagtcgacatcttataacctgtgcaggacgacgtggacgtggagggggccaaattcatcagaagggtttattttatccttctagcgtgcctagtttgaagtccagggtgcaagatgagctctcacctgccttgacaaatgggaaggttcagatcgcagaatactctatcaagcttctgagggcaagtagctctggtgactcgacccctaagcccattcgagtggtaccagcagagcattccgtgccgactccagattatacaagcctgatgaaacagaggacctcatttgtgaccactccagctggtcaggaaacatctgatccagacctagtcgggatgatagctttgcatggttatcctttgtcaattgtggagcacgaagaaatgatgagatttgtaaagaaactcaaccctgtggtcaatttagtctctcgcaatgctatggaagaacattgcttgacactatttcaggaggaaaaggaaaatataaagggtaaaattgcacatttttcccgacgtgtctctctgtcagcaagcatctggactcctgatggacctgagacaacagtaaattacctctgtttgacagcacattatattgatgaagactggaaagttcataggataataataaaatttggaatgttttggtccgcgcctgctgatttgggaaggatgatacattgtatggaagcctgtgtcccagagtctgagagcggatcatataatgtcatattggatgccattagagattggaatcttgatcagaagcttttaagcttgacttctgttggtgaagttaggggtgacaccaatacttcattgctaaaggaaatgcttatagagaagaagtgccttcctattggagggacgctattcaatgttgcctgtgtggactatgtccttaacagtattgttttcaaagtgcaagcagatatacttcgtcttgttggtgacatagtaatggattttttagtgtcattgacccagcagcagcttctggaagttatttcacagacgggtctaaagtgtccacaagaagatgctaagtggtggcacaaactttattttagacttgaagtgcttttgcatttcaagaagtcatttccttctgaagaaagggtgtccccagaagatacaaaaactgctgagtccgtttgcaagattttgaggacaatttatcgtgtcattgaagttatttccagccctagctctccgacagcaaatatatattttaacgagatatggaaagtcaggacagttttgcaagaagaagcattaaatgatcacagagaaatagctacagtggctatggtgatgcaggaagcattcaatgagtattggcaaaattcatatttgtggttggccatacctgttgtgctagaccctagattcaaattcagtttcattgagtttcgtctgaaacgagcttttggaacagattcggcaagctacctatctgtaatacgtgaaacagtccgggaactcttcaatgaatactgccattctttgaatcaggcaagtgatgttgtttcaaacagtgaagctttgtgtgcagatgataatgattcgttggaagattgggatcagcatctccatgaacaagcaagtcgtcagctatcttcggagcttgatgattaccttgaagatggtttagttcctagaaaggatgattttgatattttaaactggtggatgactcatagtactaagtacccaacacttgcaactattgcacgggacatcttagccatgccagcatctgctgttcaatctgaagcagcattcagtagcagtggaccagtaattccaaaacaccagagtacattaaacatcagaacaatcgaggcacttgtttgtactcgagattggatgagataaaactgaatcttgtttccttgttttcctgtattggaagtttggaaccatactatatgatcagatgaatgtcagaaaccaaagcctacaatgttagtaactttatatggaagtacatattagaatcttacatgttcatgtgcaatcttagcagctacatcactttaggatgttttagatcatgcttgtaatttgtaattgaaacattttgatcccattggcaatcatgaatatcttgttctgcg

SEQ ID NO: 16142 - DNA, 3273 bp, Oryza sativa
  ref <308>: DATABASE ACCESSION NUMBER: AK066647
  ref <309>: DATABASE ENTRY DATE: 2001-12-06
gagtcaaacccagccaccatcggaattcgagggcgcggagcagcggcgaaatgagcggcggcggcggcgaggtcgaggcggcggcggaggcggcccctctcctcgtcccccacgaccctcagccggcggtgggggcggaggtgcggaggcaggtggggctcgcggcgccgctggtggcgtgtagccttctgcagtacagcttgcaggtggtctccgtcatgttcgccggacatctcggcgagctctccctctccggcgcctccgtcgcctcctccttcgccaacgtcaccggcttcagcgtcctgctgggaatgggaagcgcgctggatacattctgtggacaatcatatggagcaaaacaatatgatatgcttgggacacatgcgcaaagggctatctttgttcttatgcttatgggtgtcccgctggcttttgttttggcattcgctggccaaattcttatcgctcttggtcaaaatcctgagatatcatctgaagctggactatatgccgtgtggttgattcctggtctttttgcatacggtttgcttcagtgccttaccaagtttctgcaaactcaaaacattgtccatccactggtagtttgttctggggccaccttggtaattcacattttgctgtgctgggttatggttcattgttttgaccttggcaacagaggtgcagctttgtcaatatcattatcttactggttcaatgtgatattgctagcaatatatgtaaaagtctccgaagttggcagaaggagttggcctggatggtcaagggaggcacttaagttaaaggatgttaatatgtatctaaggctagccattccatctacttttatgacttgcttggagtattgggcatttgagatggtggttctccttgcaggctttctacctaatccgaaactggaaacttcgattttgtcaataagcctgaatacaatgtggatggtttatacaattccaagtggcctcagcagtgcaataagtataagagtttccaacgaactaggtgctaggaatccgcaagcagcacgcctatcagtctttgtttcaggaatcatgtgcctaaccgaaggcatacttgtagctatcatcacagttttggtacgggatatctggggttacttgtacagcaatgaagaagaagttgtgaaatatgtcgcagcaatgatgccaattcttgctttatctgacttcatggatggaatacaatgcacactatcaggtgctgctagagggtgtggctggcaaaaagtctgttctgttatcaacctgtgcgcttactatacaattggtatcccttcagctgttacttttacatttgttctgaagatcgatggtaagggactttggttgggaataatatgcgccatgacagtgcaaattttagcgctggttgtcatgctgcttcgtacaagctggaatgaagaggctgaaaaggcccgggctagagttcagggttcagatggaagaatcacattggcctgaacatggatttcaccagttttgagtcatgattataccaccacaaaagcagttattgataccatagtactatatatagattgatatggtgtgctgtgaatgaaattctgcatagttcgccctgcaacacaggataaagatgttatcatttatcatacatgtgtccctgtattgttggaccagaagtcttcggcacgtaaagctttagataaagcagcacctgacctgagtcagagcttctggacgcatatcataattgcttccctgcttggctagcttaatatacaaggccaattaagaatgcatttatcagaagaacgtgcacaaaccacccttattgatggcatccaaaagctacatttcctctgccaattaggtctgtgaggtcaaaggtctgatgaacctggcaaaagcagagacagatttctgaccacagaaccttcatctcagtgcagaattttcaaagactgcatttctattgtacagtaacatttccctggaaagactcctttacatatgatcagagacaaatgaggcttttgcaaatgtaaaacaatgaagttccacctttgaaagttgaaacccactagaaaggagacagataaagcattatctatgttgagcatatgtttggagtactaaggaggaacttagcatctgttgaggaatttagcatctgttgttgttagagaagaaaataatgagaaaacctgtgatcaaagggattcgaactcaggcaagcatgctgctccctgtcagccgagctctccctgccaaccaagctaggtgccgttctcttctacataagtagtagacgaaactcagctggttttaactgcatagacaagcattttgctgtccttctgtcagtaaccatgaaatgcaacacacggtcacccttgagctggtgagacacagctatcagccacaaagcagatagtactttgcttacaggagatgattctggagtgctttctttctggtttcggcagctcaatgatcccaccgtgaaaggcgaggaagcaacagaaatttggtagctcctccaaagtggagattatcgtggaagctgagctgtttccaaatcccaatactacacctactaatcgtctcttatctgaaagataccactgatcatttctgaataacgaaaaaaatgagaatgtgtaaataggcaaagttctatgattaaggccacgattgtcggttatttgggcgttttccacatatgattgatggcatctaatgatcacatttctactgattatatctctgggtcggttcagtaatgaggaaatgagagggaaacggctccttcaagttgttttactgtcttgtcgtgcagtctttttcttgtgggaaacagttcaacaaccactgcagcttgttgggtacctgggttcatggattcttttaagaccttttctgtggtggtcttgtttggcagtgcttaccttaaagctcttgcaaactggcttctcagatgaactctgaatatttcgttgtctgtacaggtagtgtttcagtttaccctatgagctacaactaacgacataatgtcagtgggtgcttaaagagactagtctctaggtacttttaaggttgtcagaattaaagactgccaagatcttggaagaacactattggtggtggcaaaagtgaattgttcatcactcccccaaacaaataattagcatttttcatgttgacattttatcgacaacaaccaatttacaaagtgtgcaagtgtaaattaacctttggacacttgtcc

SEQ ID NO: 16143 - DNA, 1762 bp, Oryza sativa
  ref <308>: DATABASE ACCESSION NUMBER: AK066648
  ref <309>: DATABASE ENTRY DATE: 2001-12-06
gctcgcccgcgtcaactccatttcctcctccgccgccgcctcctcctccctgcttgtcctcgccttgctgccgccccccgccgcggcgaccgagcacgcgcacgagcaggagccatggatgaggagtacgacgtgatcgtgctcgggacgggcctcaaggagtgcatcctcagcggcctcctctccgtcgacggcctcaaggtgttgcacatggatagaaatgactactatggaggggattccacctcgctcaaccttaaccagctgtggaagaggtttagaggggaagacaaacccccagctcatctgggtgcaagcagagattacaatgtagatatggtcccaaagtttatgatggcaaatggcacattggtaaggaccctgattcacactgatgtgacaaagtatttgtcattcaaagctgttgatgggagctacgtcttcagcaaagggaagattcacaaggtacctgctagcgatatggaggctctgaagtcccctttgatgggcctttttgagaaacgcagagcaagaaacttcttcatttacgtccaagattatgatgaagctgatccaaaaacacatcaagggttggatcttactacaatgacaactagagaactgatagcaaaatatggtttaagtgacgatactgtggatttcatcggccatgcacttgctcttcatagagatgatcgttacctaaatgaaccagcaattgatactgtaaaaaggatgaaattatatgcagagtcccttgcacgctttcaaggaggttcaccttatatttatccactgtacggtctgggtgagctgccacagggttttgctcgcctaagtgctgtttatggtggcacttatatgttaaataagccagactgcaaggttgaatttgatatggaagggaaagtctgcggcgttacatcagaaggagaaactgcaaaatgcaagaaagttgtttgtgacccttcctacttacccaacaaggttaggaagataggaaaagttgcacgcgctattgctattatgagccacccggttgcaaacacaaatgactcgcactcagtccagattattttgccacagaaacaacttggacgcaagtcagacatgtatgtcttcggttgctcatacacacacaatgttgctccaaaagggaagttcattgcatttgtgtctacagaagcagagactgaccatccagagtctgagctaaagcctgggattgatctacttggtcaagtagatgagctattctttgatatctatgatagatatgaacccgtgaatgagccatctcttgataactgttttgtctcaactagctatgatgccaccacacattttgagacaacggtgacagacgttcttaatatgtatacactgatcactggaaagactgttgatctcagtgtcgatttgagtgctgccagtgctgctgaagaatattagagttcacaatcaaaatccaatcattcacaaagatataatgctattccttggcgaacaccacaggtcagaccataatgaatgactgggatggttattcgagctccagattgtgtattcagtgttctggccaatggtctgtagcatgcttgttgttatcagtaatatgctgaactgttgcttcagatgactgaatgatggtggtttttatttgctactttcagtaatggttgaatgatgtaaacagtgtacacagtggagcgctttgcgactgatgtatcatatactgctcggtaattttacatgtctgtgc

SEQ ID NO: 16144 - DNA, 819 bp, Oryza sativa
  ref <308>: DATABASE ACCESSION NUMBER: AK066649
  ref <309>: DATABASE ENTRY DATE: 2001-12-06
ggttctctccacatcccctcctcttcttatccacttctcttctctcctcctcactctcctccctcccggcctctccaccggcgacggcggcggtagtcccatcccctcatctcccctctcccagatctatccgaggggaggaggcgaccgccggcgcaacagagggcgacggcggcgggcggtggatgtgcacgcggcgtggggagcacgcaggcggcgacggagttgacgacgatgctgccggccggcctcggcgaccttgaccacgcgcgactcttctggaggaggcctgcggcgacgacctgcggctccctgcgccacccctgccctgccatccccttctctcccctctcccagatctatccgaggggaggaggtcgccgccggcgcaacagagggcgatagcggcgggcggcggatgtgcacacgggcggcggcggagctgacgacaacgaccgcgactgtggcaacgacgatgacgctgccggcctggctcggccaccttggcaacatgtgactcttttggaggaggcctgcggcggcggctcacaactcaggatctcttggtgacgggtggcggcacagcagagggcaagcagtggcggcgccactgccctcctcttgtgttttcttgtgtgtttttgtccgtttttgtttgtaaggacgtttgttaggttaatctgtgtgttgttaatctgttctattgatgatgctaatgttgtatttggattgatgccaatattatgtatttgtgatgctcttgattttggattgatgtcaaatataaattgttttgaatttggcgggtggagaattttg

SEQ ID NO: 16145 - DNA, 2818 bp, Oryza sativa
  ref <308>: DATABASE ACCESSION NUMBER: AK066650
  ref <309>: DATABASE ENTRY DATE: 2001-12-06
gattattcctcaagacttagccactgctcgactctcctcctctctggaagctcaagactttgtgtgctcctctggcttcttttttttttttgagaattctctggcttctctctttccaactacataccagccaagagatccagtaagttagttactcctagtacgcgtagaatggattggattcctttctttacagagcaagaattcaatctttgaggggagacgagacgatgcttctttacacggtgatacctttcttgaggtgctgtggaatcatcaatcatgttcatgtgtgctttcacaatccaaaacatgattttagctttctggctaactagccccacctccacacacctcacagagagaagaggttccaactcttcctaaaaattcagattgggacagaaaatcagaaatggaggcatggaccattagagtggtctacttcatagtgttctccttctttcttgtctctgcgagatttgggtcctgtgctccctgcagtgaagaagggagagctctcttgagatatagcgagagcgagcgagacaaatcaactgattctttgtcaaatcggggagaagggaaggtgattggcagagtgctcaacttattactcaaagagaaaatgttttccagtgaaactccatccgagttgaaagagcttggcacaatttcggagtctgtagctgatggtactggaggatttgaacattgcagaaaatgtttagcaaagcatccttgagtttgagtgagtagagtcgtcttcttcgtctcccaattcagttgagatccccttccgatcatccaatggccaccgcatcctctcccgcttccgtccaagattaccccgacctgcaagaggatgatgacgacgacttccaagacgacgacgacctcgatgacgaagacgaggaggacgatgatgaccaagaaccctccccgtccccgtccgacgaggctcgcctccagtccgtcctgcgccgcctcaccgcggaggaggtccggatccgggtgcacgatgtggagatccggggctgctgccgcacgcgccgcgccgcggtggaggcggcggtcggctcggacctgccgcgtgccgccaccgtcagagacctcgtgcgcgctgcagccgccgccgccgatcggatccgtcgcctcggcgccttcgacaccgtgtccatcaccctcgacgccgcgccgccagggatccccggtaacgctgccgtcatcgtccttgttgacgtcgccgaggctcgtggccgcgccgccggcgaactcggcatcttcgctaacaaagggactagatcatgttcggttcaaggttcagtgaagttgaagaacctatttggatattgtgagacatgggatgcatccggtgatcttggattagatcagacagtggagctaagtactggagtggcaataccaagaattggagcaatacctactccactggtagctcgaatatcatttctctctgaggactggttgaagtcctcactcagagaacacatgatgggtgtttctgttggtttgctctccaccatgaaccataacctcgcttacaatctgtcatggcgaactataacagaccgagcactgatgtcatccaattccataagggggcagttagggcatagccttttgtcctctattaaatatgcatacaaggttgaccagagagattcaagaattcgaccgacgcgaggatatgcttatctattttcttctcaagttggaggccttgcaccagagagcaaagatgcacgttacattagacaggaacttgatcttcgagtggctttaccgctgggtgtgttgaatggcgcccttaatgctggagtggctgctgggatcatccacccattggcaaggggatcgacgggctctatatcgccactttcagagcagttctacttgggtggcaataggtctcttatgtgccgcttgggtggaccatcatcactattaggtttcaagaaaagagggctggggacagacttgcaaagcagtaccccagagaattctgaaaatgttgcttccacttctcctgagctaagtgcacggggaggtgacattgcggtcacagcctttgctgatctgtcatttgatatacctctgaagccgctcagggagctgggaatccatggccatgcatttgtctcagctggaaatcttgccaaactaacagagcctgatctcaggaaattccctcttgctgagtttctacaaacattcaggagttctgcaggatttggtgtagttgtgccaacaagattatttcgcatagaggtgaattactgccacatcctaaaacagtttgattatgacctcgggaaggcggggatacagttgaacttttcttcgccctaatttctttctgccacaagattaatagctgtactttccttttcccctcactatgaccctcagctttgggtctttttcttcctccacaattaatctctccagaaaaaagggcccagaaactgtgggtgatgaattcttgtcctggcctatgatatgatattgacacctgtaaagtttacaatcaaaatggaaatgaaagtcgtgaggagcatcagtttgcaatgcttttctccatgctagtggaagtgacagtcacatgataattctgttcaagtatgattgtcaatagaacagctgtggtgaaaaacatcgactgtgcaagctacgacatatagtattgtacattgttggaattttgttaaagacccacatgttctaatgtgagtcccaacatgtaagattttacactgcaatttcatcaaagaaacactatacagtgcaccctgtg

SEQ ID NO: 16146 - DNA, 3600 bp, Oryza sativa
  ref <308>: DATABASE ACCESSION NUMBER: AK066651
  ref <309>: DATABASE ENTRY DATE: 2001-12-06
ggtcgtgtccaattgttctccctctcgcctcgcccccccaagcaacaccgccacctaccgtctctcgcgtcgaacccccgcacaaaaccccccgcgaaatctcgccccggatcgccggggaaagggaggtggtgggagcccgctcgcgatccgggaggaggaggaggagcggtgaatctgctggccggcgcgcgcgcgggcgggcgggttgttcgcgatggcggaggggcggcgctacgcgatcgcgccgcagctagatattgagcagatactgaaggaggctcaacgccgatggttacgtccgactgaaatttgtgaaatacttaagaattacaggagtttccgtattgctcctgaacctccaaataggcctccaagtggttcacttttcttgtttgatcggaaggtcctgagatatttcaggaaggacggtcataattggaggaagaaaagagatggaaagacagtcaaagaagcccatgaaaggttaaagtctggaagcattgatgtgcttcattgctactatgctcatggggaggagaatataaatttccaaaggaggagttattggatgttggaggaggattacatgcacattgtacttgtacattatctggaagtcaaggctggaaaattaagctctcgtagtacgggacatgatgatgtactgcaagcatctcatgcggatagccctttaagtcaattgccttcacaaactaccgaaggagaaagctcagttagcggacaggcctctgaatatgatgaaacagaatcagatatttattcgggaggagccagatacaactctttctctcggatgcggcagcatgaaaatggaggtggatctgtgattgatgattctatattcagctcttatgttcctgcgtcatctgtaggcagttatcaaggattacaggctacagcacctaatacaggcttctattctcatggtcaagataacttacccgtggttcttaacgagtcagaccttgggactgcatttaatggccctaatagtcagtttgatctatcattatggattgaagcaatgaaacctgacaaagggacccatcaaattcctctttaccaagctcctgttccctccgaacagtctccttttacaggaggcccaggaattgaatctttcacatttgatgtagtatacaacaatggactgagtatcaaggatgtagatggtgatgatacagatggagaaactccatggcagattccaaatgcaagtggtacatttgctacagcggacagctttcaacaaaatgataaaactttggaggaagccattaattaccctctcttgaaaactcaatcatctagtctttctgatatcataaaggacagttttaagaaaaatgacagtttcactagatggatgagcaaagagcttgctgaagtagatgattctcaaatcacatctagttctggagtgtactggaacagtgaagaagctgacaatatcattgaagcatcaagcagtgatcagtatactctgggaccagtgcttgcacaagatcagctgtttactatagttgatttttctccaacctggacatatgcaggttcaaagactagggtatttattaaaggtaatttcttaagttctgatgaagttaagagattaaaatggtcatgcatgtttggagaatttgaagtcccagctgagattatagcagatgatactcttgtatgtcattctccctcacacaagcctggcagggtccctttctatgtgacttgctccaatagattggcctgcagtgaagtacgggagtttgatttccgacctcagtacatggatgctccaagtccacttggttctacaaacaaaatatatctccagaagcgtcttgataaactattgtctgtggagcaggatgagatccagacaactctgtctaaccccacgaaggagattattgatttgagcaagaagataagttcattgatgatgaacaatgatgattggtctgagttgctaaagttggctgatgataatgagcctgccacagatgataagcaagatcagttccttcaaaaccgcattaaggaaaaattgcatatctggcttctccataaagtaggggatggaggcaaaggtcccagtatgttagatgaggaggggcagggtgtgcttcatttggcagctgccctagggtacgattgggcaataagaccaacaatagctgctggtgtgaatataaacttcagagatgctcatggatggactgcactccactgggctgcattttgtggaagagagcggacagtcgttgcacttatagcactaggtgcagctcctggagctgtaacagacccaacaccaagtttcccttcaggaagcacaccagctgatcttgcataagccaacggacacaagggaatctctggtttcctagcagagtcttctttaacaagtcatctgcagactctcaatctaaaggaagccatgcgtagcagtgcaggagaaatatctggtctacctggcattgtaaatgttgctgatagaagcgcctcgcctttggcagttgaaggccatcagactggatctatgggagattcactaggtgctgttcgtaatgccgcccaagctgctgcccggatataccaagtttttaggatgcaatccttccagagaaaacaagcagttcagtatgaggatgaaaatggtgcgatatcagatgagcgtgccatgtcactcttgtctgctaaaccatccaaacctgcacagcttgatcctctgcatgctgctgcgactcgaatacaaaacaagttccgtggatggaagggaagaaaagaatttctgcttattagacagcgaatcgtcaagatccaggcgcatgtgcgaggtcaccaagtgagaaagcattatcgcaaaataatttggtctgttgggatagtggagaaggttatattgcgctggaggcgacgaggtgctgggttgcgtgggtttcgacccacagaaaatgcagtcacagagagtactagcagcagcagtggcaacgtgacccaaaacagacctgccgagaatgactatgatttcttacaagaaggacggaagcagactgaagaaaggctacagaaagctcttgccagagtgaaatccatggttcaatacccagatgccagggatcagtaccagaggattttgacggtggtaactaaaatgcaggaatcccaggctatgcaagaaaagatgctcgaggagtcgacagagatggatgaaggccttttgatgagcgaattcagagaactgtgggatgacgacatgccaacgcctggatatttctaggatctaacgtcttgtgtatgcgcttgtaaattacttccaggtctttgtacatagcattaccaaatcgataacctgtagttgcattgctaaatttttgtatgttttgaagtttggttggtacattaatttttgtatgcgttttgtacagtaattcttctgtaaaatgtatcaaaatgatgtagctcgtgaaaagcttcagatagttggagaagctaggtctagaatctgcagatagtttgtgtaaggaaaaatgtttaatccttgctatgttttgactacggtgtctcgagttc

SEQ ID NO: 16147 - DNA, 2199 bp, Oryza sativa
  ref <308>: DATABASE ACCESSION NUMBER: AK066652
  ref <309>: DATABASE ENTRY DATE: 2001-12-06
gctcttcggcctctcctttcccccgctccccttccccgaggagccacgccgccgccgccgccgccgccatgccgaagcactaccggcctgcgggcaagaagaaggaggggaacgcggcgaagtacatcaccaggaccaaggcggtgaagtacctgcagattagcctcgcaaccttcaggaagctatgcattctcaagggcgtctttccccgggatccaaagaagaaggtggaagggaaccacaagacctactaccacatgaaggatattgccttcctggcccatgatcccttgattgagaagtttagagaaatcaaggtccacaggaagaaggtcaaaaaggcgtttgctaagaaaaataaagatcttgcagacagattattgaaccgaccaccaacttacaaacttgacaggcttattcttgaaagatatccaacttttgttgatgctcttcgtgacttggatgattgcctaacaatggtgcatctttttgctgcgttgcctgctgttgaaggtgaacgtgtgcaagttcagcggattcataattgccgcaggttgagccatgaatggcaagcatatatatctcgaactcattccctgcgaaagacatttatatccgtcaagggcatatattatcaagctgaagttcaaggtcaaaagatcacctggctaactccacatgctcttcagcaagttttaactgatgacgttgacttcaatgtgatgcttacctttttggaattctatgagacacttctgggatttataaacttcaagctttaccattcgataaatgtaaattatcctcctgttctggatcctcgtttggaagctttagcttctgagctctatgcgttgtgccggtacatgtcttctggaagagtacctggaaattcagaacctgctggactaattgaagacaaagagggtgaagacaataaagagagctcaaaaacagatgagtctgaactcagattggcacaacttcaacaccagctcccaactaatgaacctggagcgctgatgcatcttgtacaagaatctactgctgctgatgcagacgacgctgatgccaaagaatgcaggagtttattcaaaaacctgaagttctacctaagtcgtgaggtgcctagggaatctctcttatttatcattccagcatttggtggtaccgtttcatgggaaggagaaggagctccttttgatgagacagatgaagacatcactcatcagattgttgatagaccgacccaaagccacgttttcctctctagggagtatgttcaaccacagtggatatatgattgcgtgaatgctcgcatcatattgccgacagaaggttatattgtcgggagggtgcctccaccacatttatctccctttgtggacaatgatgcagagggttacattcctgagtatgcagagaccattaagaggctgcaagctgctgctcaaagccaggtgttgcctctgccaagtttaggggacgaagatatggaaaattcactggtagaggcaattattgatcgatcagagtctaatgaaattgctgacaagaagaggaagttggagatgctagagaagcagtaccacgatgagctgaggatggaatacgaaggaaagaccttctcaaataggacggcagataaccaaccagatgttgtggacaaaagtgatactaaagaagctgacgatcatatggaggactctcataaacaagccgagaaggatgctgctgacatttccaagacccttatgtctcgcaagcagagaggccttcttcaagcaattgagattaaccaggaaaggaaaaaggacaaggtgaacttgctgaagaaaaggaaaaagaatgctgattccagtgcttcggccaaaggtcgctgaggctcggacttcatttgctccatgctgtatctgttttgacaaattgttcatcggtcgctgcttctgtggagttgctgccatgatctgcacacctacgtattcttatgcatgataagcagctccattttgatgtttaggtgttttacatgggctttaagaatatgcccagatacctcagtagaaaattttgagctatttacctagtgtccaaagtgtgttccctgatgattagtagctattactcttccaaattttgacgcggttgctgctcaagtgctcatctagctacataattcttaatcaggagtttagggcc

SEQ ID NO: 16148 - DNA, 1290 bp, Oryza sativa
  ref <308>: DATABASE ACCESSION NUMBER: AK066653
  ref <309>: DATABASE ENTRY DATE: 2001-12-06
gatcttctctctatctctctctctcccgtgagaatggcgggcgcgccataggggcggcggcgaggcggcggttggagcactgtcgccggagccggggataccgccgccgcaacttccgcgtcggccaccacgttgctcccatccacctcgcggagatggagcatgcgccgctccttgaccccgtcgagctgctccggggaacgcctagcggtcgctcccccacgtcttcagcgacgggaacgacgggaggagcgtggcctggtggcgagcgctcgacgccgctgcctccaccgcggcggcgccatccgcgacgggatccggggtcgaggcgggggcggctcggcggagatcaccatggccgcgggaaaagccgcgatgatgaacacgcgcgtggaggccgccgtcacctagacctccaccgactccgactccggtggcggcggcggcgggagagtcggccgagcgatgagggtcagcgcgcggcggccggccgaggagggccggccatgcgtgctctaatcacaatttttttgatggttaatttgctagtatttatcagtcgcctgattgatttttaatgtgctgtgtttaatttgatggttaatttgctagtatcgaggctgcgtgccccggcgtcatctcctgcgcggacattgtcgcgttcactggccacgacgcatcgaggtacatgagcaacggcggcgtcaaattcaatgtcccggtcggccgcctcgacggcattgtctcgtcctccgaggtcgcccaaaatatgctccctgactccaaggccgacttggacaagctcacagcgccaacttcgcggcgaagggattcaccccggaggagctggtgatcctctctggcgcgtactccataggcaaggcgcactgcttctccttcaacgaccgcctcaccgagccgaactccgagatcaatgccaactagcacgacaacgtcctgaacaagacctgctacgccgccccgaacgagacgacgttggcgaacaacatccgcgacatcgacgtggcgacgctggggccccggcgccagcgctccacccgccgctccacccgcggcctgctgcctcacagctccgtcgccgcccctctgcgccgcccgccgctgctcgccattctcaggggagatagagagaggggatagagaggagagagagaaggggtaatgaggatgacaggtggggtccacgtgggccccaccattttattattattgtgtgtgaaactgacatgtggatcccatagattttattatttttcggatcgaattgcc

SEQ ID NO: 16149 - DNA, 3938 bp, Oryza sativa
  ref <308>: DATABASE ACCESSION NUMBER: AK066654
  ref <309>: DATABASE ENTRY DATE: 2001-12-06
gagggtttccctggccgccaccacccccagcccagccgccgccaccaccccctccagaggagccgcgtgcgccgcctccacccccactgccgccccccccattcccgcctccggtccagccgccgccgccgccgctgtcggtcaagccaccgccactgcggccgccgttgccattgcagttgcggcggttgttggtgccgccaccgcggccgccagaggagccgccgcctccagtccagccgccgacaccactccaaccgtcgcgtgcgctgccactgcccccacctctagagaggccgccgccaccggaagaggcgttgccgccgagagggcaagaggagccagaggtggcgcttgcaaccagcgctgtcgccgcggccaccttggccgcgttcgtgatgcgcagctccttcaacaggagggtgttgcatgccgatgtgaagctcaggaggacgtccgtagctgcgatgttgtcggcggtgttggagaagtcgtcattgaggcctcgaagaaggttgaggacgagttgggactcagagacggcgtggccgacatcgcgaagggcgtcagtggcagtcttcatcttctggcagtagtcgacaatggaggaatcgccttgaatcatggagtgaaattgatggctgagaaagatcgctcgaggctgtttgttggcgtggaacatgtcctcgatggcgacccacagctcccgagtggtctaatctggctccagaggtcgtggatgtcgtcgacgactgatccaaagatccagttgcggatgtaacagtcagcctgttcctaggctgggtcgttgggacgtggaggggcggagccgtcgatgtgagccatcaactcaaacttgccgcacagggaggtgaagaaggccttccatttgttgtagattgggtgggtgttctccagggtgatggggaagtgggatttgacggcgactgtggcataggggtggaggaactcactggtggtgctggcagaggaaacaccactggagcctgaggaggtggaggattgagttgattcagtcgacatggccagcactcgccgaggaggcagctgtgatgacagcgtgctagagcagcggaaaagaaggtaagaacctctgataccatgtagagaaagtagaatggacgcctcaccaatgttgggaggttgatctctcatatatatagctgaattacaatgaatgctagtgctgagatacaatcaatacaagatagttacataagaccaaaggtctagggagagtaactatttgggagtgtaaaggtctaggagaccaacagcctatagattaataataatcctaataatagttgatcactaaatgcggatgttcttgaacaaaaagctagcaaaaagatctcaaggtcaaaatagtacaaaaccagtcattgtgcaagcgccacataaagtgatgaatttcttctgagtagcttggaccaagagactagtcagaaatgacatccagatgactcccaaccctacgttagactacttgaagttagtttgtcaagtagtagcatgaattatgatccatttggactacctgtgttttgggatgtatatatatatggaggaagcctgaaactaacacatcaactccttcagtgataaatttataggctccttgtgaaggtcttcccataccaacattaagtccccaaccaacagaagactccctcagactgtgtacttccatggatgtttcaaaacaaaagaaagcaatgatatgaagatgtccagcacatggtaacaagccatacaaacttcgaaagtatagtaagcaataggcttattacttttctaatctgagctctaatttgccgctacaacataccgccaatattataagccgtatgccgaaggggggagggcatgatataataacatagataatttaaagcactatcctgacttaatttgtttctttggtttggaattcgtcccggttgaacaattgaacaggttcgagtatgaacagcccaggcagtacttaggtttgtatattgggtaatttaaccatccttaaaaagatacttgaagatatgtaccatatattttagtctaaaatttggtacctataggtactaggtatctcgagacaccaaaattttagggtactacaggtacgtctcaaggacctaaaaattctcgtgcatatcttaaaggctgttttcagagaaacctttctagctatgtacgaaaagctgtagcataaacctttcgatctccatctcctacatgatgagtagcttcaaatttcaagagtactgaattggtgctttctggtaattgaatgaacatatatttgtttgagcaacaaacttcttgtaccacaaattttagtatgaaatctactgatctttcagtggagggattgtttcactggtccgattatcttcagaattataagaggctagtctcaaacctgcaacacctaacaatggatattataatgtgctgatgcattcaacactgtcgattccgacttctgaatgtgttccgaaatgactgcgcaatttcagcatattcatatcactaggtcaaagttaaatttgcacactgtcttagtaaattaaatgacatccaatcaagtgtgcgacaaactccttcaccgattcaaaatagctagaatttgtaggagctggtgacaatgttctgttgtctttccatactagaactcaaacagtatgctaatgtcatccagagcttaaccgatcaccttgtactagtcttcaacacctcaggtgtgctgccactaaacatcagatgatgcaggggagcaagtggatcacccgcgaacccacttataggtcaaaataaacgaattcgcgggttagtttagcctataagtgggttttcgcgggttgccgcttgcacccttagatgatggcctcgcaattgagcaggccttgaagtcactcatgaggaatattataaccatcctgagttctgcgaataataaaatgcaagtcatttggacttttttgctgacatggaacgcttgtgcagtttacatgttctatgagatggatggaatagaatgctcaaattgaactgggataatcaaactaatatctcattggttaatggcatgacatcctatatgtactggttttggtacgatagctgatttgaaatccaaatacctcccaaatacatcactactaataactcatgcatcacgattagcacaagcgtttaccctaccttaattaaattcctgctcttttagctcttcatcgaaacagagctgtaacggagaattgagtgacaggcaaaataaaatttctgactcataagtagcgagctgccgagctagacaaccagtccctagcgtccactaattcaagcgtgctagtagtctgaaaaccactaaaaagtgatggtaaattacatggtccagatttacttgatgttagaagtgacatccagatgactcccaaaccctatgctttagactacttgttgacatcatagtttctcaagcagtggcgtggattcgtaaggactccctgtgtgcctgggccggggctgtatatatggaagccggaaaccaacacataaattccatcagtgataaataggctccttcagatggtctttctgtgccaacatcaagtccccaaccaccagaagactcctcacactcacaatgtactcccatcgcatcccagcagcatgtccaacttatttttacccagttgcatcacgatagttggaccaggtggcacaggagatttttttacctaggagcatgagtggcgggctagtctacggattgatagccactaagatatatgttctggttgtttctttcttcttatttggctgtgtgcatttttgcagaggccaggggtgactcagtttgattgtataatcttgatgtaattaacttagtctaaataaagcttccattatct

SEQ ID NO: 16150 - DNA, 2734 bp, Oryza sativa
  ref <308>: DATABASE ACCESSION NUMBER: AK066655
  ref <309>: DATABASE ENTRY DATE: 2001-12-06
gatcgagccgcaacaaaagcggaaataaatcccccacaaaccctacccttctctcccctccactcccccacctccgcgcctctctccgccgtgttcctcccgcccgccgccgccttcccgccggacctagctcctcccccgccgtcctcgacctcaccggaggtggcgtggtgcgggaacgggcagggcgccgtgatggagatccccaagcaggggcagccgccgcgggtggcggggacgccgccgacattgcctggggcgattacccacactacgcaggttgggtacccggccgtgttctacaatggcaactggggcgcgcaggtgccggccagcagctacctgatcgtgcccatgagcgagccgccggcgcaggttggtgtgcccaggcccaacgcgctgggcctctccgggtccggggccaggccgttgagtagggtgtcgcttaggccgccgcaacaggtgctgagtgtccagacagctttgcctggtatggccgcgatgatgccatcgccgtctatgatagcaggtaagaagatggcagcgtcgccgaaggttcagatgctgaagtctgtgccctttcggtctgctggtagcaagcgtcctgcgcaggaactgctgcccaaggcacagccgcaattatttgagtccgtgagatcaaagttcagagagactctggctgctgccctgaatatggattctgaccaacagtgtgccccgcaatccgttgaaaccgtgtcacatgttggatctgctagcgagaacaagcaagccgatggtgctggtattgattctgtcacagagactagtgctttgaaaagcgggcaacataacatgttaagtagcaattcggcatcaaacatgtcgatcaagatgagcttctgcaaggccatggactttgctggtcttctgacgttgttggagcttctgagactatttctcaatccgatccagacagagtcagaaaatctgatattgatgaaggtgttgatgtatctctgattgagcatgagtctaaaagaataaagactgatgatggggcagcagaagaaaagaagagtgtaacccaaaaggcccaaattttagcatttgaaattgaaggtgagctgttcactttattgggaggagttaacaagaaatacaaggagaagggtcgatcacttctgttcaacttaaaagataaaagtaatcctgtactgaggggacgtgtcttgtctggagatataacacccaaacgcctatgttcaatgactactgaagaactcgcttcaaaggaactttcagactggcggttggctaaggctgaagagcttgcaaagatggtggttcttcctagtaaagaagtggatgttagacgcttggtgaggaaaacacacaaaggagaatttcaagttgaggtggaagaaactgacggtatctctgtggaggttggaattgggggtgatttgctttcgcatgttccatcaagacctactgaaggtcaaaccaaaaccgatgataaaagtgtacacacggaagaaaaagaatcagacaatagtgagcaagatggagttatcgtgacaggcggcaataacatgccaagcaatttagaacatacagaaaatgagaaaactgatctgatgcaggaactgatggtagatgacctgaaagatacagagaatcttccaccaattatgtcactggacgaattcatggagacccttgattctgaaccacctttcgaagatgattccactcaaactgtgaaagatgatcctaattctattgagaaaactgacatttcattgaaatcggaagattcttccaaaaatgtggatagtgcttctgcatcagattctcaacttgatccgcaaacattatctcctcaagataagtttgagtccaagttacagtcacccaaaaaagacgcaggctcaattttgtttccagttgaacaaataaaggaagatctgttagtcaaatcctcccctgaaaaggccaatgctgaaaacattgatactggcagtcagtcgatccctgaatctatcacggattgtaaatcagctcctgatgctttgctgacacatgacagtgtatgggagggaacaattcaactttccttgtcatcactcacaaatgttgttgcgatcttcaaaagcggtgaaaagacatccacaaacgagtggcgccatttccttgatatcaagggaagagtcaggctcagtgcttttcaagaatttcttgaacaacttcctaaatccaggagccgtgctataatggtaactgagttgcgttggaaggagggctctcttgagagtgggcgccagcatctcttgcggaccattgactcatatattgcagacgagagagtaggactagtgaagcctgcagatggagtggagctttacctctgcccttctcaagggaaggcagcacagatacttgcagagcacctacccaaggagcagtcgagcagcttaaccgtgacaggaacatcagctattggagtcgtcgtgtggcggaggccccatgtttcacctaggatacccgccaggaacgatggctccagaaaccaatccatctcgaggaagcagcatgccgtgattgccagtgcagtgcccttgtcttccaagcctaccaatgagcgtcagcaccacggtcaggatgttgtaactgatgatgttcctccgggctttggccctggtgttgttagggaagacgatgacctacctgaatacgattttgttaccgtccc

SEQ ID NO: 16151 - DNA, 1220 bp, Oryza sativa
  ref <308>: DATABASE ACCESSION NUMBER: AK066656
  ref <309>: DATABASE ENTRY DATE: 2001-12-06
gagtttctccctgtccacttctgtccgattcctcctcacctcttatcgattggacgaccatggcggcgccgcgcgagccggaggtgatccgcgacaaggcggcgatgcgcgcatggtcgcgccgccgccgcgccgagggcaagaccgtcgcggtcgtacccaccatgggctacctccaccaaggccacctctccctcatctccgccgccgccgccgccgcctccgctgatcccgtcgccatcgtcgtcaccatctacgtcaaccccagccagttcgcgccctcagaggacctcgccacctacccttccgacttcgccggtgacctccgcaagctcgcctccaccggcgtcgtggatgccgtcttcaacccccctgacctctacgtccgtggcgccggtcgccgcggcgccgcctccggaggcgcgatctcctgcctggaggaggcggccggggatgggcacgagacgtgggttcgggtggagcgattggagaaggggatgtgcggggccagccgtcccgtgttcttccgaggcgtggccaccatagtctccaagctgtttaacatcatcgagccggatgttgctgtgttcgggaagaaggattatcagcagtggcgcgtcatctgccgtatggttcgtgatcttgattttgccatagagataataggatcagaaattgtgcgagaagctgatggtcttgccatgagctcccggaatgtgcacctatcacgcgaggagagggaaaaggcattatccatcagtagatcactggttgatgctagaactggcgccttgaagggaaacactgattgcaaacaaatcaaaaacaaaatagtacagacactaactgaaactggcggtcaggttgactatgttgagatcgtggagcaagaaagtttggtccctgtagaacagatcgacggccctgtggtcatttgcgttgcggcgtggtttggaaaggtcaggctgatcgataatatcgaaatcgatacacgatcctgaggttttggggggattcacttgctgtctgctgtgaccttggcattgcgtttgaaataccttttgtttcgcgtgatgattcgcgtcatgttgtacgctgtaacaatcacagagagaaaatatgcaggagtacactgactgaaggcaaatttataagtacaaactgtagaggcctgatgctgtaacaggggaaatcatgcttgttgattacagattccgctg

SEQ ID NO: 16152 - DNA, 1510 bp, Oryza sativa
  ref <308>: DATABASE ACCESSION NUMBER: AK066657
  ref <309>: DATABASE ENTRY DATE: 2001-12-06
gggtcccccctctctcccctcctcctaccgctccccatggccgccgccgccacccgcgccgtccgccgcctcctcatcgcctcgcggagtctccacgcaatctcttccgagggagcggcgagggaggcggccacgagcttcgtccaccccgccgccgtcgtccaccccgacgccgtcgtcggacagggtgtctcgataggcccattttgcaccgtgggagcttcagcgaggattggtgacgcttgtcagttacacgctgggagccatgtcatgggagataccgagctaggggagagatgtgttgttctcactggcgctatccttggttcagacattcctgggcaaaccattatcggtgaaaacaatgtcattggacaccacgctgtagttggtgttaagtgccaagatctcaagtataagtcaggagatgaatgctttctacagattggtaacaataatgagatcagagagtactgttctattcatcgctcttctaaatcttgtgactgcacggttattggtgacaataatcttataatgggttcatgccatatagcacatgattgcaggattggcaacaataacatatttgctaacaatactctatttgctggccatgttgttgttgaagattgcacccatactgcaggggctgttgttgtccatcaattttgtcatattgggtcattttcatttctaggtggaggctctgtgatcgcacaagatgtgccaagatacatgatggttgcaggtgatagagcagagcttcgtgggctgaatcttgaaggtcttaagcgcaatggtttctcagaccaagaggtacggatgttgaggaaagcttatcaacaagtatttatgccatctattaatagtcagagtagctttgatgagagacttgctgaactggaacgggaaattgagttatcagaaactcatgtatcctatatggtggaatctattcgcatgtcctttggccaaggacgtcgtggaatttgcaaatttagaagttggaaccgctgaaatttctataaactttcaagttttactggcaatttccgagacatcacttaggaagcatcgctcattctttggactgggcatgtttcacatcgtgttcttgaaagaagtcgcccattctttgactgttaaagcaagagtttctcgttgatattctaatacctgaacacaggaatacatcatacagatgttgaatgccccttcactccagatttgaccaaatactgtcgcatctggatataggacacttggaagttgcgtgtcgtttctttttcttttttattttctcttgagatgagatgagtagtggtgttcgtggatgcacaaatgctccttagtcgttgtacatatatttggcgttgcctcggttttgttcatcctgtacagtgtatgtatgtcgcctcctggatctcaggctcgaatttgtattgtctgaacgatgttactgctagtgctgagatggtccaaaatttgcattggtgttcttcggacg

SEQ ID NO: 16153 - DNA, 842 bp, Oryza sativa
  ref <308>: DATABASE ACCESSION NUMBER: AK066658
  ref <309>: DATABASE ENTRY DATE: 2001-12-06
gctctccaaatccaatccacccgcatcgcatcccacccacgaacgcttcgccgcttgataaaccaaattccccaccgccgcttcgttctcgccgatccggagggctcgagatgaaggcgaggtcgaggtccagcaatggcgactccaggctctcggtgaggaagaccaaggcggagaaggacccgaacaagccgaagaggccaccgagcgcgttcttcgtgttcatggagcagttcaggaaggactacaaggagaagcaccccaacgtcaagcaggtctcggtgattggcaaggctggtggtgacaagtggaagtccatgactgatgctgacaaggctcctttcgtgaccaaggctgagaagctcaaggctgagtacaccaagaagattgacgcctacaacaacaagcaggcaggaggcccggctacctcaggcgactctgacaagtccaagtccgaggtgaacgacgaggacgagggcagcggtgacgagtgatcgatggagggctgcaggtagtagggaaagttctcgagtcggcctaaccaaagtggacgttgctggttgctgctccttgctagtgttcggatgttgctgcctttagcttttagtcttagaggtctcctcctgtagcttagctctcatgtggtgtcctcgctctcttcggcacttgaccaccatcttgtcgtctgttttgtctcactgtctgtaatctaagtgagtactcgtatctgttgctgttttaaatctcagatctcagtagatggtgccatctgtgttagttgctgaagaggaaaaggaaaaaaatataacaagtctcttgcatcctgtttaatgatgcatcct

SEQ ID NO: 16154 - DNA, 2363 bp, Oryza sativa
  ref <308>: DATABASE ACCESSION NUMBER: AK066659
  ref <309>: DATABASE ENTRY DATE: 2001-12-06
ggccgacgcgccattgccctcgtcctcttcctcttcctcttcctcgtcgtcgtcgtcgccgagccgtcgcatggtggacgccgctgcggcctccggggacgcgtgcggccgcgtgacggagtgggagaccggcctgccggctccaggcgagatgacgccggtctcgcaccagctcgtcccgccggcgctcgccgccgccttcgggatcgacctcgcggccgtgggcgtgctcctcccctctccctccgtcgactcccctgtctcccacctcttcttccccgtcgacgaggacgacgacgaggatgaggagggggagggcgaggggggtaacgatgacgcccccgccgccgccgccgcgggcggcggcggcgggaggtgcgggaagaaggcgaggatggtgtggacgcccgagctgcaccaccggttcgtcgaggcggtggcgcacctcggcgagaagggcgccgtgcccaaggccatcgtgcgcctcatgaacgtcgacggcctcacccgcgagaacgtcgccagccacctccagaagtaccgcctctacctcaagcgcacgcgcgtcgccgccacgccgcctccttctccaccaccacctcctcctcctcctccgcccctgccgccggcgatgtacgtcccctgcttcgccgcgaaaccacctctcgacgcagctaaccgcagcgattcccctccttccagaacctcggacgcaacgactaagcagtaagctttatattttgcaaatttttttccccaaaagatagccaaaatcagatagtacgttttttttcctttttttttctcatattttcgaggatccaagtagatatattgagtatttaatttcgtcaggaatcaagtgaaaccaatcaaagaggtacaatatattgaactcctgtcgtctgcaaaatcgaaatttggcttaccgtccgatggcaagttgagggatagtacatttcaagtacagttatgcacatatcgggaacaagatatagaccacactaaaatgccgctccttgcaaaaatttatcaaaccattgcatatattagttttctcttggtgatagagttcattcttttcggtaccagtgttgtcctcctggcgaaaatgtttttagccacagacatccttgggccgtttagctagaattactctcttttttttttctctgcgcttgatccgtatagaatgtttgttgtttatacttttgtaaatataatacttactactagttacgagtactatattatattaaaaaaaacttaacgtttacatgtcttccttctttcttctgtaacttaaaagccaacttttatgtttggcatacatatccattgttgtcgcaaccaaaattcattagttagatagcaaaatatagtagtttctgttttcagtaacgcgatgatagactattgaaagcaactttatgctcacaccaccttccctttaagagcaatttaggtatttaagttctttgaaggaactgctgtaatgatacccagttgatgattgaatggtggtggggttatctgtaatgtgcttccttgaatcagaagacttgggtatatggttaggagtacttccctcccttgccaccaccttgatgttgaaatggactgcccatttcaatgattatttgatgctttctggggcaatcaatcattgttagaggaattatttgttcctagcatgatttatactttaatataattaatattagtaaaggtcagcactatgttaattccatggtttgggggttctggcttctagcagtattccccacattcatggagctagcaaaggcatatgtctaaccttttactatgtgtgttcactcttaatagttgatacagtttctgaattgtttcctcgttttattctaactggttagctagctcaaggctagagaaggaaatgcaccaagagtgaattatattcagaagttgtgtctcttaagaattaggggacagaacatacaatatttttggatcatttcaagtgcatgctttccatgcatgctcccatcaaaagggataacgagacttgtccacgaggctacgacgcaaaactcggctaaaataaatatggaaatgctgctcatatccaagaacggcctcaggaaagatgcaaagtttttttctgtgtgagctgctaatgctcgaggtattgtctgaaggctacaggcacaataaggtttaccaaaggaattgtaattaggtttcctctgatctagattcagtttcaaattcatgcagcgtgctgtatcaaatgctgcctagatgtaacatcatttttcctcatcatgtatgtgtaagatgctactctttctaacctggtgacatcggcaaagctgctcccc

SEQ ID NO: 16155 - DNA, 641 bp, Oryza sativa
  ref <308>: DATABASE ACCESSION NUMBER: AK066660
  ref <309>: DATABASE ENTRY DATE: 2001-12-06
cattcatctcctctcctctcctttccttatgcattccctccctctctctctctctctcaactctctctttctccaccgatcgaatcggctctctctctctctctccctcagctgaatcggcgtgcacggtgggaggggatgctgcggcggcggtgggtcggcggccggtcggtggtgggaggggatactgtggcccagcggcggcgccctcccctccgccagatctggtgggaggggaggtggcgtcggcggcgcgacggcaaaagggggtgcggcggcgacaggtcggcggcgtgaggggaggcgacggcggtccgacggcccggcggcgggtccctcccctccaccagatctagcgggagggagatggcggtggcggcccggcggcagaaggggatacggcagcggcggcccggcgacagcgacagcggtgctgcggcagcggcgccctcctctccatccgatgacggtggcagcggtggagacgttagtggcggtagtggcggtggtggtgaaggcaatatgatgagtgttcttgattctcgatgagtgttctggatgaatgtgtttgaatatgatgttgatgtgttcttgatgagtgtttttaatgaatgtgatgatgttgacgagtgttcttgatg

SEQ ID NO: 16156 - DNA, 2661 bp, Oryza sativa
  ref <308>: DATABASE ACCESSION NUMBER: AK066661
  ref <309>: DATABASE ENTRY DATE: 2001-12-06
gacgcccacccatccactcgcaccccgcgccgcaccaacacacgcagaggtggtgaactggttgatcgatgcttgctgctgctgcgcgtcgaggcggctccatcggcggcaaccgctgatcgatcgatcgatcccgcgggtttcgtagcacccgagcagaatgggtgctggaaagaagactcagaccgagaacgagttccgtgagctcccggaaaaggagctaggaggggtggtcttttgttgcaataacaacacattcgatgaatgcttcactaaacagttatttggtttgcctcaacgcaatatcttgtatgtgaagaatgttaaacctggcttgcctctctttctgttcaattatagtaacagacaattgcatggcattttcaaggctacaagcactggccagcttaatatcgaccgatttgcttggatgtctgaacagtctaatgatgcaaagacaaatgcaaagacaacaccatttcctgcacaggtccgcttctctaccaggacagagtgccctccacttccagaaagcaaatacaaaagtgtaatcataaacaattatcgcaaggataaacctagccacttccgttttgagctagaccatcgacaaacaagagatttgatttctttgtttctacctgctcctgttcgcgctaatcaaaacaaacttagtattccaaaacctcctgctaccgctcatactgttccaaatccatggaatcgacctctgccatttcttacagcaaaagcacctgttgtttctgataaagtgaagagtgaatccaatgtgaaggatgtggatcagttcaatgtttcatcacactcacatgatattgttcctcataccttgcctgatgtagaagtcgaccttgctagcacaagtacaacatcaaggagcaaccttaacaaagatgcttctggctgtgatgacctggttgctggtttgatcaaggaagataaagaatctgtggatgatgaccagcatgctaaaatggatttaccagtaaagctgcaagagctgtcttctttacaacagaaggaagccaatttcttggaggatgctcctgtttctacttcagctcaaagcatacgtcaagatacacggtttgctgctactctccccaaagattcatttaatgccacatctcaatgtgacacatcattgaaagatacatcctttgtgcaatgccatgaatatgctgagctgtatcaaattatcaatgatttatccaagaagaccgaagaaatggaaaagatgaaggttgattcagatcaagaaattttgttgttgaagaaattggtaaaggttatggaaagaaaagttgaacatctggaacagcagcttgagaaatcgcatagctcttcagcaccactcttcggtgtaacaaatgatgatgtagaagggccatcaatactcctaacaggtggccataatggcattaactggctgtcatcccttgattcatattgccctgcaacggacatactagaaactctaatgccaatgagctcagcccgtgcatatgcggctgttgccacattaaaggaccatgtcttcatttttggtggttggaatggcattcgcagtttgtggtacaacacagtggagtgctacaacaggggagccaataagtggataggattgccctgcttgaatcatgagaaagggcatcttgctggagctaccttgaatggtaaaatatttgctattggtgggggtgatgggtctcagtctttttcagaagtagagatgtttgatccagcagtggggaaatggatatacagtttgtccatgcagcaacctcgatgtgctcctgctgcggctgaattaaatggcgttctctatgtaattggtggttatgatggcaacatgtacttacagtcagcagaaaggtatgatccaagggaaggcttctggacccaacttccacgtatgcggacaagaagaggatcccattcagtagttgtcttgggggattcactacatgctctgggtggcctgaatagaaataccacgttttccagcgtagagatttttgacacccgtgccaactcatggagaagggggagcccactcagcgtcccaagagcacacggatgtgcggttacattggacggcaacgcatacctcattggtggtatccaaagcagtgaagaatacgttgaaactgttgaggtttacaaggagggccaaggctggtccatctctggttccaaggcattcgggaagagagctttcgcatgcgccgttgccatttgacaggattgcagaagtgcagatgaacccccgggccggttttgtacagcaccagtccccaaccccgcctcacagtattaccttctctcaagcgaaatattgccgctcattgctgagcactgacgcctgacggcccatccattctgtgcatcccagtcatacggtttttacattttagaaacaacaccgtagcgagttctggtatgcgttaactctgcccgttgttgtttctcactgaagataggtgttgttggttgtcacctgattgtagcggagcaaactgaactgtctacaggacactagttacttagagaagttcgaatgaacaaactttagctggtgatagcagtacatatgggaggcttggaagctggtataatttttgattttttttttgaagc

SEQ ID NO: 16157 - DNA, 827 bp, Oryza sativa
  ref <308>: DATABASE ACCESSION NUMBER: AK066662
  ref <309>: DATABASE ENTRY DATE: 2001-12-06
ggcgcgcggcggcagaaggcaacgcgaaaccctaatccccaaattcgctatctcttggctctgccatcgaaattcgaaacccgcatagctttggagcaagccgaatctgcaaccaatccatcagattggagggcgaggcgcagggaaggcgatcgatcgaccgaagccatgcccaccaccgcagaggatcagaaacagtggaaggtggtggaagtccagcggatcaatgcggagtcccatccccctcctcggcgtgacgataggtgtgacgacctccgcaacgacgaggagttccagcgtgtcatggacaacgtcgtcttcggccggggttatgatcccacaagagatgacctcaggatcagcactgaccctactgcgatggtcgagctcatagagtactaccacaagatgggtctgatagaaggtgaatgggtggcttagagcttcttggagggggtggatggggtggaattggaggataagacggcgatggatgagaagccagtgatagaggaggatgatccactggtagagaaagggtttttcctcccggttagtaaccccctatacttccggttttgcaatcgggagtagcaatccgggactaaagatactcatctttagtcccgggtgaaataaccgggactaaaaatgtatctttagtcccggttcgtatcaccaaccaggattaaaaatggcgatggcagcgccagtcccggttagcaactgggattaaagatggcgatggcagcgccagtcctggttagccactgttttttttcattattttttcccaaatcgagttggaactacacaaatctcttccc

SEQ ID NO: 16158 - DNA, 1894 bp, Oryza sativa
  ref <308>: DATABASE ACCESSION NUMBER: AK066663
  ref <309>: DATABASE ENTRY DATE: 2001-12-06
gattccgtcccaagtcccaccgtcccctcggcttatcccccctcctccccggcctccctccgccaaggccgccggggcccgtcgccggaggcagctgcagggaaggacgccgtcgccggacacatgcggggttgggcttcccagatagcttgtctcttgctgcactaagctcttccaatttttaaaaatggcagctcccaagcccattgctcggcttatttcccatgtcattcttgatttagatggtaccctcttaaacacagactgtgttgtaagtcaagtgctgaaaccatttctagtcaaaaatgggaaaaagtgggacagcaagaaagctcataaattagttggaaagacaccttatgaggcagcagctgttgttttagaagattatggactcccttactcaacagaagaatttctctcaatgcttactccaatgttcaatgagcaatggtgcaacataaaagctcttcctggagctaatcggttgataaaacatttgaagagtaatggagtaccagctgctttggcttccaactcaccaagatcaaacattgacgcaaaaatttcctgccatcaaggatggaaagagtcgttctccgcaattgttggtggtgatgaagtagagaaggggaagccatccccagatatatttttggaagctgcaaaacgaatgaatacaaatcctccaaattgcttagtaatcgaggactccttaccaggtgttgcagctggaaaagctgcaggaatgcatgtcatagctgtaccttcagtccccaaaaggactgctgaattcagttctgctgatgaggtgatcaattccctccttgacgtaaagcctgaaaaatggggattgccaccatttagtgattggatcgatgataccttaccaatagaaccatggtttattggtggacctgtgattaaaggatttggccgtggttctaaagtactaggaattccaacagccaacttacctgcagaaaacttctccgacgtactatcagagcatacatcaggggtatactttggctgggctggactttcaacgcgaggtatatttaagatggtcatgagcattggctggaacccttattttgataacacggagaagactattgaaccatggttgcttcacgattttggtgaagacttttacggagaggagctgcgccttgttattgttggttacatacgacccgaggccaactttccttcacttgagagcttgatagagaggattcacgaggatgcaaggatatcagataaggccctgaatttaccattatacgccaagtataaagactcgccgtacctaagaaattccttgaaggaggacaattctgctaacgggaaccagtcagtgatagattccaagtgattcaacgttgtgaagtgaaagacatgaagaattctctttcgcagcgttgttgatgcagaaagagcactactgttcttgtgcttgtactgctgcattatgttccatgaatacttggaacatgctcttgactacaatgagaataccagtaagggtctatgttcgtcagaaagttgagttagaagcagccaactactatcttctcaaatggtcacctactcctagaatggaatgcacaagatgtctgaaaatttgcacgtgtgttgtggctctgaccatgtgaagcttaggctgtctatctaacgttctgaattaacttttctaatatgcattgagattggtatttcattacagtgtgtataaagatatactataaagtactactccattctagaaaaatgcaaatcctagctacgaacctggacacgcatatgtttaggctcatagctagaattggattctttttggatggaggggtagaaagcaaataaagctcggttattgttggttaccagc

SEQ ID NO: 16159 - DNA, 2402 bp, Oryza sativa
  ref <308>: DATABASE ACCESSION NUMBER: AK066664
  ref <309>: DATABASE ENTRY DATE: 2001-12-06
gatagttcgagagatttcctggcacgctcgctcgcatcacccgcccgcatattccccccgcaccccgcagcgccgcgcaacaacgcaaccagccagccaaccaacccaagccaagccacctcagcctcgcagcggcgcccccgatcccgaggccgccaccaccacccacccgcttctcctccacgccacggtgggcccccacccccaccccccgccccgacgggtcaaactccaccatccctcacctatccacccccacccccatccgcaccaacctctccctcctccctcccctctcctcgcctccgcctccgcctccgcctcccaagaaggcgaaccctattccgcccccgattctcccggagcggggggccggactcccgttgcgcgattgggcggtgaaacccgaatccccctgcgggcggcggcgtccgtttctcatctaccgtcggcgttgggggggacgccgccccatgggccggtcgccagcgatatatcactatcagctcatcgaccggcggaaagggcttggataaaatcttattgcaaatttccccttgtacatgtaacatcacatgtaatttctattaaaaatgacttcactcaataaagttgtttccaatggagatacaaggtcaatgttgccaaataaagtcacagcattgaatcccaacgcagcagaatttgtaccttcatgtattagaccatcttttgagagtagcgctgtctcagatgtaagtaaggcagatcttagggcttctgggaaaactatcctagataggtccgagtcatcaaagtcaaataactcggatgatgaggcacaccagttttggcgtaagcagcttcctgatgacattattccagacttcagttttgagaaaattgaacaagaacctgaagaattgtctcttgctggattatccttgaatgcaccccctttctatggaacaacagctagccgcttttcaagagagcatgatttatcttctcaagctaacaagagcctggaactggggcttaccagtttactttatgaagataattcacaagcatcgtttccaactatgggttcaagcaattgggagcaaaattttgtaggggatctccattttacgaatggaaatcagggccttcattatgattctgaaagtgctgcaggcttttctgacagttttgctagcgattatgctgcagcaacagacgatgttcttgaccccctagcgtatttagcttcacagtttcctgatttttcatcagagagccttgcagagctgtactatgctaatggatgtgacttcaaccatactattgaaatcctcacccagctagagatgcaagttgatgctacctccaatccaactctgacccccaggacaccaaactttagcacaggggacttccccgcactgccaacagttgaagaccaaaatggtttttccaaaggcaatgcagatattctaagcatcttcaatggacgcagctcaccctctgtatctactggtactggtgattttgtttcagctgttcgcaaacttgcatcgcaaaattctggccattggaagtataagaaaggtcctgaatacggtaatggtgtttcaactgtttctgtacccaagcagtacagttctacgaccaaaacatcttctggaaacaagtttcaaagtgttagcagtgcaagagctgctccatggctcgaaactggagatgcagtagcaaacatgtactcagaatcaaggggagaagcccgtgattttgcccgcatccgaaatgcatgttttgagcaggctagacaggcttacctgattggcaacaaagctctagccaaggaattgagtatgaagggacagacatataacacacaaatgaaagcatctcatgagaaagcaagagaagctatttatcgacagaggaacccatcttcgcaacgagggagcgaccgtctgatcgatctacatggtctccatgtgaacgaagcaatccatatacttaaggtcgagctcggtactcttaagagcaccgcgagggctacaggtgagaggatgcaagtcatgatatgtgtcgggacaggtcatcacaccaagggttctcgcaccgccaggctgcccatcgccgtcgagcagtttcttctggaggaaggcctccactacacgcaggcacaacctggtttgctccgtgttgtggtgttctaacatctcttaggtcagcagcacgaagaaaaaagaagcaaaacaaaaaaaggagaaagagatgtagggaaaagaaaaacctaaaaaaaatggccgctgttgcagcactgtaattttcttgtagttgtatattaaaagaggcagcaggagaatagcctgacaacagaatacagtgtaaaattatacatagcttcattcaattcacattccattcct

SEQ ID NO: 16160 - DNA, 2102 bp, Oryza sativa
  ref <308>: DATABASE ACCESSION NUMBER: AK066665
  ref <309>: DATABASE ENTRY DATE: 2001-12-06
ggtcctgcttggggggatcctcgggcttcttgtcgcaagaaaccaaggaggaggctttagccgaattacagggctacttggagttcaggcttgaaagtggtggccaggtggggttgccctgatgccttcaatgatctgattgtttctatgcggtccctgtggttctgaactcgaggacccgggtctggattttgtggaatttgctgttgtcagaggtacaaggattttcgtctgccaatacttgaaaacatgggttggctgagcaaaatttttaaaggttcagtaaatagagtatcaagagggcactacaatggaaacacccatgaaggccactcagcatggcacactaaagcctatgagcatgacagtgaccatgaagacatagatcgtgctattgcattatctttatcagaagaagatcagcggaaggggaaggctgttgatgaggtagatattgatcatcgtttacatgaagatgaacaacttgcacgggctctacaagagagtctgaatgatgaacctcctcgtcagaatgttccagtaaaagatgttcactcagagagtactccagcaactttcatgcccccatatatattcccttcaactggattaagggtttgtgctggatgtaaaactccaatcggtcaaggacggtttcttagttgcatggattctgtttggcacccccagtgcttcaggtgttttgcttgtgataggccaatatcagaatatgagtttgcagttcatgaaggtaacccataccatcgatcctgctataaggagcttttccatccaaaatgtgatgtctgcaagaactttattccaacaaacaaagatggccgcattgaatatcgggcccatcctttctggatgcagaagtattgtcctgcccatgaaactgatcgtactcctaggtgctgcagttgtgaacgaatggagccaaaggatagtaagtacataacattagatgatggccggaaactctgtttggaatgcctgaatacttcaataatggacacagacgaatgccaaccactatatattgatattcaagaattctatgagggtttgaacatgaaagtggaacaacaaattcccttgctgttggttgagcgacaagctttaaatgaagccatggaggccgagaaaactggacatcaccttgctgaaaccagaggtctctgcctatctgaagagcaaattgtccgaactatactaagaagaccagtaattggaccaggaaacaagattgtagacatgattacaggaccatacaaactggttagacgctgtgaagtgactgcaattcttatcctatatggccttccaagactgttaactggctccattctggctcatgagatgatgcatgcttacctccgacttaagggataccaaactcttgatccaaaggtcgaagaaggcatctgtcaggttctagctcatatgtggctcgagtcagaaataacatcaggatctagtagcatcattgcatccatcgcagcatcatcatcgtcatcgtcgtcatcttcagcaccctcatccaaaaagggtgtacagacggacttcgagaagaaacttggagagttcttcaagcaccagattgaaacagacccttctgatgtatatggagatggttttcgagatggcattaaggccgttgaacgctatggcttgagaaaaactcttgatcatatgaagcttacaggggttttcccgtgttgaagtcacaaatttagagtatgaagaatacattgaggaattttggttcaagttagacatgccaaaagggtatatatgctgttaacattaactgagcaatagaatagacgagaaacaatgattttgttttagtaaatttcagaaagttacaactatcttgtctaaattatcggtttgctgcaatattagttggctatttcagaaaactacagcagtagttgattttatcagaaaactgttacactttgggcctagatgtcaaacacttagtttctgataaaatcattcgctatcgttgttgttttgtgaaaaatgtttggatgaagttctaggcttctagccatagtgataattttgactaaacagttatagttttgtgg

SEQ ID NO: 16161 - DNA, 1862 bp, Oryza sativa
  ref <308>: DATABASE ACCESSION NUMBER: AK066666
  ref <309>: DATABASE ENTRY DATE: 2001-12-06
gtattcccttgcgtacacgcccaaacaagtcaggaatagtaaagccggagcagaaaacgcgggcaggaaaaggagctagtatgtgatgacgagttcgtcttcatcgcttccggtgtcggctcatccgtccgaggatggaacaaggcgtgccgtctgatttgtgattgaggggtgtttacatggaggcagcggcgaaggttggtcggctcacacggagcagcctgcaggcggcttcctgcccggctgtgaacggcggcgtggtcgtcttcttcgccgcggttgtcgccggagctctcgtctccgcttcctggatgtctacgggcgccagggtcacttcgatccctatgatcgccacccggaacatggcacagcatgcggcagcgagtccggaaccagagccgactctgccacgcctcggcaatctcgcgcccccaccacggcaaccgccaccgccagcacctgccccggcgccggacgccgccgcggcagcgtcgccgtcgtcctcctgcccggcatacttccggtggatccacgaggacctgaggccgtggcgggacgcggggatcacgcgcgaggcggtggacggcgccgcccgccggtacggcgccaagttccgcgtcaccgtggtcgcggggcgcctccacgtcgcgcgctacgggcggtgcttccagacgcgggacatgttcacgcagtggggcgtcctgcagctgctccgccgctaccagggccgcgtccccgacctcgacctcatgttcgactgccaggacctgccggtcgtcaacgccggcgaccgccgcggccggacatcttcttcgccgccgccgctgttcggctactgcggcagcgagcccacgctggacatcgccttccctgactggtcgttctggggttggccggagcttaacataaagccatgggagacgctgcgaggcgagatagccgacgggaacgccgcggtgaactggacgggcagggcgccgtacgcgtactggaaagggaacccgacggtgggagccgatcgccggaatctcctcaggtgcaacgcgtccgggaaacgtgactggaacgcgaggatatacgagcaggattggaggaaggaggtgcgagacgggttcagggaatcagacctggcaaaacagtgcactcacaggtacaagatttatatcgaaggaaggggctggtcagtgagcgagaagtacatcctggcctgcgacgcggtggcgctgatcgtgcggccgaggtaccacgacttcttctcgagggggctgatgccgttgcagcactactggcccatccccggcggcggccgcggcatgtgccggtcgatcaagttcgccgtcgactggggcaacgctcacgccgacaaggcacaggaaatagccgggaacgcgaccaggttcatccaagaggatctaacgatggaccgtgtctacgactacatgtttcaccttctgacagagtacgctaagctgctcaagtacaagcccacggtgcctgacagagccgtcgaggtcaccgtggagtccatgacgcgcggccggcggggactggagaggcagttcatggtggacaccatggtggaagctggttcgggcaccggagagccctgcgagctgccgccgcctttcagctctgaagaactggagacgctgaggagaagacaggcggatgcggtgagacaggtcgagacgtgggagaagcgatgacaggttcacgtgaccagtgacgaaatgtaataaggatggcaaacctctctggtgacatcaatacatcacagattaatagcctcataggttgggttttgttcgaatagcaaaatacagaattttgaaagtaaatactaaaattcgtcattcatagtc

SEQ ID NO: 16162 - DNA, 1715 bp, Oryza sativa
  ref <308>: DATABASE ACCESSION NUMBER: AK066667
  ref <309>: DATABASE ENTRY DATE: 2001-12-06
gcggtgcctttctacagcggcgttccactcgggttggtctctcccccgaggcacggccgccgccgccgccgcgctcggtctaatcggaatctatttctcgacgcgactccgcttccccggctcccctctcacccttccgcgccgccgccgccgccgcttgtagtggttggggggcgagcggccgctcgagagcgaagcgatgctggagaaagacaggatagcctacttctacgatggcgatgtgggcaatgtctactttgggccaaatcacccgatgaaaccacatcgactttgtatgacacatcatcttgtgctttcatatgatcttcacaagaagatggagatatataggccccacaaagcatatccaacagagctcgcacagttccattctgctgattatgtggaattcttgcatcggataactcctgacacccaacacctgtatgaaaatgaattacgtagatacaatcttggagaagactgcccagtctttgataatctgtttgagttttgccaaatatatgctggaggaactctagatgcggctcgcagattgaatcataaaacatgtgatattgctatcaattgggctggtggattgcatcatgcaaagaagtgcgaggcatcagggttctgctacattaatgatctggttttgggaattctggagcttctcaagtaccatgccagggttctctatattgatatcgatgttcatcacggggatggagttgaagaagccttttatttcactgacagggtaatgactgtaagtttccacaagtatggtgattttttcttccctggcacaggtgatattaaggatataggagaaagagaaggaaaatattatgccattaacattccacttaaagatgggatagatgactccggctttactcgcctttttaaaacagttattgccaaagttgttgagacatatctgccagatgctattgttcttcaatgcggggctgattccttggcacgggaccgtctggggtgcttcaatctgtccattgaaggccatgctgaatgtgtgaagtttgtcaagaaattcaatatccctctactggtgactgggggtggtggatacacaaaagagaatgtagcacgctgttgggctgttgaaactggtgttcttctagatacggagctcccaaatgaaattccagacaatgaatacatcaaatactttgctccagattatacattgaaagtatcgaatgtgaacatggacaacttgaatagcaagtcatatctaagttcaatcaaagtgcaagtcatggagagtttgcgggccatacaacatgcgcctggtgttcagatgcaagaggttccaccagatttttatatcccagatattgatgaagatgagctggatcctgatgaacgtgtagatcagcatacccaagacaagcagattcatcgcgatgacgagtactatgaaggtgacaacgacaatgatcatgaggacggggcccgttgaaaaaggttctttgtatgatgaaactggatagagaaagtctggtgctgttgcgcggtttaacagcgttaggtgggaaatactgtcaattgacttgttaggatctaacacctttgcctgcatatagtgcgtgtacgttcctactttttaatcagttacatatgctagttgcatgcagagattgcaaattcttagtcggtggtaatgattcatagtttttggctgc

SEQ ID NO: 16163 - DNA, 2007 bp, Oryza sativa
  ref <308>: DATABASE ACCESSION NUMBER: AK066668
  ref <309>: DATABASE ENTRY DATE: 2001-12-06
gagagagtagtgataaggatgatgataactgctagtgggcccccgtgccgctccaggggcaggggcgacacgggcggcgaccaccgccgccttcctccctcctccacctcgccgccgcccgagcagaccgccggaaaccgcgtggctgcgaggaaggcggcggcggggccttccttctccctcgagggcgcgggtcggtgcccacgaccccgaccagttgggggcggcgacggtgcggcggcatcggcgtcggcgtcagggcgttgggctgggcgcgcggaggcgacagggtgcggaacagctgggcggaggcggcttggtgcggaacggcggcggcggcgccggatttggcgtccctcgccagatccggcggtccggtctcctcccgggacgatggtggcacccaaggaggcggggaagggagatgcaggcggcgggaaaggtggagcagcggcaacgcgcgtcgcctctccagatccgggctgggggagtggtcggcgccgaggaggtgcggagaccggcaggcagaggcagcgtcacggtggtcaggcgacaacagcggcggctcgctcccgccgtggtcgcggcgccgccgtcggtgtctgtcaagcgttggtgttggcttcggtaatgctgcggcggcgcgctctagctggtcatcccctgtacctggctggatctggccgtccgcggccggatccatcgcctccacgccgaatggcagctggtcggcgggacggctgcgtgtggacggcaagcgcggcggcggctcgctggcggccagcctcctgctcggcagggggcttctgccggtggtgggtcttgtcgttgttgatgggcggcgatgtgcggatgtggaaatggcaggacgacggcttgtgctggcgtgaagcaggaatggggcttgatgtccgtgacggtgacttcctcattgtcggccgagtgttctccctctcttcggtttccccccttggccggacccttttctagtcatggggaatgctagggggagggcggaggctccggcttgctgtagaagtttgtggcggatagatggcgtttcgagggtggccaagggcccgtcttgccattggttacaatcaaggtatgattgcttctaagacgtcatgaactattctgcggccatcgatgtgggggtgcttgtatgggtgatgtgaagatgctggcgaaagccttgccgtgcttttggcgggttcgacaacgacggcgcccgtgggtgtcgtttccctccttggaggcgttgtcatggcactctttcatatcctcacaaatctctccaggtgaaaaccttgttccgattttcggacgagtggcggcggcgtcacgcgtcgtatcctccttgggggcgtcgcttcggagaagttccaatgcatcgatgactattgatggtccttttcggttcaatagctttcatattttgtgttcggcgaggcttcgccttcttgggtccgcttctttcttgtggtgggcgacacgctcttcggttgtttctgctgatgaagtcgaagttgctcactgatggggtgcggcgacgcttggcaacgatgacatgttgcagtctcttccaaggagttctggtgctggccgtgtgaaggaagtggctcctcagtggcttggctgatgtctattgttggatgccggagccgcttttcgctttggcgattttcgtcttcagtgttgttgcggttgtgaagtcggcgctactaggtcgctggggcggctagctcggcaacgataacacctcttctgcgatgtggaagctgttgtgtcgcttttgtgtttagctttgtggcgacgtcctgcgattgggctccgccgtcgttgttagttgtgtagcggtgggtttgtaattaaccgtgcagttgtatgatttttgggcctagttttccttataaactgggccaattcttttcttctaaatataaaagtgtggaactaagttccgccttaggttttaaaaaaaaaagataactgctagtgggtagc

SEQ ID NO: 16164 - DNA, 2246 bp, Oryza sativa
  ref <308>: DATABASE ACCESSION NUMBER: AK066669
  ref <309>: DATABASE ENTRY DATE: 2001-12-06
gcctgaactctgaattctgaacgagcaccaaacacaagcgcggaagccgcggcggcggaggcggcgagccgacgagccgccggcgagttccgccgatgccgccgaagcggggcgccgcgcccgcggcggccttcgagtactgcgagctgtgccgccgcaaccacgaccagggccgccgccaccgctacttccccgcccaccgcgccgccctcgccgccgcgctctcccgcttccgctccaagctcctcgacctgcgccgcgcgctccgccacccgtcctccgcggcccgctcccgcctctggtgccccttctgctccgccgacctcgtcgacctcgacagccgcttcgcttgtagcaatgctatttatcatctcgcaagccaggatcacctaaatggcgtgaaggctttcctgcaaaagcatggtggtgggatggatcaggtggattcgtttaggatttcggaggatgagcttgctaagtgggagaagtgctgcgagtcttcgagtacagaacaagagacgtcgaccgaagggttgattggaccatctctggggccactgaaagatatccgaaataaatctacctctaaacatttggataattttgcagaaacttacatcccgtcttctagtaatactgcatctaatgttgttatgcctttacaaagtcctactaatggggcatactaccccaatagtacagcatgccagggatcttcctcctttggaagtattccgtattctgctccatttgagactttcggagtgcccatcataccttgtggatcggttgcattacatgaacaacaggttatgctgggtacagacttgtttcaaagtgcaggcacaaaaatgaaaggtggtcaacttactatcctcggaaatggaccaaattcatcggtttcttgttctgttcatgtccaacagagaaactctggtggaaattccagtcagggtactacacacttttacagtttttctaatatatatatatatatatttgtaacgatttctgttgaagcatgtcactaatttggatgcagaaagaggctgcagctctagcaaatgaaagatatctatttttagttccttattgttgtgtgaaatttaacataatatcgttatgttatgaaggcttgaaagcaaatgtgcacatgggtgctcctcctccctggttagaagctagcgagcgtgatcaggagaatgagtcacttagtggttatgctcgtccatcctctcggaaaggaaaatctggaaagcttaacccaaagcgtgtaggagctgcatgggcagagaggagaagagcagaaatggagatggaaaaacgaggtgaacttgttccagaaacatctgattctagttggctccctaactttggtggtgtctggcaatctggtacaagaaaggaatcaaggaaagagtttgagaaaaaccataagcctcacgaagagaagagcaacaagttgtcccttgagatgaaaccatatataagcaaacggatgcgcgtaggttccaataaaggtgaacagtcagacattgatgtagagcagtgaacagatctacatggttgccagatggtttgtgattgtggtcacggttttctgtagttctgctaggacgcagccgcttgtcttttttgggggtccaaaactttgaattgcgttgcggttgctgaaagagtcgatgttattgccacatgcctgaaaaggatgatatttggtgtggaagtggaatgccatatgcaagtgtaataaaagaagggagcatttctttccaagaagagagctgtcctctggagtccggaatgttggttggtgcgctcaactgtgtggagatccgtgccttgtcgctgcaacttgatgtccttgcgttttgcacctgatccgattacatgtccgtgcatttgctcctcctgatcggataacatagaaagcctgaaacagagatctacctgtaggagaatactccttcgtagcaactagctatcgagctgattagattgattgatttctgattcccctgggctaattggagaattgttatgcctgtagggtgtccatgtcactggatttttcccaatcagatgacttttagcacaaaactggcataatatttgctttaaattgtaactccatccaatggaaggatgcactcagaagtacagtatagtaggagtaacagccacagaagttggttgttgacaaggcaaaggtagtactagtaattcactggtctgtctttttgtgt

SEQ ID NO: 16165 - DNA, 1218 bp, Oryza sativa
  ref <308>: DATABASE ACCESSION NUMBER: AK066670
  ref <309>: DATABASE ENTRY DATE: 2001-12-06
ggtcttcccgcttccattgcaaccccaccgcgccgcacgccgccgcatcgatcggaaccaaaccctaaccctaaaccctagcccccccacctcgccttccaccccccacgctcccatggcggggcgcggaggctacgcgtagccacatcgatcgaacaccctgtatggattgaggtgggtttcccgaggcatgggtacaaaccctagcctgcacgagctggcggcgggggcggcgccgcggggacgcgtggtgcgtatcctcgtgcgcgacgccgacgccaccgactcgtcctccagcgaggacgaggcggttgcggtggcgcagcctcggccgcggcggaggggtaaggtgggtggtggtggtggtggtggtgggggcgtgaagcgccgcgtgatggaggcgggggcgggggaggcgaggccgaccgcgcggttccgcggcgtgcggcagcggccgtgggggaggttcgcggcggagatccgcgaccctcacctccgccgccgcctgtggctcggcaccttcgacaccgccgaggaggccgccgccgcatacgacgccgccagcgtccgcctccgcggttccagcgccgccaccaacttcgcctccgtccgctgctgctcgctgccgccggagctacccaagccaactatttcaccgcctgaagcagctgtgaggccaatcaccttgccaattgggacagctaagccgacccttcttccacgggtgaaggaggaaggtgagagctgtggcggtcgggtcaaggaggaggccagtagctgtgaggtccaggtgcttgctccggagccaatgtggacgatgatttcaggcaagcgtaaggagcgatcgggctgtggaacccgtgtccgtgccttccatgctgtgtccgcctgtgtggaagaagttggcggggcctgagggtccaattatccgtaattactatcgttagcagctttattgttatgcatagcatcattggaaacttggtattgtgtaattttggttagtattgaacttatgatgtgaagatgactctgcatgtgacctgatttggtaaggttatgatgtgtatatacggtatggttgctgatatatgtgatgcagtatggtaggcttcgataaggtgttgtggaattagtatgttgcatctaaataagacctttgatgtgagatatagacatgttcttcgattagaataaaatatagtagaaaattattgc

SEQ ID NO: 16166 - DNA, 1768 bp, Oryza sativa
  ref <308>: DATABASE ACCESSION NUMBER: AK066671
  ref <309>: DATABASE ENTRY DATE: 2001-12-06
ggttctgcctcagtgtggcaaacacagctgcaagaaacaaggccaacaaacctcttgagtttgatcagctgaaaataccaagtaaatatggttcagaaaaacaagatgatctgcgagagaaggatagagtaagagcaatgccagggcagatggaggaagccgagttcaaccaatatgcaggatatgtcacagtggatgcaaaggctggaagggctctgttctactattttgttgaggctcctcatgatcctttgaagaaaccactggtcctatggctgaatggaggccctggttgttcgtcttttggagctggagccatgctagaacttggacctttctctgtccgtagtgacaacaagacattgtacaataaacagcatgcatggaacacagtggccaatatgctgttcgttgacgtcccagccggcgttgggtactcatactccaacactacatcagattattacaacattggtgacaaaaagactacagatgatgcatacatattcctcatcaattggatgaagaagtttcctgagtatcagggccatgatttctttataactggtgagagctatgcgggtcactatataccagagctagctaatctgattgtatctaacaatagagccatcaattcaacaaacatcaagctcaaaggtgttgcaataggcaacgcagatttgcatgacaacgtgaccctaagagcatcatttgactactattggaggcatgctatgatttctgacagagtctacagagccatccagactagctgtagtttcaatgagacatacactaacgactgccagaatgccatgaacttagctaacaaggaaaagggaaatgttgatgactacaacatctatgcaccacaatgccatgatgcttccaatccctctccttctggttccagtgactcggtggcatttggtgatccttgcacaaaccactatgtctcttcttatctaaataatcctgaggtccagagagcactccatgcaaacaccacagggctgaactacccatggatggattgcagtggacttatatttgataactggaaagactcaccagagacaatgctgccatcaatcaagacactaatttcaagtggcacaaggatatggctgtacagtggtgatatggatgcagtttgttcggtcacgtcaacacaatatgcactagatattcttgggctacctgtagaaacatcctggcgtccatggcgcatcgacaatgaggttgctggctatgtggttgggtacagaggcctggtctttgcaacagtcagaggagcagggcacatggtcccttactaccagcctcgcagggcgctagcgctgctctcctcattccttgaaggaaagcttcccccagaatgatctagcaagccaaacaccttgcaatcgtcatgctcagcatcctaccccacaatccaatggagtcatggtatttcataaggaaggccctaatatatatgtagtacaccctcagcagcacttcatggattaagtagttctgctcaaaatcgagcattcatgtagataaaataaattcaggtactagtactaaatcctgagaattttcatacttggccatctcctgaatgaggcctgattaaacaagagcaaattggcctggttgctccacagcagttgggtgacaaaaattcacccaaccaaacagctgcagtctttgttgtaagcagggtgacagatttttaggactatatcatctttctttaaagcaatgtcatcttcgtggg

SEQ ID NO: 16167 - DNA, 837 bp, Oryza sativa
  ref <308>: DATABASE ACCESSION NUMBER: AK066672
  ref <309>: DATABASE ENTRY DATE: 2001-12-06
gcttcttccttcctcctccttcccaaggccaaggccaagaagaagaagaagggtgtgtttaactttaacaccgggggtggaacggccgccggcagcggaagaagatccagccaattcaatccaatccaatccaatcctcaggctgcggagcggaggaatcaattcaatgtcttcctccgccgccttggccttggccttgaggagggccacctcctccgcgcacaagcagaagcagaagcaggccctcgccctaacggatgccgccgcctctcgaatacgccaactcctcagcctccgccacagaccctacctgcgccttggcgtcaaagcacgcggctgcaatggcctctcttacaccctcaactacgctgatgaaaaaggcaagtttgatgaggttgttgaagataaaggagttaaagtactaatcgatcccaaggctctgatgcatgtcatcggcaccaagatggattatgttgatgacccgctaaggtctgaatttgtgttcatcaatccaaattccaaaggggagtgcggctgtggtgaatctttcatgactacaagcagcaagggatctacatcttgaataacggatagtgatgggggtagtacgtgaggtaaacagagctaaatatgtcgaggcttcagctaccacttttctgctttatagcttattattattacattggaagtacatagctcaacagtggttgtaatagatgcaattgtgtgaacccacctcaactgtgttctttacattgggggggggggggtatgtgttcttggtttctgttgtttgtttacatgtgattaatgaaagaaacgaaccacgtttggttc

SEQ ID NO: 16168 - DNA, 3173 bp, Oryza sativa
  ref <308>: DATABASE ACCESSION NUMBER: AK098963
  ref <309>: DATABASE ENTRY DATE: 2002-08-28
gagtcaaccaccagaagcgagagaaagaaaaccgaaatcacgcgaaccgccgccgcgtgacgcgatggagccctcggcggccgtcgcgtcgaggccaccgagcttcaccgcgcagacgaatgccctcctccgcaagaatctcatcttccagaaacgaaacaggaaaggaaccattcggctaatcatagttccgatatacctctgcctcttgctcaccattcttcagagagtcatcaacagcgttcttgacaagcccaagttcagatgtggttgcaagtgtgttgatgtcaacggcacaggctcttgccaaaatgtgtgtggaattcagtactctacactggatcaggctggcagttgccccataccgaaccccccggaatggcctgctctcttgcagttaccgcgccctgagtatcgcgccatgcaggaatcctccttgtatgcaggtttcccagatgtatcatgcagaaaatcacaatcttgcgcagctactatacccttcacaggagcaaatgagaccctatctaacattgtcatgcaaaatttgttcacaagctcaccgctttcaaatctttctgataatgcgagcatatccagtcttctccttgggacagatgtaccgggtacttatacaggcttcattgaacccgcttttgtctcagatcgacccatatatgttcttagacctcaatgcaaagccagtgattcagttacagtccccattacgtttggtgatattaatattcggaaagagatgttatgtattcaaggtttacccttgtggaggaatagttcagcaataataaatgaggaaaccttcaacggctacaggaaagggaaaagtcaggaagggataaatgagattccaatggcctatgatttccaagactcaaacgagaagcatttcagcgtgttagctttatataactcaacttatcagaatgtgtcttatgttccaatgccatttggacttctgcatatctcgcgctccttgaacgcggtctcaaatgcatatctccagtttcttcgaggatcaggtgtaaaaatgttgcttgcattcacaaaagaaatgcctaagcaagagactcgtttgagatttgatttttcttctgttatcggccctctcttttttgaatgggttgttgccttgcttttcccggttatgttgacataccttgtatatgagaagcaacataagctccgaacaatgatgaaaatgcatggacttggggatggcccttactggattatctactatgcatatttccttattttgtccatggtgtatttggttctatttgtcgtttttggatccgttataggtctaaactttttcaagataaatgactacagtatccaatttgttttcttttttagtttcatgaacctgcagattgtactagccttcctaactgcaaccttcttttctaaagtcaacactgctcaagcaattgcatacctgtacatatttggatcggggttgattgcaggatctcttattcgcaattttattgaaggtggcaagttcccaaagcactggattacagttctcgagataatacctgcattttctttgtatcgaggactatatgagcttggccaatatgctattagggcttctgaagctggaagtcatggcatgagatggagtgatctaaatgaccatgcaaatggaatgagagatgcgctgattattattattctagaatggttggttttgcttcctgttgcgtactatttggaccattctgcttcagttggacacaaatctagtttcctttccctaataaaaaatctgctgaagaagaacccaacttggagaagggtatctattaacgaagtagttaacgacgctgttcatgtagaaatggtgaagcaagatattattaaagaaagggaaactgttgatcaagtactacaactacagagtagcggctatgcagttgtctgtgatgatctcaagaaagtatatcatggaaaggatggtaatcctgataagtttgctgttcggggtctatcacttgctttgccttatggagagtgcctgggcattcttggtcctaatggagctggcaagagctctttcattagcatgatgattgggcttacaaggccaacatccggaaatgcattcgtacgggagttcagcatacagactgacatggaaaagatatataacagcatgggggtttgtccacagaatgatatgctctgggaaatgctgaccggcagagaacatctccagttttatgggcggctgaagagcctcaatggctctgatttggacactgctgttaacgaatctttaagaagtgtaaatttacttcatggtggtgctcctgataagcaagtcaggaagtacagtggtggcatgaagaggcgtctcagtgtagccatctcgctgattggagatgctaaagttgtctacatggatgagcccagtacaggattagacccggcttcgaggaagagtctatgggacgctgtgaagcaagcgaagcgagacagagcgatcgttcttactacccattccatggaagaagctgaagttctctgtgacaggttgtgcatcatggtagatggcagcctccagtgcattgggacacccaaagagctcatagcgcgatacggagggtactacgtgctgacaatgacaacatccccggagtttgagcaagaggtcgagaatctggcgcgaaagctctcaccgaacgcgaggaaagtataccatctgtctgggacacagaagtacgagctgccgaagcagcaggtgaggatcgcggatgtgttcatggccgtggagaatttcaagaggaggacggaggtccaggcgtgggggctcgcggacaccaccatggaagacgtgttcgtcaaggtcgccaaaggggcgcagtcgagcgaagaactctcatgatgatctggtgcaaaaatgatgttttgtttgtgctgttctgatgtactttgtacagaaagtaggataaatcttttgtcaggcattagtttgcttatttttctgtacataaggatcctatggcatgttgtttttgttcaatcttcttttggtcttttgtagataaggtttgtgttattgtgtatgttatagaaaaaaagatggtgtgtgtaggcgtatattggtgattgtattttatatatgtttgtcaacttgttgctgc

SEQ ID NO: 16169 - DNA, 2215 bp, Oryza sativa
  ref <308>: DATABASE ACCESSION NUMBER: AK066673
  ref <309>: DATABASE ENTRY DATE: 2001-12-06
ggctcgatctaaacaatacacacaaaagtctcgacccgtttcgccccgaccggtcgccgcgccaccacccactccccctcaaacaccggcggtggtcatgccgcctccgcctcctcctccgccgccgccgccgccgtctcctcctcgccttcctctcaccgcccaccgcctccctctcccgcccgcgacctcgccccccgcctcgctcctcctcgcgccgcgcccttcccccacccgcgcgctcgcgctcctcttcccggactcctccgcgcgcctcctcccctccctgccgcccgccgcctcgctccccgccaccgccgtcccctccccgctcgccgctgccgcctgcttcgtgctcctgctgccctcctcccacctcctcttcctctccgtgcacccgtccccttcctcccccgcggcccacctccgcgcctactccctcgcctccggccgcttctcgcccgccccgctctccttcaagcgccaggcctccgcctcggggctgcccctgcacggcctcccgttcggcctcggcgtccgcctcgccggcggggtcaacgccgtggctctgctgtccctctccgccgggcagatctgggtgctagccccagggatggctgcggacgggcgcacggtggagctgcacaagtgcgcggtcgtcgagctcgagccgtcgcggccggtgtacgccatggaggttgccatggggaggctgctcctcggtgaggctggtggtttgcgcgtgttcccgctacaaggcttgatgaagagtgggaaagagaggcaggtgaggaaggagggtgcgggggcagcagtaaggaagagcctgcacaagaagaatggaattcggaatggttttattgtgccaattgggcatggcggtagcgagggaggtggcaaacgagaagctgtttccactcgtaagctggcaactttgagagtaaaacagacttcagggagctatttctctttcttttcctcatgtagttctgaggatcatcataactcacaaggtgccgtagaagtgaaaaatgtagtgaaagttgtttcaatccgtcctctttccaaggacaagtttttggtccttgattcagctggattgttacatgtattcagtcttcaaaacaaagaattgctctcagaagctactagcaagagatatagtggaaatcacacacactgtttggataatgccatgaaagtgcagctatttgctgtctttccaagtagctctacaaagacagaaatcttttggatttcggatggtgggcattccatacacataatgtcagcacttgatgttgaaccccccaacagtgataatggaggtggtgatggagaaagagaatcaacaaccattaagctcacagctattgaagcaatctttacaagtgaaaaggttcaggacattgtgcctatctccaaggattcagtccttatccttggtcaaggcaacatgtttttgtatggaacttcttgaattttgttgattatatcatatattcggtgggagatgtgaatgtttgtctagatcatgaatttgcagtttcgatgggtttttggctgaagacaggtgttggagattttgaagaatgcagttgttcacctgtctttgaagtcatgagtatcattagtctttaatttcagttagcagatgaaatactcgagacttcaacagccagcaagagttgaaaggtgcaggccgttctccatcttgtcaactgtctgaaagcaacattacaaaactataggtctttcagcacagttcacaagccacagcaacttctgaacaggtgaagccagattattcccagaatacaaccacccagttgtttttgcatacacattttgcgtgccaggacaactgcagttctggttgcgatatctggaagaagataaggctgcaatcctatgcccagctcagctgttgtggaacgtggatcatcatcaagtgggtcggttatgaagctacaggtttggtgctccacaaggaggttgatcagttcagagactggaccttgagtccatggtgtcctggagttcagcgagtattttcgttccaagtgccaggccccgaggacttcagaaaccaataatgtatttgccatgttcaatgacaggttttcacaatgcgcacgctagtacggtgtgagcttgcaaacatttacccgttgtgcctgtttctgaaatcaaaatctagttatttgccccgttt

SEQ ID NO: 16170 - DNA, 4224 bp, Oryza sativa
  ref <308>: DATABASE ACCESSION NUMBER: AK066674
  ref <309>: DATABASE ENTRY DATE: 2001-12-06
gttcgcgtgtcatgtcgtgtctttgatttggagacgaattagcagctaactagggctcttctttggacgacggatcgacgaattctcgtctaattccgagcgacgagcttccctgcaggagttggcaaagaggcgatcggcatttcaccagttggcggatcgatcgatccgtcatgggttaggctgatcatcaaccgacgattgtgcatccgcgccttctctgcccgttcttgttccatcttgtacggcattggaattccatcatgaaagaaccgccaggcccacaacacgccatccaaggagcagcatcaggccagaagcccatggactctagtgaactgttaagatgcacggcgatgaatcgctgcccgattttcatacgaacaacggagataaatactccgcatcggacaccgcgatggatgaaaaatataaatagaaacagaaaaggttgacgtaccaaggaaatcagggcgagagatgttggtgccgccagagaagaaatactaaatcttatctagagcaacatcaacatcaatagaaagatgacgatgatttattttcagggttggtatggttttgggaggaccggggtccttagatccatagcaggagttcttccatccatgaaaccttatcccccagaattacgcttcgacaggactatatacatagattgctcaaggtggaaaagcaaaagggtgatgcaaagaaaaatagcagaggagctaaaacttgacaatgagaccatggcatcgtttgataagcaggatgaggaggatgacttcagtggagtggacatttgctctagggatgccatactaaatgtttcagcagcgattagcaggatactgagccagagcagatttctgatggtttttcttaacgggagtgatgatgagatccccctaagcacatttggtattgcagactattttgactgcgtagtaatatggacttggagtagaatgttccttaccgtgatggatgtttcctatttacatagtatttacaggaaaataaaggaaggcagatacacagatcttttcatatatggctaccaggatgctgataaattctcaagttcagagttcggtgcactgtttcgtgaagaggctgctaccataggtcgctgcccatgtctgcagaacatcgacctggaaatagttgcagattgttgtctctatgggtttctcatgtattatcacaataaacaaaacaccaatgaatttgtttggccagctcatgcgtccaactattggacgtgcgatgggatcatccaaggggctagagcattggaggtcagtaatgcattgcatccagaagtaagtttcgagtgtcgttcttatgagttgaaaagggtggttgaaatgttgaagatggatccgaaggcccctttcctattactggaagacgacaataagtttgtctattcaaattcaaacaggccttaccgttgggtttttgccatctcaaatgataccatagaggaggctatgcaaactaaaatggcaagtgcatcatcaatcttcttagcaactcaaatgtacagtggtggcctccttggaataccagatggttttttgaacagtgcagtagcctctgcgtgctggttctctcctgttgtgccttcaactttgtatcgcctcctttcctccattgccaaacgttaaaattcattggattagatcgctgtaagagcaacagtacagttgaacttcaaggaaagtgggcatgtctgcaaaacttgagggtgattgacctacgctacacggactgggttgagattttccacgaggaaaagatggagctcatgactaaccagctgatggaggtaaacatagagggagttaggtgctcgcagctaacaagtcagttaaagaaaagattaccatgccttgagaggctccggataatcaaccctcagaatgaggctgagacatcatcatcatcaactgacatcaacgacatattcgtagacaaaacggatctgcaattgcttgatttgtctggcaacaaagagatgaaaaatctgccaacaagcatatccaatgcaggccaacttaaggttcttattcttgacggttgtgacgcgctggaggatgttgttgtgcctaataggcttccatcatcgctaaggtcattcagctttgatggctatggatctgcagcgcccagtcgggcatcaactattgagctacctctacagagctgccgtcctgttcggcgtggtatgattcgtatgaaggatgtgaaaacatccgtgatatccctagaaggctgcacgcagctggacaatctgttcttgcgtggcctgcccaacttggtggagcgggacctttcaggctgtgcaatcaaggtgctcgactttggaactatggtgacggatgtcccatgtctcaagcggctatttctgctaggctgtgagcaccttcgtgcaataagatggggacggtcaaggttgctggagttgctctgtatagacacacgtcctgcccggaaggtacttggatgtgctcggccatcccttgccgtcgaccataaatacttccggttacaggtgcatgcttgtattgtggatgctaggctcgctcggtccttactggctacgatcaattactattattatttcaacatcagtatcacctcttcaatggcatccagtagcggagttgtgcaaccagaagaaacaagcaagaagatgactgaacccagtggtcagaaacactgcggtgtagcaggcatctatggtgatgtatttagcaaggtcggcgatgccgtaaccacaatggaggccttcccgcagcctccgacccaacagctggatcgccacatggagattggtgatggaagccacagcgtggagagtgaagtgaagcaagcctatgatgaaagcaacaagttaattcagctaatggtatcgtgcacgagtccctgcatgtgcatgatgactcggcctgccgccacgccttggctgcggaaaattggtgttacctcgggtggtgccgcgtggagaggtcctccaacctagacgtcgtctttcctcagggtgcagatgaggacggtcgcctggagatcatctgggcatcggacctcctcaaggcccactgcatatggagcagaggcatcaagtcctcagatagttacttgcaaagtctacagcacttgcacctgcgctcctgcccaagcctccggtttgcgcttccaatggcgctcccctccttccccagcttggaaaccctccacatcatccactgcggcgacctcaggcacatctttgtaccggacacggagttccagtcgacaagtatcgagttcccaaaactgaccaccatccacctacacgacttgccgtcactgcggcagatatgcgaggccgtcgagatggtggcgcccgcgctggagaccatcaggatcagaggatgctggagcctccgccgtctgccccgcagtcagggcaagcagaagccggccatcgaggtggagaaggatgtgtgggacgcgctggagtgggacggggtggacgccggccaccacccttccctctaccagccgccccagcattcgcgctactacaagaacaagcgcatgcccaggggcaccctcctcgggtgaaatcctgaaccgtacgtgcatctgctctgctacaacttcagttgcttgctcgcttgttatcttcagtaagtgtctgcctgcgtgtcttgctggctaatcggtgactggattgccgactagcacagcagtgctacctcgtgttttgatttatcagtttgttctgcgagccaggatatggggcttcaggtgtgcccactccgttttccgtgtgtgctcggccgagtgatgagtgtgtgtggctttcgcttgagtacgaaactgtacgtacgtattgaagcaacggctggttgtggttgtgcctgcctctgtctgtgtgattggtgtggtctgagctaatgatgagcgagtgtgtgtctatcagctacccctgcctgtttgcagcggatcagaatagctaataagaataagcagcggctgcgcctgtctgcggctgcgcctgtctgctcgtgtggtgtgtgaattgtgattgagcatggggagtgcttgattgctagtacatttatatgtgtgcatctgatggaccaagtggatgctgcttgttcatgcatgcattccggctgtattggtgaaccataagctgtactgtaatacatgaaaaaactttgtggc

SEQ ID NO: 16171 - DNA, 1956 bp, Oryza sativa
  ref <308>: DATABASE ACCESSION NUMBER: AK066675
  ref <309>: DATABASE ENTRY DATE: 2001-12-06
gatctctctctctcgcaggcaacggctggcgagcaggcggagccgccggagtagaaggctacccgcgcgcggctgccgctggcgacctcctccctgttcccgcgcacggccgatgaccccctccacccacgcgcggccgtggccggcgacctcgtccccacgcctgcaccgaggcccgtgacagcggcggcggccggcgacctcgtccccgcgagcgtgccgcggccggctacccattcccccgagcgcgtcgttgctggtgagctcctaaccatgcccgcgcgaggcctccatcggcgacctcttccccgcacctatgccgaggccagcgacccctcacccatgcgcggtcgcggccagcgacctcctccccgcgcacgtgccgcagccggctatccctttccccgagcgcgccgctgccgataagctcctaaccatgctggcgatgatctcgtccccacggcggcgcccatcaagcggaggatgccggcggagcgatggcgacgacaggctgcgggcggagcagaggggcgggcggagcggcggcggtggaggtggccagaggaggaggaggtcgccggcgagcacggtagctgtggcaggtgcgacagcggttgacgacgacggtctactccactccgtcggcatgctccgtccaccgccgcttggcctgccccgctcttccctgccgcggtggggttccagactgtggcgaggagcgcggaagcgtggtcggggaggcccatggaggagagggaaaagctgccgccgcccgcggttcctctcctcccaccagctgccggcgaccgcgcgccgcttctgtcccttctgatgcttcccgcggttcctgttccaccggccgccgctcgtgtctcctctcccacccgtctccgccgctcctctcccgtcccggtgaggtcaacgggtgcggcgacatccttcttatctgcccgccctgctctgcccttctacttcctctctcgccgccgccgaagacgacgacggcgacgggttcgacaacgaccgcccgctgccctctcccggcggcaacccgccactgcccagctccgcccctctgctctggccaccgtcgctccgcccgccccgctcagcccctctgctccgctccgcccgtggcctgctgctccgtccctctgctctgctccgcgcttactcagcaccggtgagttcatactgcatagacacttacatgtgggtcccaccgtgctgagtcacgtcgccaaccgagtcaacgacgccacgtcggacgaaaccaccagccaaaccaccgaggggatttgccaaaccaccgagggaggggatttggtctggttttcaaagctgaaggagccgatataccagggacgtgatttaactagggacgagagttgagggaggtaaagtggacttatccctttcagtccaacgcagaacaaacatttcggcccaacgacaagagctcaagaagcatttcggcgaacggaaaatcatattccaaatttaattggcacatccgcacatgaaagcatctcacaacgaggtggtgcatttccctcgtcagccacagcatctgacagataattgaccaggtacaaaactatgtggttaaaggagtggacgtgaagaaccaaaattcagtagtgatggccagtcaagtagatgtagcagccttttctggccggtgcctgcatgcatatgcaattgacattgctgcctgagatagactgaaggtttcagagggctaatggattttgaggcataacaaattggactctgctttttatggtagccttcttctagatcatggaagctggttgctttgaaaattgtcggatggcggtgatccaacagagatgcagagtaacagaaatctactctgccgtagactgtataatctcccgtgtttgttgaactaactaccatatctcaaatctgaatgtataatctgccagtggc

SEQ ID NO: 16172 - DNA, 1843 bp, Oryza sativa
  ref <308>: DATABASE ACCESSION NUMBER: AK066676
  ref <309>: DATABASE ENTRY DATE: 2001-12-06
gaagcttccctctactgaaagatgtactggttttgagagcactgaatctacacattatctgaaaaatactttgcaatcttggcaaactagagttatagttgttctcaacttgctttcttattggtaaaaaagttgacttttgccatcttttgtgttctaattcactttttgtatctgtatttaatttcttggacagcaatgatggagttcatagagctggagctcttcttcatccatggcttctgccgttgctcctgacatctggcactggaccagaagcctccccaaccccaagcactggaggggaaaatcctactatcttcaaatctgcaactctccatcaacaaaccagtctctgaacctcatcatcagctggcactctgaaacccaatccttcaatctgtcttactccatctgtgctgaacaccatgatccagtctcactctggagctcccattattccagattgaaatctgttaatggctcagattttgccatccatttctccacgatatcatctgcggggtcctcaggtatggcccttactccaacaagatgtcacccttcaggctgccaaatgttcaggtatctgaagatacaggcaaaatcttcaacctggcagcactcactcttgcactcatggtctgcatctacgaagctccgtccaccctccgacgagacctcatcggcacggtcagtgcgcagctgatacgcggcgacatgtggggtgctgcgaagaagctgatgcttgccatggggtcagacatggaggagcagtggatgcggtcactgaacctcgcagtcaccaactggatcatagagactcgccggtcaggtggcacgccggtgtcgcctttcacggtcttctcctacgctgtctcggcgatcaggctgtggaaggtggagctgtactgcccagtggtcgccatgatcatggagcacccggctcatcagacgaaagatgagaagctgcagttctcgctgaactaccagcatctggaggccgtgatccagttcatctacagagtcaccttcagggagaactggatcgacgtcaccgtcaacgtcgacaacataaggtgcgacctgatccagctggtgtcggagacgctgatggcgaagcagggctacggctccgacgagaagcacttcccgtcgcggatatcactgcagctgacgccgctggtgcagacggacatcctctccctgacagtgagccggtcgacggacaaccccgcccaggaggtcgacacagagatgggcctcgacgcgacgctcagcgcagcaccggcgaccatcggcatcaccatgtcggcgcacgagacggtgacgaggacactccggccatggaagttcgagcactcggtgcacggcaacacggcggcgctgaactggttcctgcacggcggcgcggagggcagggaggtgttctccagcgagccgcacaagcgggagctgctccagccgcggtcatggttcaggaaccggtacaccaacccgggcaggccgttcaccaggggcggcggcgtgatcttcgccggcgatgagtacggcgagagcgtttgctggaggatgcccgccgcggcggcgggcaagacggtggagtgggagatgaaggggaggatatgggtgacgtactggccaaacaagaagaggacgctgcatgttgagaccaggagggtcgagttcagagagctactgcgtctcaccatcagagagtagaccaatttgtcatcatctggtttcatatttgaaaattgttctaattttttttaatgattacttaatcaagactctgagaatgtctgcttctgttatggaattcaaaattatgttgggcact

SEQ ID NO: 16173 - DNA, 954 bp, Oryza sativa
  ref <308>: DATABASE ACCESSION NUMBER: AK066677
  ref <309>: DATABASE ENTRY DATE: 2001-12-06
gagtatgcaaattaaccatatggcaactgcttcgttgagcctcctcctctgcctcgccgcggcggccggcgccgccgccgcggctgttccgccgcgcttgcagtgctttgagcacccgccggacatgaaggccggcggcggcgaggccggcgtggtcgtccacgacctggcgggctacgaggcctacgtcaccggcgccgcccactccggccgggccatcgtcctcgcctccgacgtctacggtttccaagcgccgttactgaggcaaatagctgataaagttggtgatgccggatattacgtcgtggtacctgatttgtttcatggagatccagcaaccacaactgtgaactttaccgaatggctcgagtctcactctccggtgaaagaagctgaaaaagctaaatcaatctttgcttttctaagaaacgaagggaaatcacttgttggagttggaggatattgttggggtggaaagtttgctgtggaggtagcgaaaaccaatgaggtagaagcggttgtcttctctcatccttacgcagtgactgctgatgatatgaaagaggttaaatggcccatcgagatccttggaggccagaatgacacagttacaccaccaagattagtctaccagtatgtgcatgccttgcgtcaaagaaacgatattgatttctacgccaagatttttccaggagtttcccatggatttgccggtcgatataacaccagcgacccgtttgctctcgaaaccgggaaacaagctctcgccttaatgctggactggtttcagaaacacttgaagtgatgaaacttaataaatacatgaaagaacatgcgactgtttattcagaataaattaccggtgtccgagtacaaatttgcatgaacagccatgtatgcaggctgaatacaatgagtgtctgcaatctgaatttggttgctaatttctaccct

SEQ ID NO: 16174 - DNA, 2046 bp, Oryza sativa
  ref <308>: DATABASE ACCESSION NUMBER: AK066678
  ref <309>: DATABASE ENTRY DATE: 2001-12-06
ggcgcggagccgtcgtcttcctcctctactcctcggacttggccctcctcctcctcctcgcgccgcgccagcgctgacgtagccgtaggtcgccgggcgacgcgcccactaagatatcgagcagttccggagcctgctcagggggctgggtgcggccgctccggcgatcgccggagaagaagggtggttggaatctggtgagtagccggccctgatcccggtcgtcgtggaaatccttccttcctcttccgtggtgggcagcaagagattttggtgctccgtgatctggagagctgtgcgcgggactggggttaggtggcccccccaaggttcgatccggcccgatttggcggagggattcgaacgcggcgtattgggataggaagccgcgccggtggatttgttcgagcagatttggctgctgggggtttgtgtgatgggagatcaggcggcggcggatgcggcggcgagatggtgaccgggagctttagcaggagcacgtcggcgcggctcacagcgaggggcggcgtcgggagcccgcgggtgtcggcggcggcggccgcgcaccgcaagtggtggtggtgggcgccctcggggccgtcgttcgagtgcgctgccttggccttcttcctttcctccgtcgcgctcgtgctcgcctgcgcgctgtatctgtatctcttccggtaccagggccgcggccatgcggtcgccgagttcgccggcgacaacctagagtcctgcgacgtgttcgacggaagctgggtgccggacaggaggtaccctttgtacaatagctccgattgcccgtttgtggagaggggattcaattgcctggcaaatgggaggaaggacaccggctacctgaaatggcggtggaagccaaggggatgcgacttgccgcggttcagtgccagggatgtgttggaacggctgagggggaagagggttgtgtttgtgggggactccatgagccggacacagtgggaatctttcatctgcatgctcatggcaggggtggagaatcccaagactgtttatgaggttaatggcaatcagatctcaaagactatccggtttttaggagtgagatttgcgtcattcaacctgaatgtagagttcttccggtcggtgtttcttgtacaacagagccctgcacctcgcagtagcccaaaaagggtccgagcaattctcaagcttgataagatggataatatcagccggaaatgggagaatgctgatgtgcttattttcaactcagggcattggtggactcccagcaaattatttgatatgggctgctattttgaggctggaggtttgcttaaactaggtacatccattaattctgctttcaaaatggcacttgaaacatgggcttcatgggtgaaggaaaaggtggatttaaaacgaacacatgtctttttccgcacgtatgagccatctcattggagtggttcaaatcaaaaggtatgtgaagtaacagaatttcctacagctgaggccaaaggagatgacagaagtgaatttggagatatactcgctggggttgtggtgaacatgagcgttcctgcaactatcttgaatgtgactttgatgggggccttcagaagtgatgctcatatcggtatatggagtcatccttcaaccatacttgattgcagtcattggtgccttcctggagtcccagatgcttggaatgaactagtaatttcccaccttttgacaaatggttggcgaaatttggctggctgactgactgctgacattatactttgtttttctttttctttttcttttttgtttttctgctgcttctgcttcgtctgctatcaagtagcggaccatgatttttttttcttagacagcactacagcagcatgtcttcatcttggtttttccttttcctcaagtgctccttatacacgcctccggggttacagattttgtatcattgtctattttgcgttttagacagaacatcacaatcggcaacctgtatgtaaacaccaattcatttgcaagttttggaaagtcatttctcatgct

SEQ ID NO: 16175 - DNA, 3321 bp, Oryza sativa
  ref <308>: DATABASE ACCESSION NUMBER: AK066679
  ref <309>: DATABASE ENTRY DATE: 2001-12-06
gggccttcgtctcgtgttatctcttctcttcttcccaccccctctctctctccttctcctcccttccgccttcatcatcggcggcaaaccccttcttccatccacttcccccaccgaattcgcgcgcgcgcgccccgtggctgcggcggaggggaaggtgaggacggcggcgggcacggccacggcctccgagccgccgatgagattgcgcgccaccgcgacatgcaacccccgacgggcgccgtgtcagggtcgtcgtcgtcgtcgctggagtgcgtgagctcgtgcaggacgtcgtggaggggcggagggaggccgtacgaatgcagcgtgctctcgtgcgcctggaacgcgccgcgggcgctcacgggggcgctcgccagcaccaccgcgcagtgctcctcctgcagccacgccgaggctggggcagggtggaggcggcggggccagtcgcagcggagtaacaattcgttactgcacataacctgggcagaaggcatcaacagggggaagtttggttatggttcatcagcccattcttttcccactggaaattttttcaaatcttggtcaacttccgtggatccaacatggagagttttctgctattcatcatctgaatcgttcaatcatatttctccagaaactttgtgggaggatctcaagccagctatctcgtaccttcaacctgaagaattgaactttgtacacgatgctctgaagttggcatatgaggcacataatgggcagaaacgccgaagtggggaacctttcattattcatcctgttgaagttgctcgtatccttggggagcatgaacttgactgggaatcaatagctgctggtttattgcatgacactgttgaagatacagacatggttacttttgaaagaatagaaaatgagtttggtgtaaccgtacgccgtattgttgaaggggagacaaaggtatctaagctaggaaaacttcagtgcaaaaatgagggtaattcaaaacaggacgtctaggctgaagatttaagacagatgtttcttgccatgacagaagaggttcgtgtaatcattgtgaaactggcagacaggctgcataatatgcgtacactcacacatatgcctcagcacaagcagtatgccattgccatggagacactgcaggtttttgcacccctagctaaacttctcgggatgtatcgaataaagtctgagctagaatatctgtccttcatgtacatgaatcctggtgatttcgctgaactaaagaaaagagttgaggacctctacaaggcccatgaacaagaattggaagaggcaaatcaaatcttaggggaaaagattgctgaggatcaatttcttgatcttgttagtgttgaaacacaagtgcgttcagtctgcaaagaactctacagcatttataaaactgcgctgaagtccaagagttcaataaatgagataaatcaggttgcacagctgcggatcatcataaagccaaaatcctgcaatggtgtggggccattgtgcactgcacaacagatctgctaccatgtccttggtcttgttcatggtatctggacacctatacctcaagctgtgaaagattacattgcaaccccaaagcctaatggataccaaagtctacacacgacagtgataccatttctgaatgagagtatgttccatttggaagttcagataagaacagaggatatggatctcatagcagaaagaggcattgctgcgcactacagtggaagaggggttgtttcagggcctgttcgtcctggaatatcaagtggaaggaattcaaatgggaaagtgatatgtctgaacaatacaggctttgctctgaggattggttggctcaatgcaatccgtgaatggcaagaagagtttgttggtaacatgagttctagggaatttgttgatactatcacccgagatcttctgggaagccgtgtctttgtgtttacaccaaaaggcgagattaaaaacttgcctaagggggccactgtggttgattatgcttacctgattcacacagaaattgggaacaaaatggtagctgcaaaggtgaatggcaatctagtttcaccaatccatgtacttgcaaatgctgaagttgtggagattataatttatgataaattatctgctaaatatgcattccagcgtcaccagcagtggcttcaacatgcgaaaactcgcagtgcaagacacaaaattatgaaattcttgcgggagcaagctgctctttctgctgctgaaataactgccgacgccgttaataactttgttgccgatcttgaagatgaaagtgactatgagcagtcgattccaagctctgaaaataaggactatacattcaactggcagaagatattgaattctgacaaactatcctttggaaacaagaagagcgactgctttttacctgttaaaaatgtctctgtgccaaaggttaatgggaagcacaacaaaactgtcaaagaactgggcatcaaaattaatggttcaacatttcgtggtgatagcttcactgattttattcaccctggtgtttccagcagtaaagaagttctccctagtgtggataactggaaagctggtaaaatttgtgcgtggcacaatacagaaggcagctctatccaatggctctgcatagtgtgtgttgatcgaaaaggtatggttgcggaagtttcatcagctctaacagcgtgtggaatcaccatatgctcgtgtgtggcggagcgagataagagaaggggaataggtgtgatgttgttccactttgagggggcatatgagaatgtggtcagtgcatgctccggtgttgatatgattcttggggttcttggttggtccgttggatgcagctgtaatcctttgggtgttcttgaatgctagcggacaacaggcatcacgctgcatcagttcaccatctccagcaaaaaggagagacaattttgaagcaccaagaaatcagtccgctcaatggttcaggagcagtccgatcttggttgatgatgctgtgcaacccataacttgtccttcaaagaaggtagagtgagggtagagcaagctggagccggatattctggttcgtttggaagcgagaggagtgtacatagctgagcaagctactagtgaactgttagtccagggattggttgggttatagtattatacaaaagcctccatgaatgaccaacaatggcagcttctctcttctattttttttgtttgccattcgtacactagttatgtatgacatgtgcagctagaattttgatctgatgggattccaatgccccaaattttgcccgt

SEQ ID NO: 16176 - DNA, 2401 bp, Oryza sativa
  ref <308>: DATABASE ACCESSION NUMBER: AK066680
  ref <309>: DATABASE ENTRY DATE: 2001-12-06
gatcgcccaccgatttcatcgtgccgtgactcacatgccgcgccgaccgggacacgttgtgcggtcggtgtcggtggctgccgcgctttccgaccgagcgcgaccgcaccacaatatcacgcccaggcgcgcaccgagccggccttatccatctctggccagtgaccaccccgcgcttcacttcgcttcacttcggcttcgcttccatggcgatcaccgcggccaccgccgccgccgccgccacgccccacccgtggcaggccgacgcctcgccgcgtcgccacgccgcgtgccccgctctccgcgggaggaggcgcctccccgtcgtcaggtacgtattacgttgccttctgcggccttggggggcgcgcgcgcgcgcacgccaggtgctcgaccgattgcctctctgtgcgcgggtggctgagctgtggtgtttggggtgggggggggggggtggtgttatggtggttgttgttgttgttgaaggtgccagtcgtccagcgtcgacgacaagcccaagtccaagcggggcctgctcgacaacgccagcaacctgctcaccaacctgctcagcggcgggagcctcggcgcgatgcccgtcgccgagggcgccgtcaccgacctcttcggccggccactcttcttctcgctctacgactggttcctcgagcatggctctgtgtacaaactcgcttttggacccaaggcatttgttgttgtctccgatccaattgttgctagacatatcctgcgagaaaatgctttctgttatgataagttataacccccgggttccatgccttattcatagatgctatggtgggagtatttactaagtgttcagagagaacaatatttaagcttgaagagcttattgaaaggggcgaacatggggaaaagtataccatagtggaccttgaagctgagttttctaatttggctctcgacataattggcttgggcgtgttcaattttgattttgattcggttaccaaagaatctcctgtgatcaaggcagtatacggaactctttttgaagctgagcacagatccactttttacattccctattggaatcttcctttaactagatggatagttccaaggcaacgcaagttccacagtgacctcaaggttattaatgattgccttgatagtctcataaaaaatgcaaaagagacaagacaggaagctgatgtcgaaaagctccagcaaagagattactcatcattgaaggatgccagcttgctgaggttccttgttgatatgcggggagctgatgttgacgatcgccagcttcgagatgaccttatgacaatgcttattgctgggcatgaaacaactgctgctgttttgacatggtctgtttttctactagcccagaatccctccaagatgagaaaagcacaggcagaggttgattctgtactcagcaatgagacaattaatgtggaccagctcaagaaattggagtacataagactgataattgttgaagctcttcgcttgtatccccagccaccattgttaatcaggcgtgctctgcggccagataaattgccaggtgggtacaatggtgcaaaagaaggatatgaaataccagctggaaccgatatatttctttcgatatacaacctccatagatctccatacttttgggatcggccagatgagtttgaaccagagagattttcagtaccaaaaaaggatgagagcatagaagggtgggctggttttgatcctgaccggagtcctggtgctatgtatcctaacgagattttagcagactttgctttccttccttttggcggaggaccccgcaaatgcgtgggagaccagtttgcactcctcgagtcgacagtagccctggccctgctattgcaaaagtttgatgtggagctgcgaggatcacccgatgaagtggagatggtgacaggcgcaacaattcacacgaagagcgggttatggtgcagagtgaggagaaggacctgatcatccaccagttggcaccaaaagctgtgcttgtgccgtgccgcagcgggatgcatgcagtgcaggaaacaagaagcacacaggaataaatgcatcgatgcagacaacaaccaatacaagggtaagtaaagccagctactcctactccttagttcttttttcgctcatgatgtgatggtgtatagaagtatatactattcgattatttgtacgatgcatacgcatctgtgcgtgcctctttgacggcgaaaaatcgtttgggttgaactggaaattgtgctgagttgttacttcatctcaggctgaaacagcacgtttttgcgacctttttgtggtcagcaaattcgctgtcggccaagctgtatgaatagtatggatgatccagtccattttaatcaaatctgcacag

SEQ ID NO: 16177 - DNA, 2998 bp, Oryza sativa
  ref <308>: DATABASE ACCESSION NUMBER: AK066681
  ref <309>: DATABASE ENTRY DATE: 2001-12-06
gggaggcagttgtggccgccatcaagaacgaagcaagcctacttcccaactgctacatacaacatatccgcatatcgcgggaggaaggattggaggatatcgacatatcgcgggaggaaggatgggaggaagggggccactcgattgagcaacaagaagagatcactaatccccataccgagcacacaataacccctgccacatagttcatctgcaatttcatctattcaaggtacgtaactagtatagtatttgataacaatcaatggtttccctgaggctcatctgatcatatgttatcttattattagttatgtatacttccggttccttgttggcagaagcacatatatatttgttcctttaattggtttgtgatgtaacaattggccggctggttccttgggtggctactatagtgctgggggatgcaaacttcttgtacgtttcgttgtgtgctgcctaggcttttagtttctttgttctgtaactgagcaataattggagcttgaaaatgtgcccatgtttggtgtctttgtgtttctggacgtttgatatgatatataaactagatatcattttcatcaaacgtgcaaattgataatgaatgctcgactgttgtataagatacagctgctgtgcactaatgctatttgcttactttatattcagtcatgaattgagacatcattgatacagtagttaccctttgggtgttcaacatattttcatggatgatctggtttcacattttataaatttaataattttggccttgttgccaattgaaagaccggtactattatttaagcatgaaaccacagattaaggttatatatcttattaatttgtagtgataatttatagcatttatgttttatcttaatgatttcaaaaaagcagagcgctatatctgtgcccatgttaggcttcactggggacccagatttagtttcttactttctattttcaattatattattgagttttccttgtctcaagatataggtctccatgtttttctgaacgcacatatgattccatttaacgagcacacaccgcaatacaagcttggagatccacattatgtcgaatcaaaaatttggaagcattttttttgtcaaatcatgggagagaagagttccgcacttgaattttcaattacgaaagagtgatcaagattacatgaccctagagtcggaaggttacagtgattgaagggggaagggggaaaaacgcccctaattaaacaaagcccctgtttaggccagcttaagattctcatgaacaactggtcgcttctaaaaatctgaaaaaaaatgggtttcctaccgttttggttatagttcacgtgatgggctggatatgcatgccaaatgaattattgtttagcaaaaaagaagcaagttgtctagcaaaagaaagggcattggaggcacatatgtatgggtcatagcttcatcttctgtttgacgaggtcacacatatgcttaggcaggtcctagacgactgccaccaaacctaaagagagcagccgtggcaaggaacgaggtctagccaaccagcaggggaaagaacttggtgctagacctggcgagcgaacacgtagtcaaggaggatgtggttcgtcattttcagatcctgggcgcaaaaggaacaagccgagtggttgtcgataccacgctttgatctagtaatactccctcgtctttgttttctccacatactcgttttctctacggttaataaaagaacacagtacgtagtatagtaatattttaaaatcttgcttaacatatttattactagctaaaacagctgtctttcgagagtgtacacaaagaatcgacggcagggcaacggctgcttcctgcagcaggtaaacaggcacaaccggacagtgcacgtaggagaactgttgtttttggagacattggatctacctcatggtattggtacaaaggaactgcccaaaagtatagttaaactgtggcggttgaaatttttatgtgttggttatccttggagacttgcctgccttgctttctcttatgttaaggttgtacgcacatgacaccactgaaaggtttagcataaacagaaataagttcagatgtctgaagtgtctagacttgtatttttctgccactgatatgatgttccacgctggagccatgctaaagcttgaatacatctcgtttagaatcaagccacattccacagagtatgcatgtgccaatcgaaatctgggcatccaccacctctcaacccttaaggaactcagtgtttatatattcactgccaaggcgcgagggttgaggaggtagaggcagttgaggccgccatcaagaacgaagcaagcctacttcccaactgctcctcacaacatatggtcagattggctgggaaaatgatggtgacagaaggacatgaggaacggggctactccatggagcaacaagaagagatcaccagtccccccataccgagcacaaaataacccctgctatttagttcatcatctgcaatttcatctattcaaggtatataactatagtacttgataataatcaatggcttcccagaggctcatcgaatcatatgttatcttattaactaggtacgtatacttctggttccttggtagaagcaaatattttgttcctttaattgatttgtgatgtatcaatgggccggctggttccttgggtggccactagcccactgtcactaccaaattcgagggctagcctgtatgccgaaaaccatcaggaaaatagattttaccttctatgggtggaccgtcaggttttaccgtctagtagtgtacagtactgggggatacaaacttgatgtttcattgtgtgctgccttggcttttaatttgtttgttctgtaactgagcaatagttggagcttgaaaatgtgcccatgtttggtatctttgtgtaaaagtctcccgccgtttgatatgatatataaactagatataatttcc

SEQ ID NO: 16178 - DNA, 1206 bp, Oryza sativa
  ref <308>: DATABASE ACCESSION NUMBER: AK066682
  ref <309>: DATABASE ENTRY DATE: 2001-12-06
gattactcgcagcgcatcactcacagctacatccacaagtactaaaccaatctctgccagcagtagctctcagctatggctgatcccagcaagctgcaaatcacaccctgtggcatgcttgttcagggcaaccagatcaacttcaccaaactctacctgcaccacacgccggctggtccagaacaaaaccagtcggcggtcacaagcaatgacaaaaaaaccgggttgggttgcattgtcgttaacaactggtcagtatatgacggaatcggcagcgacgccaagcttgttgcctatgcaaaaggcctccacgtttttgcgggtgcctggcacaactccttcagcctagtgttcgaggatgaaaggcttaaggggtccacgcttcaggtgatggggctaattgtcgaagaaggtgattgggctattgttgggggcacaggacagtttgctatggcaactggtgttatcttgaagagaatgcaagaacaaaaacaatacggaaacataatagagctcactatcaatgggttttgtcctctcttaaaagggtcacagtgccctgtcaccaagattgggccatggggttcatctcatgaagggacagttcaagacatcactgagtctccaaagcgtctcgaaagcatcacattataccacggctggtctgttgactcaatctcgtttacttaccttgaccatgccggagagaagcacaaggcaggtccatggggtggtcctggcggggatcccataatgattgaatttggcagttcagagtttctcaaggaagtttctggaacgtttggcccatatgagggcagcaccgttataacatctattaattttatcaccaataagcaaacatatggcccatttggacgacaggagggaacccctttcagtgtcccagcgcagaataactccagtatagtgggtttctttgggcgcagtgggaaatacataaatgcagttggtgtctacgtgcagccgatctaacttgtcaaaataagtattccgtgtttgagtttcacgtgtgttttctgcagtaaacaaataagatgggggtcctccctatcattcctgttgtgatgagtgatgcttggtcgctggagtccttctgaatttacagtcgtgtcctatcagttgtttctgtctgtagtgtgttgcatgcatcaataaagatcttcattgaaggttggttgtgtg

SEQ ID NO: 16179 - DNA, 2941 bp, Oryza sativa
  ref <308>: DATABASE ACCESSION NUMBER: AK066683
  ref <309>: DATABASE ENTRY DATE: 2001-12-06
gagtctgcattgcaatcccccacccaacccaacccatgaaatgaaatgaattcaatgaacccatatcgatcgattgatatgtgcctccgcctccgccgctctgcctcctcctgggccgccgccgtcgctgaccacgctcgctccggtcgccacgacgccgcgctcactgtcttccgccgcgttctcgccgtccacccgaccaccgccgccgccgacgagctcgcctgctccgccctcctccgctgctgcgatgcccgcttggcctaccagatacacgcccaggcatgccggcgcggcttggtggcctccaatcccgtcctggcctgctccctgctcgccttctacgctgccgccgcctcctctcccaccgccgcaataccgcctgcctgcaacctgttcgacgaaatggcacacaaggatgccgtctcctacacagccatgatctctgctctcgtccgcgcgggcgcggcccactggaggcaagctctcgcgctctatccctgcatgctccaagcccgtgcgccgcccactcaacacaccttcgcccagctactctctgcctgcgcctccggccgcctgcaccaccaaggcactcagcttcatgctcagctcctgcgctggggagcgggtctcaacctggtgctcaagaccgcgctcctccatatgtactgcaactgcggcaacatgggctatgcccacaccgtgctccactccacgcctcaaaccgacgtcgtgctctggaccgccatcattactggctacgcgcggagtggagacctccagtctgctcttcagatgttccgctccatgacccgtgctgcagtgctgcccaatgccttcacctacgctgccctgatctctgcttgctcctccttccgggcactgcagcctggacggcagattcatgcccgcttgttcaagtttggactagagcatgatacctcagtctgcaatgcacttgtggacttgtacagcaagtcctccagccgtttactcgacttgttgcacactttccatgcagtcgacaagccgaatgtcgtgtcctggactgccttgatcgctggacttgcatgccatggcagagatgaggaggcgtttttggcattttctcagatgcggcttagcggggtgcttcccaactcgttcaccgtctccactcttctcaaaggcagtagctcctcgctagctttcctgcatgccaggaaaatccatggctacattctcaagaccagctttgaatctttggatgcagctgttgggaactccttggttgatgtttatgttaggtttgcaaggatggatgatgcatgggcagtggcgaccacaatggccttcataagggacaggttcacatacacaagccttgctagagggttaaatcagatgggccttcaacagaggacccttgaaatgtttgtccggatgttccatgaggatgttgatatcgatggtttcagcatcgctagcttcctttcgtctgctgcaagcttggcatccatagagactgggaagcagttgcatagctgctcggtgaaactaggattgagtagtgacatttcggtctctaacagtcttattgacatgtacagcaaatgcaagtgtatgggggatgctaggagcgttttccagtcaatcagcgagccaaaagttgtgtcctggaatgccttgatgtctgcactggtatccaacgagtattataatgaagcgttgtcggctttcgaagacatgacattggttggagctaagcctgatggcatcactttctcactaatgcttttcgcttgcaaccgcagtggcttagttgacattggcatcaaatacttcaactctatgggcaatttgtttggtgttctcccacagaggagccactacacactctttctggatatgttaggacgatcaggtcgtcttacagaggcagcgagcaccattgatgttatacccatccagccagacctagttaatgtgcagggctctattggcatcttgaaatctctgtaagaatcgagtcataggtggaaatattgcaaggaacttagattgtggccaatcattcatcaaggatggcatctgcggtactccggtgatagaagagtgtcgtctgcaggccccaagatccacaagggttatttcttgggctttcccttctggcatcttcaagttgagcacaggaggcaggagaatggacaagataaacttctggcaacgacatgacatcatctgaaaagttctgatccattggtagtccccatacagtcccctttcttgtttggctacctgtaattgtttgtgcacagataagtcaggagcaatcaggttttcaagacgtttgctgtccttctcgttgagggaggagtagaactgctggatcacatcgggcggcgcttctgaggccttagctgtacttgtagtttgatgaaagtgggaggagattggaaggaagcagccgttaaggcagaattgatcatcattgtgttggttgtttgtctgtctgtttgatgacgggaaggaattggcccctgttaaagactaatcttcagtaaacataggcccgcttggtttggtttttaaggagaggaaccaggaatggattgtcttttgcttgcttgcctaccaaacgaaacggtggaagaggatgccaatctgcgcatggtagttttgctgttgctggaaaaggggtatcaggcaaagatgcagaacagagatggatgcatgggtgagataagaatcagaatcatcagcgcagctggctttgcgacccagaagccagaaaggtcgcctacgtgcttgctgaactgtactactctgtacatattctgatatgcatgcatacgtagtactacaatacaaacgtgttgcatacagtgtactacgacatactataaaccctcctctttataagtgacgtatggtaaaagattgagctggctaaattaagatg

SEQ ID NO: 16180 - DNA, 2987 bp, Oryza sativa
  ref <308>: DATABASE ACCESSION NUMBER: AK066684
  ref <309>: DATABASE ENTRY DATE: 2001-12-06
ggtgggcctctggaaaatccaactgcctccactcgcaacttgcatcgtcctcccgccgccgtcgctcgccgcgtcgtttcccttcctccctagcaccggcaccatcgccatctaagcattcacggtcgccgtcgccgtcaacctctccacccttcccgttgccgcctcttggaagttggaagtaatcgcggtatgggaggcgttcgccccaccttgtttgatgcacgcaaggtgtttgttagaatgcttagcagcggtgtaggcggcggtgacgccctggtggacaccgctgaccctgctaagcgcctgttcaagctgatcatctcctgccggaaggcctcagcggtcgagcacgagctcgaccacagcggcgtccgcgtcacgcccgacgtcgccgagcgcgtcctggagcgcctcgacaacgccgggatgctcgcgtaccggttcttcgagtgggcgcgcaggcagaaacgcggcggctgcgcgcacaccgtccggtcgtaccacacggtggtcgcgtccctcgccaagatccgccagtaccagctcatgtgggacgtcgtggctgtcatgcgccgggagggcgcggtcaatgtcgagacgttcggcatcatcatgaggaagtatgcccgggcgcagaaggttgatgaggcagtttacaccttcaacgtcatggagaagtatggcgtggtacctaaccttgccgcgttcaatagcctgcttggcgcgctgtgcaagtcaaagaacgtgcgcaaagcacaggagatctttgacaagatgaatagccggttcagccccgatgccaagacctatagcatcttgcttgagggatgggggagagcgcctaacctcccaaagatgcgagaggtctatagtgagatgcttgacgctggttgtgagccggacattgtcacctatggcatcatggtcgattcactctgcaagacaggccgcgttgaggaagctgtccgtgtggtgcaggacatgacctccaggggatgccaaccgacaacttacatatacagtgtcttagtgcatacttatggcgttgagatgaggatcgaggatgctgtggcaacatttttggatatggagaaggatgggattgtgccagatattgttgtctacaatgcacttgtctctgccttctgcaaagcgaaaaaatttgagaatgcctttagagtccttaatgatatggagggccatggaatcactacaaactcaaggacctggaacatcatccttaatcatctgattagccttggaagggatgacgaagcatacaaggtattccgccgcatgattaagtgttgccaaccggactgtgatacttacaccatgatgataaaaatgttctgtgagaatgacaaggtagagatggcactcaaggtatggaagtatatgaggttgaagcagtttctccaaagcatgcacacgttctctgtactgatcaatgggttgtgtgacaagcgtgaggttagtcaagcttgtgttttgcttgaagatatgatagagaagggcatcagacctcccggttcaacatttggcaagctaaggcagctgcttttgaaagaaggaaggaaagatgcgcttgactttcttgttgagaaaatgaacatcctgattcaggaacctttgtttgattgaccattcatatcttataatgggttcataaattttgatgtgctgcaacactttttttttttggaacgatcaccggaggggagaggttccccacctgaatttccattaaataaacaagcaagtctgatacaaagggagatggatcagcagagtgcagcgacactgccattacagttaatcaggaagaaacaagtaggggggaagagagtacatgcttccaagcggaagcaacctgtctgtcttgaattttcaggcgttcgacccagagagtggcgtcatctatgcagcgccgaagtaatcgttaaaaggagggctcctggtttctgaagattacatcatgacgatgattccaaatacccaacaaacaaagaagaataaaggagcgatggtgagctgctgggatgttcgttggccgctgaaaaagttgtaggtttctgatgtcgtcgatgcccggtgtgatgtgaattgagtcccaatgtgctgcaacacattgagatgtttgctattcacatatgtgagtgtccccggcaggaggatgagtggaggtccaatcaaggcttgtttggattggaaggaattgcaattcatccattccattcggatcaacagggattttagtcaacttccctgttgaaagggattggacatgatccaattgcatccagaatagaccttaaggcttggccatggtatcatcatcaaactcttctgtacaacgtattggcaacgtacataccagtggtctgctgatcacaaggtttgtgcttaaagtgctcaactgctgactgctaaccagctaggtgactacttgctgcaatatcagattgagactttgtcatcataaagagatcaatatgcactagctgatccaaatgagctattaggtgcaagcatcctgcaagaacttgtcagttaggaatgatgatgttctcaattcatgtcttcatgccatactgcagaataacaaatccactatatcatctatgttgtacaaatgatcagtggagcatgaagaactgaacccttgtccatgaaaagttggagaatttgttgaacggttgaacctcaagatgaagaatttaagaattatgcaaggaaattattgagctcaaatttcactgcaggattataattcatagagcagaaggtgacatcaaaataacaaaggacaattgctcatttgaccctgtgctgaagctaggcactgcacagtatgtacatgtgctgacaagcaaggtaaacagtagaaaatttttcatatgtcttcactgctttctgtgtgagttgttacaaacaactgggatattattgtgcaagaaatataactatacctaacattgtcg

SEQ ID NO: 16181 - DNA, 2328 bp, Oryza sativa
  ref <308>: DATABASE ACCESSION NUMBER: AK066685
  ref <309>: DATABASE ENTRY DATE: 2001-12-06
ggatacaagagaagttctagtagtgaaacctagtggttctaatcaggtcgatcctgactatttggaatctgagaagcgactccagaaatggttttcacgacaaccagcagagataataatcgctactgggtttattgccagtacagccgaaaacattcctactacgcttaaaagggatggaagcgacttctcagcatcaataattggatcccttgttagggcatgtcaggtcactatctggactgatgttgatggggtatttagtgcagatcctagaaaagttagtgaggctgtgatcttaagcacattatcttatcaggaggcctgggaaatgtcatattttggtgcaaatgttttgcatccccgcaccattatacctgtgatgaaagacaatattcctattgtcattaggaatatgttcaatctatctgcccctggaacaacaatttgcaagcagcctgctaatgaaaatgctgatttagatgcttgtgtcaaatcatttgctactatagacaaattggcccttgttaatgtggaaggaactggaatggctggtgttccaggtacagcaagtgccatatttagtgctgccaaggatgttggagctaatgttatcatgatatctcaggctagcagcgaacactcggtatgctttgctgttccagaaaaggaagttgcagcagtctcgacagccttgcatgttaggtttcgtgaggcattagcagctggaaggctatctaaggtcgaagtcattcgtgggtgcagcattcttgctgctgttggcttgaggatggccagtactcctggagtcagtgcaatcctttttgatgcattagcaaaggcaaatattaatgtacgagcaatagcccaaggttgcagtgaatacaatattactgttgtgttgaagcaagaagattgtgtgagggctttgagagctgttcattcaaggttcttcctctccaaaaccactcttgccgttgggatcattggaccaggtttaattggtggaacacttcttgaccagctgaaagatcaggctgctgttctcaaggaaaatatgaatattgatctacgtgttattggaatatctggctcaagaacgatgcatttgagtgacataggggtagacttaaaccagtggaaagagcttctacgaaaagaagcagaaccagcagatcttgatagttttgttcgccatttgtctgaaaatcatgtatttccaaacaaagttttggtggactgcacagcagatacatacgtagcatgccactattatgattggttgaagaagggtatccatgtcatcacgccaaataagaaagcaaattctggtccgcttgatcggtatctgaaattaaggactctgcagcgtgcatcgtatactcattacttttatgaagcaactgttggtgctggccttccaatcattagcaccctacgaggtcttctagagacaggtgacaagatattgcgtattgagggcattttcagtgggactttgagttatattttcaacaattttgaaggtacacgaacttttagtaatgttgttgctgaagcaaaagaagctggatatacagagccagatccaagagatgatctatcaggaactgatgttgccagaaaggttattatccttgcaagggagtctggtctgaggctcgagctttccgatattcccgtaaagagccttgtgccagaggcactgaggtcatgttcgtcagcagatgaattcatgcagaagctaccgtcctttgatcaggactgggacaggcaacgcgatgaagctgaagctgcaggagaagtgctgcggtatgtgggcgtggtggacgtggcgaacaggaagggccgggtagagctgcagaggtacaagagagaccaccccttcgcgcagctgtccggctccgacaacatcatcgccttcaccacgtcgaggtacaaggagcagccgctgatcgtgcgaggccccggcgccggcgcggaggtcaccgccggtggcgtcttctgcgacatcctgcggctggcgtcctacctgggagcaccctcctaggctttaaccttgagcgtcctgccttcctcgacaaaaattgtctggaggaagatgaggcgtattgattgtgcccgactggttattacatcatatatgggactggtagtatgcagtatgtatgttgtttctgaataagtgcgaggaaataaggtcttagaggtgctagatggtccttggatcaggtgttgtttttgccacacaatccagagccgcttgctatcgaactgccacattgtattggtgatttggagtgatctaataataatggcttaaattcc

SEQ ID NO: 16182 - DNA, 2555 bp, Oryza sativa
  ref <308>: DATABASE ACCESSION NUMBER: AK066686
  ref <309>: DATABASE ENTRY DATE: 2001-12-06
gaccgtacacccccaaaacccccctgccttctctcgccgattccgccaccgccgccgcgccgcgcctcgccgccggccgcccttcgatctcctcctcctcctcggaatggatctctacatggacgactacatcgacccctacgaggaggccgaggcggaggccgccgcggaagccgccgggctgacgtccgcggcagcggcggaggactcctccgacgagggcgactccgaggacgactccgaggccgagagcgactacgaggagaggtcctacggcctcctccgctccggcaaccaccgcgtgcgcaacccggacggcaccttccgctgccccttctgccccggcaagaagaagcaggactacaagctcaaggacctcctccagcacgccgacggcattggcgcctccagcaagcgccgccgccacggccgcgagcgcgccttccaccgcgccttcgcccgattcgtccgcaccgacccttccttcgcccaagacctcgccgccatcaacgggatcgccaccactgctgatgctatctctaattctagtgctgccggtgccaaggagaaggcggatgccaatggcgacacagacggatccgcttcggtggcggctgtggccgcggggaatagacgggaggaggagaggtttgcttggccatggagtggggttcttgcagctggtgcagggttcaatgccgaggacttcgcggatagggtcgcaatgtttggtttggatgatgttgtgcctttagttgtcgatgatgcggaaggcgctgatagctttgcgattgtgaggttcgctaatggttggggtggattcggcgatgcgctcacgctcgagaaccatttcaacaagaataagcttgggaagaatgaatgggatgcaaggggtagtgctggagatgctgtgaagggagatgatggggacacagatgttaaggtttatggttgggttgcccgagaaggggactataatgccgggaatgtggtgggcaggtatttgaggaagcatacgaacctgacaaccatagatgaggtctccaagagtgaatcggaaaagtcggggaagatggtagcgatactggcaactcagatcgaggcgaaaaatcgattcttgcaggacttggagacaaaaaagaatgcaaccgaactctccattgcacggctcgaggaggacaacaggaagctacacgatgcatataatgaagaaatgcgcaatctacaccggagagctcgtgattatgctttaagagttttccaggataatgaaaacttgaagcttgaattagatagcaggaggagagaattgaattcacgtgctaagcagcttgaaaagataacagctgagaatgcaagcgacaggaaaaaacttgatgatcagaagcaaaaggcaaaggatgataatagtgaacttgagctagcaagcatagaacagcagagggctgatgaagatgtaatgaagctagttgaggatcagaagagggaaaaggaagatgtccttgcaagaatgcttcagctggaaaaagagctgcatgaaaaacaacagcttgagcttgaagtaacacggctgaatggtacacttcaagtgatgaagcatttggaaggagacgatgatggggatattcatgataagatggagaaattgagtgaaagattagaacatgaaaagaaacgtttggaagaattgagcggagagctggtgaagaaagaacgtgaaagcaacgatgagttacaagaggccagaaaagaactgataatgggtttggaggacatgctaactgggcgaactgctattgggataaaaaggatgggggaacttgatgagaaacctttccaaaatgcatgcaagagaaagtacggaaacgatgactatgagatcaaagctgcggagctggtctcaagttggcaggaggaaataaagaagccatcctggcatccttataagattataacggttgatggcgaagataaggaagttgtagatgatgacgacacgaagctgcggcacttgtggatcgagtacggtgacgatgtgtgcaatgcagtgaagaccgccctgagcgaggtcaatgagtacaatgccagtggacggtatgttgtgcccgagctgtggaacttcaggaaaggccgaaaggcgacaatgaaggaggtgctcaagtacatctttggacagatagagacaaccagcaagcgcaggaggccgtgaagttcgtccttcgatggatgaagaagctgacaggcaagcgaaggatggtttgaggtgctgggtattggtgctaggtatcaagagctgctgccttctgttatcatctcaggtcaggttggaggcgctggtcaattgatgggtctaagttgatgaatactagtgtattgatcaatggatgcccataaggctgtgccaatccttagttataatgattatggttatggtcagtgtcaggctgtagaaataatcctgtgttgtgtccctttgagttgtagaataatcgtctgtaataatttcgatatactttcgtggtccaagacatcataaatctaagtgattagctact

SEQ ID NO: 16183 - DNA, 1541 bp, Oryza sativa
  ref <308>: DATABASE ACCESSION NUMBER: AK098964
  ref <309>: DATABASE ENTRY DATE: 2002-08-28
ggagcgagttagcgagcagagatccacggcccgcagcggcggcggcggcggcggcggccgaagcccatctggttacgcgagggagatggcagcggcggcgggaggagtcgccggcgagccgtcggggacgaggacgaagcagcttaaggtcgccgtgatccaccccgatctcgggataggtggtgctgagagattgatagtcgatgcggcttgtcagcttgcggtccatggtcatgatgttcatgttttcacatcacatcatgacaaaaaccgatgctttgaagagactgtttctggtccatttgaagttaaagtatatggagatttcttgcctcgccatattttttaccgcttccacgctatctgtgcatatcttcgctgcatttttgttgcaatgtgtgtgctactttggtggccctcatttgacatcatattagtagaccaggtttcggttgtgattccactgcttaaactgaaggcaaaatccaagatagtattttattgtcactttcctgatatgttgcttgctcaacatactaccatgcttcggaggttgtatcgcaagccaattgacatgattgaagaaacaactactggtatggcagatttgattctagtaaacagcaagttcactgcaacaacatttgccaggaccttttgcagccttcatgctagaggagtcgagcctgctgttctatatccagctgtctctgttgaacagtttcaggaacctcatgcttataagttgaatttcctctcaattaaccggtttgagagaaaaaagaatcttggtcttgccatttcagcattttctctgcttcgctctgttgcttctatgctacctggtgatgctcgacaggaagtaaccttaacagtagcaggtggatatgataagcgtctcagagaaaatgttgaataccttgaggagctcaaaagattggcagcgagtgaaggggtttctgaacatgtcaaatttgtgacatcttgttcaacttctgaaaggaacgaacttctctccaactgcctttgtgtgttatacactccaaaggatgaacatttcggtattgttcctctggaagccatggccgcatataaacctgtaattgcatgcaacagtggtggtccagtggaaacagtcataaatgacgagacagggtttctctgtgagccctctgcccctgaattttcaaaagccatgctgaagctcgtgaacgatcacgatctagcagttaagatgggtaaacaagcaaggggccatgttgtgcagaagttctcaaccaagacatttggtgaccttctgaacagctatgtccttaatgtgtaccatcagaggattgagtgatccccaattcggtgtcggcaatgccgtggaacacttggaatagaccatcattttcatgttttttccttttcttttgttacttctgacttcgatgtacacgcatgcgatagagtattatatacggatgaatagtgaaaacgactttgtaatgttaccatttgtggcaatgacaggaaaaaatatatatttgggccgtctg

SEQ ID NO: 16184 - DNA, 1356 bp, Oryza sativa
  ref <308>: DATABASE ACCESSION NUMBER: AK066687
  ref <309>: DATABASE ENTRY DATE: 2001-12-06
gccccccggttctcgcctctctctctctctctcctcttcaattctctctctacctccgctgcggagctcgccgcgtagcaatggaggcgggcgtggggctggcgctgcagtcgcgggcggcggggttcggcggctccgaccgccgccggagcgcgctctacggcggcgaggggcgggcgcggatcgggagcttgagggtcgctgagccggcggtggcgaaggccgctgtgtgggctcgcgggtccaagccggtcgccccgctccgtgccaagaaatcgtccggaggtcatgaaacattgcataactcggttgatgaagccctcttgctaaagagaaaatcagaagaagttctcttctatttgaatggacggtgtatttacctagttggaatgatgggttctggaaaaagtactgtgggaaagatcatgtctgaagttttgggttattcgttctttgatagtgataaattggtcgaacaagctgtgggcatgccttcagtcgctcaaattttcaaggttcatagtgaagccttctttagggataatgagagtagtgtcttgagggatttgtcctcaatgaagcgattagttgttgctactggaggtggtgctgttatccgaccagttaactggaaatacatgaagaagggccttggacgctcttgctaggcgtattgctaaagtggggactgcctcccgtcctcttctagatcaaccatctggtgatccatacacaatggtgactacttggcccatgaatttatgccatgcatgaatatgatattatttcagatgtatttttttaaatttttaatcagtcaatataggctcattcattcaatgtagaaatgaaaaactgcaagtatgatcctgcacatctgcacaactggtagtgtaattctttcatttcagtgctagtatgagttgctcactggattcttcctatcttaggctttttctaaactcagcatgctcgcggagcaaaggggcgatgcttatgcaaatgctgatgtgagggtttctcttgaagagattgcatctaaacagggtcatgatgatgtatcgaagctaacaccaactgacattgctattgagtcgtttcataagatcgagaactttgtcattgaacataccgttgacaatccggttggtgactcccaggctgactcacgtgctcagaggatacagaccttgtagaattttgatcttttttgtaccttagtgttaccttgtagcgctgttgagttatttgttcgttgtaccgacaagatgatgaaaagaaccggaagtgtattttccttgtaaactgtaaagaaaaggaataatggagctaatcagaaaatcagcgtttggttgc

SEQ ID NO: 16185 - DNA, 1433 bp, Oryza sativa
  ref <308>: DATABASE ACCESSION NUMBER: AK066688
  ref <309>: DATABASE ENTRY DATE: 2001-12-06
gagtagactagtagtagtagaagttgtgcgtttgtgttgttcttcgccggcgccgccgcccatggcctcttccatggccgccaccgccaccctctcgccgccggttttatccgccgagaggccgactgtccgcggcggcctcttcttgcccccttcgccggcgacctcccgctctctccgcctccaatccgcccgccgctgcggcatctcgccggcgaccaggaagccacgctccttgcctcgagcagccaaggttgttgtggctgtgaaggctgatcctttgaaggtcatgatagcaggggctccagcatctggaaagggaacgcagtgtgagctcatcaagagcaaatatggtctggtgcacatttctgctggagatttgctaagggcagaaattgctgcaggcagtgagaatgggaagcgagctaaggaatttatggagaagggtcagctggttcctgatgagattgttgttaatatggtgaaggaacgccttctgcaaccagatgctcaggaaaagggttggttgttggatgggtacccaagaagctattcgcaagcgatggcgctggaaactcttaatatccgacctgacattttcattcttttggatgttccagatgaacttcttgttgaaagggtagttgggagacggcttgatcctgtaactgggaaaatataccatctaaagtattccccaccggagaatgaagaaatcgcttcaaggcttacacagagatttgatgatacagaagaaaaggttaagctgaggttacagactcattatcaaaatgtagaatccttgctatcaatttacgaagatgtgatagttgaggtaaaaggggatgctttggtggatgatgtgtttgctgagatcgacaagcagctgacttctagccttgataagaaaacagaaatggtggctagcgcatgagcaaaagatctgtgccgattgaacgtgctcagattcacttattttatacctttccatgtagttggaaattggaagtatgggaattttggtttgaagaatcccattattgttgtagacaaatggaagtgacaaagcatcgacaggatgaatgttagaaatctttctatcatacctttgatgtacatgcatagctgctgtcctgtaaacacctctaccgaagaaatggttaggaatgtatttgatatacaaccctaatgaaagggttgacttcatttgattgtatttgcggagccctagcagctgtttgtttctactttctactgcttctgggagtatctgtatatgtatctaccctatagatgtttctgatgctaagtcaaaacatgttatgtgatgattctgtgctactataaactagatatctggctctaaaacacaacaggcaatgcttatatcaagcaactacaatatgtatgatcttgtatgaagcattgagccc

SEQ ID NO: 16186 - DNA, 1923 bp, Oryza sativa
  ref <308>: DATABASE ACCESSION NUMBER: AK066689
  ref <309>: DATABASE ENTRY DATE: 2001-12-06
gacgccgtctcacccacccctcgccgcgccgcaaccctcgccgcgccgccatgatgtcctccacggcgccgccggacatgcccgccggcgacggggacggcgacatggagacgctccccctcgcctccgactacgcctccgtcgcctccaccttcgatcccctcctctcctccgccgccgccgccgcctcgccgccctccccaaccatcgccgccgccgccgccttcccgctctccccgtcctcctcctcctccttcgtggacccgccctcctacgccgacgtcgccgcctcctcctcctcctccccgcgctccgcatccgcctccgcctccgcctccccgagatccgccgcgtccgactacgccctcatcgccgtctccgaccccacgcccgaggccgagcccgccgccacctccctcgtccccggatccgccccgacctacatctcctacctcgtcaccagcgcccgccgcggggaccaccgccgccacgccgtccgccgccgcttccgcgacttcgtcaccctcgccgaccgcctcgccgaggccttccggggccacttcgtgcccccgcgcccggacaagaacaccgtcgagagccaggtcatgcagcgcgacgagttcgtcgcccagcgccgcgccgccctcgagaggtacctgtggcgcctcgccgagcaccccgcgatcggccccagcgacgagctgcgcgtcttcctgcaggccgagggcaagatgccgctgccgagcaccaccgatgtcgcttcgcggatgctcgacggcgcagcgcggctgccacggcagctgctcgccggcgaggaggccgtggctgcgccgcaggaggtggtgcagccagccaagggcggtagggaccttctgcggatatttaaggagctgaagcaatcagtcgtgtctgactggggcggcgtcaggccgcctttggtagaggaggataaggagttcctagacaaaaagcagaagctgcaggattgggagcagcagttgactagcgcatcacaacaggctgaagcacttgtgaaggctcagcaagatatgggtgaaacaatgggggcacttggattggcattcatcaaacttacaaaatttgagacggaggaagcaatgtatgactctcagaggataagagctgctgacagcaaacgtatagccactgcagctgtcaaagctagccgagcatgtcgagatttgaatacgcaaactgtcaaatatctggacactctccatgaacatctagggataatgctgtctgtccatactgcattttctgatcggtcaagtgcattattgactgtacaaacgctcatgtcagacctggcatcattgcaattgaggattgaaaaactcgaagcagctgcatcaaaaatatttggtggtgataaatctaggcttcgcaaagttgaagagttaagggaaacaataagggctactgaagatgctaaatgctgtgcactaagggaatatgagagaatcaaggaaaataatagaagtgaactcaacagactagaccgagagaagaaggaggatatgcttgagatgataaaaggatatgttacaagccaagctgcatacgctgagaagatcgtggagggttgggagacagttgcagaggagacgagtggatacgcccgaagatctgataacaacatagcgtggtagcattcacaacttttgcccgtcttctcttggttggcacatgtgagtgtgtatgtacaatgtgtaacctaggatggtgaaggccaaaagtagaagaaagacctaattcaatttgtttttcatttatttaaagaatattggcgtagttcaactatcgggagtacagacgcacatcgtcacactactgccgtactgcgcatacgattggagctgcctgcctgcttggttaacttctgcaacgtttgttcagctt

SEQ ID NO: 16187 - DNA, 1300 bp, Oryza sativa
  misc_feature (67)..(67): "n"=any one base of a, t, c, or g
  ref <308>: DATABASE ACCESSION NUMBER: AK066690
  ref <309>: DATABASE ENTRY DATE: 2001-12-06
gacatctcgcgcgcggcctccggtcgtcgtcgcgactccgctgccgccgtcgcccggcgccgccggntgatcccgctcatgtgctagtagaaggcgttcggagctctttgggagtgtcgcacgcatggagatgaccagaagccttacgctcgtgccgctcccggcgacgctccggccggcatccgcggcctgtcgccggcggcggaggcggcgagggcttcccttcggtgcactcttctcaccatcgcctccttcgaaccagcagcagcaggaaatgcacatcagggcgctgcagccgcggcaggattgggtgggggagtgggtccggagcaacgacacgctagtccgcggcctgcccatcctcggcggcggcgcctccctgctcgccgtcctcctcaaccgtgcggtttccggcattgcagctgtcgccgacgcctccagttcgcagtcaagggctgacatactgactcttgctctctccgtaactgatattcttgctggccttgtttggttgtccatccggccgaaatccatttctcctgttgttcctcgaggtgtcgagtgcaaacgggtaggaacgggtgtattggactcggctcttcgtgaactactttggacatgggattcccttacaactgcaacttgttgcaaatccttggttgttgtgtatggaggtaattgtgttcttcaaattggggttgctgctggctctccagaggatggtaatgcagttatggtggatgcacagaagttcatgcaaggttccctttatagaagtgccatggaatccaagaagcaatcttacctagcaaatcttgccttatatcctggaaggactgaactaccattcttgccagctaacacgcaggccctaatattgcaaccaattggtgataaaggaattgcagttattggtggtgacactataagggggttcactaatcttgatcaggcatggattgcaatgatagcagataaactggatgctacattgtcaaagtcgtaagaacgcgtagtttgttggatattgtttgtatcttgcaattggccaaactgtcacgagagatgatcatctgtcactgtacatgttcaagttacaggtagagtttgcaaaaccaacggataaaacagtacagggctggggttgaccaattgttttaagccaggctgtatgattaggcttgattaagtttgaccagcatgaattgattacaatgttagttacttcttgtaaccagtcactgttggctgaatgaatcacattactgatgctttcatttgtaagatctcatcacatttc

SEQ ID NO: 16188 - DNA, 1028 bp, Oryza sativa
  ref <308>: DATABASE ACCESSION NUMBER: AK066691
  ref <309>: DATABASE ENTRY DATE: 2001-12-06
gtagccgcctgccatcttccttccttcctctagttgtttgacagtatatgtttgattagttctggttgtagacttgtatgcacaacatgttgatcaactagatgtcgctgtcaaactaaaggcaacggataaggattgctctaatccaatccagtcttcatccaccacatacttggagacaatctatatctgctcgacaaataggatatgaatcagcatggaccatgtcccgtgtggactggaaaattcgcgaaaagagtccccggtctttttaatatttatccctgttaggaaccaactcaatctcaatctcgccacccaaaccaccaacctcgaaatttctgtagtgataacatactaaaatcatctctctgacaaattatctttcatgtcatgcagggcatcagcaaaggtgtggttgtggacaacctcttgtcatccatggtgagccgagggaaggcgcccgatttcgtgctgtgcattggggacgaccggtcggacggggacatgttcgagagcatcgtttgcccgtcgaacagcagcgtcaagctcccggcgagcagcgaggtgttcgcctgcacggtcggcaagaagccgagcatggccaagtactacctcgacgacacggtcgacgtgatcaagatgctgcagggtctcgccaatgcgccatcgcagcggccaaggcaagtgcagctgcgggtctcgttcgaaggctcactgtgacggagacagggattattctgcacagtataaaaaccaaggaggaaattccaataacaaatggaaaagatgatgatgattcagttcgtgtggtttaggggttagctgcagaagttacaggataaacaggtttttttttgtttttttttcttctttttctttcaacattttcagccttcttccatgcttgtatatgccccgtatgataaaaatatgcgagaaggtttcagccaccttgtatatgtagttgacgatgacgatgaaatcagaaccaaaaaaaaaaaaaaaggaaaaatgattctttcttc

SEQ ID NO: 16189 - DNA, 1656 bp, Oryza sativa
  ref <308>: DATABASE ACCESSION NUMBER: AK066692
  ref <309>: DATABASE ENTRY DATE: 2001-12-06
gataataatgcatcctccagtatggacattcatgtagctttcttctacttgtccctgtatatcgtggcctttgctcaaggtggccacaaaccttgtgtccaagcatttggggccgaccaatttgatgagaatgaccctgaagaatgtgcctcaaggagctcatttttcaattggtggtactttgggatatatggcggcaatgtcattacagtttcaatcttgaattacattcaaggtaacataggctggcagcttgggtttggaatcccttgcattgccatgtctctttctcttgcagtattcttgcttgggaccaagagttaccgcttctatcctctaagaagtaacacaagcctattcgaccaggttgggaaatcgcttctagcaaagatacgatggtggtgcgcatcatggtgttcaaagtatgtatgcaatgaaaccacccgcagagcccatccgttgcaaactacaaccttacttgctcgttcttcctctggcatgcagatcatcaggggatcttcactgcacccaagcatcatcatcccagggagatcacaatgatgcagaaaaggcatgctttcctgatgaagccaccgctgtgcttaaattgttcccaataggggcaacctgcctgatttacgcaattgtttttgcccagtggataacactgttcactaagcaagcaagcacactagacaggtggataggtaaagtacacataccagctgctgccctacaaagcttgatcagtgtgtcgatcgtcatctctgttcctatatatgaccgaatccttgttccacttactaggaggtactcaaagaaccctcgcggtatcacaacgttgcaaaggattggaattggattgattatctcagtaattctgatggttgtctctgcccttgtggagacgagaaggctcatggtagcaagagattttggcctggtggacaatcctgaagccacaatccccatgagcttctggtgggtggtccctcagttcatcctgactggtttggctgatatgttcacaatggttggcctgcaagaattcttctatgaccaagtaccagatggtttgcgcagtttgggccttgctttgtacctgagcatatttgggattgggagcttcatcagcagctttcttgtgtatgcaattgacaaggtgaccagcatgactggggatagctggttctcggacaatctgaaccgaggtcatcttgattacttctactggctattggctgtgctcagtgttcttggtttagctgcttatctacacttttcgcgagtgtatgtccacaagaagaagggcatctcagtacagtgaggatgtgtcaaaagatgctgaaaatgcattggctatcacatgttggttgttggcatatcactttcgaagaccttcaggcggtaaaaggcttgcagcttgcttatgctgctgtagtagtgctgtacagtgccttcaagagtgaatgcccgtacgatgcttttctgttgctgcttgaagccttgaacgattcgcatggagaaggagatctagcctaggtgccacagcaagtaaaaattgctgtggagaaatgttgattttcttttttcaggggtggttgtacaatttgtggactgtgaaagttatggcagttataaataatattaaaaagc

SEQ ID NO: 16190 - DNA, 3461 bp, Oryza sativa
  ref <308>: DATABASE ACCESSION NUMBER: AK066693
  ref <309>: DATABASE ENTRY DATE: 2001-12-06
gaattggtgggttagaactgaactgtgaggagcttcagagactatggagcaaggtgtagctggagaaaacgtgtacaacacagagagactgcacagctacggaagtggtaaacaccagtgctagtatatgtatggattgaaggtaacgtagcatttgccttcaccacaactctgcaagtcaccagcatggctatcaagcttacaaaatatcagttcttttcttctcgtgccactgcactgcacctaaggaggagagagctgaagttgcttccattcccatcttttccctgcagctctagttcagctcctaacacttgttcacagcaaagtcatctcctgttagtttcatctgcaggacctagagaacaaacattacttccggctgattcccgttcttctctccctcatggcatcactgataacggtacaagaaaggaaggaaggaggaggaggagggggagaaagaggaaggagacagcaaaagatgaaggggagtgtgttccatctgcggaggaagtgtccattagggtaaatactctttatgagagtggcgaccccattgggaagaaggagttgggccggtgcgtggtacaatggctaaagcagggtatgcactcaatggctataaaatatgcttccacagaaatgcagaacgatggagcaacattcttactggatggtggatcatctgaagacaacctcggatttgtgatgcttgcacagccttatctatcagcaattcccatgcccaagggacaggaggcgctctgcctcaaggcctctactcactatcctaccctctttgaccactttcaaagggaactccgtgatgttctgttgaaacaacagaaccagggtcttatttctgattggcgcaccactcaatcttggatgcttctgaaagaattggctaactcagctcagcatcgagcagctgcccgcaaacctaaagctcctactacgcacagtactcttggcataagtcttgataagacaaggttgatgcagaccaaaattgaagactttgtcaagaaaatgtcagaccttctacatatagaacgagatgcggagctggagtttacacaagaagaactgaatgccacccctgtgatggatgggaactcaaagaagccactcaaaccagtagagtacttagtcactcatgggcagtcacagcaagagcagtgcgataccatttgcaatttgaatgttatcagcagttcaactgggttggatggccagcatctggtcctatttagagtgaaagataaccatagattgcctccaaccacactctctcctggggatatggtttgtatcaggacatgtgataaccggggggaaattaccacatcttgcatgcaaggctttatatataatcttggtgaggatggttgcagcattaccgtgacactgaaatcccgccgtggtgatcctacgttctccaagctttttgggaaaaatgtgcggattgacaggattcaggcattggctgacgcacttacatatgagcgaaattgtgaagcactgatgcttcttcaaaggaaaggtttacagaaaaagaattcttccattggagtagtagccactctgtttggggacaaggaagacatgatgatgatggagcagaataatctggctgattggggagaatcaacaatacatgatgatgagctattgaaaaagaacaaatatgactttgatgcctcccagttaaaagctatcacactaggcttgaacaacaaaaggcctgtcctaataatccaaggacctcctggcacgggcaagactggtttgcttagttatctcattgcatgtgctgtccgaaagggtgaacgcgttctcgtaactgctccaagcaatgcagcagttgataacatggtggagaagttgtcagatactggactggacacagtacgagttggaaatcctgctaggatatctccatctgttgcttcaaggtccttgggagagcttgtgaacagaagacttcagaagttcacagaagagttcgagaggaaaaaatccgacttgagaaaggacttgaagcattgcatacaggatgatacattagccgcaggtatacgtcaactgttgaagcagcttgggaagaactttaaaaagaaggaaaaggaaataatcagagaggtcctttcaaatgctgatgttgtcctatcaactaatattggggcagctgacccacttgtgaggaggattggttgctttgacttagtaattattgatgaagcaggacaagcaatcgaaccctcatgctggatccctatcttacaaggaaaaagatgcattcttgctggtgatcaacggcagcttgcacctgttgttttatcaagagaggctatgcaaggtggactagcaatgtctttactcgaaagagcttcatcgttgcataatgaactactgacaacgaaattaacaacacaatacagaatgcatgattcaattgccagttgggcatctaacgagatgtatgatggttttctcaaatcctccccatccgttgcttctcatcttcttgctgattacccatttatcaaggaaacttggataactcggtgtgcctttcttttacttgacactcgtatgccgtacggaagtttgaatattgactgtgaggagcatttagaccctgctggtacaggatctttttataacaatggcgaggcagatgtagtttcacagcatgttttgaaccttgtacaatgtggtgtctctccaaccgcgattgccgtccagtcaccttacattgcgcaagtacaactattaagagacaggctagaagattatccagaggcttctggtgttgaggtttcaactatagatagcttccaagggagggaggcagatgccgtggtcatatcaatggttcgttcaaacactttgggagctgtaggattccttggcgacaacaggcgcatgaatgtggccatcacaagggcacgccgtcatgtcgcacttgtctgtgatagttctacaatctgcaacaatgcttttctggctaggctccttcgccatatccgtcagcacggccaggttagacatgttgaacctggttcctttggcggggattctggtcttggctacactccacctgccttgccctcaatcagttagtttttcgattgcaacttgtcggtgttgtttctgcgtgtatatataaccacgatttctactgctaaaattgagaggtcgatctatcatggccctaaatatgagtctggcagatgggaaaatataacgtcaattgattggcagacttgcattgatgatctaaccaggttgtcaaccatgcattttcaatcccgaaacaaaaacatcagtttcgtgtcctgtaatatgctgctgcttgttgctggatgatgggttccttgtgaatgtgaatgtttgtaatttgtatattccgctacagagatgtacagcagcttgaaatcccacgattgttt

SEQ ID NO: 16191 - DNA, 2319 bp, Oryza sativa
  ref <308>: DATABASE ACCESSION NUMBER: AK066694
  ref <309>: DATABASE ENTRY DATE: 2001-12-06
tggactcgactcttctctcctcttctctctcccggtgtctctctgctctgatacagagagattatttgggtactgtgtgtgtgtgtgtcagagtgagagagagatagagagagagaggcagctgatcgccacagcgtgctcctcgccgcccgcctgccatggccgacccatacggcgacggcaagggcctcaagcagcagcagcgccagaagctcaagcccgcgctcgaggtggaggacttcatcaacctcctccacggctccgatcccgtccgagtcgagctcacccgcctcgagaacgagctccagtataaggagaaggagcttggggaggcgcaggctgagatcaaggctctgcggctgtccgagcgagcgcgcgagaaggccgtcgaggatcttacggaagaattgacaaaggtggatgggaagctgaagcttacagagtctctcctcgaaagcaagaaccttgaggcaaagaagataaacgatgaaaagaaagcagcacttgcagcccaatttgcagcagaggctacacttcgaagggttcatgcagcacagaaggatgatgacatgccccctattgaggccattcttgcgccattggaagctgaactgaaactagctcgtcatgagatcgcaaaactacaagatgacaacagggcattggaccgccttactaagtccaaggaagcagctctgctggaagcagaaaggacggttcagatagcattagcaaaagcttctttggttgatgatttgcaaaacaaaaaccaagaattgatgaaacagatcgagatctgtcaggaagagaacaaaatcttggatagaatgcaccgccaaaaagtagctgaggttgagaagctcactcagactgtcagagagctcgaagaagctgttcttgctggaggtgcagctgcaaatgctgtgagagactatcagcgcaaagtccaggagatgaatgaagaaaggaaaactcttgatcgtgaactagctcgtgcgaaggtttcggcaaatagagttgcagtagtggtggcaaatgaatggaaagatggcaatgataaagtaatgcctgttaaacaatggttagaagaacggaggattttacaaggagaaatgcagcaactccgggataaactggctatagcagaaagggccgcacgatcagaagctcaattgaaagataagttccagctacggcttaaagtacttgaggaaggtttgagaatgtcaacgactcgaaccaatgttagtgcagcacgccgccagtctattggtggtgctgatagtttatccaagaccaatgggttcctatcaaaacggccatcattccagatgagatcgtcagtatctaccaccacaactactctggtcaaccatgcaaaaggggcatcaaagtcttttgacggaggctgtagatcacttgaccgttacaagggacatgtaaacgggtctggtatgaatgtatctacggactccagtgaagataaggaatcaaacaactcagatgagaaggctaacgaatttacatcagttgagacagaggatacggtatcaggtttgctgtatgatacgctgcaaaaggaggtaattgctctaaggaaggcttgccatgaaaaggaccaaagcctgaaagacaaggacgatgcagttgagatgctagcaaagaaagtagacacattgacaaaggcaatggaatcagagggtaaaaaaaggaggatggaggtagctgccatggaaaaggagatggcggctttgcggttggagaaagagcaggataacaaagcaaaaaggtttggtagttcaagttcgcagctgccacctggcaggacattgcctcggagtggttcagcacgcaatatgtgatgcaagcgaggaacacggcggcaaccagccaacccttacgaagcattcaaataagaggagagcttaattgggtgcttcgacatcatatccttgtctagttgttgaatgttggattagtagtgatgacgagctgctgattgatgtctggagaagatggatcgatcggttacatttttacacgtcgagccgagaagacggagcgattagcctatatctcgtgggaatcgcgacgactactctgtctaattaacctggcaaattaagctagtcttatttttaacctttggtttcttgatgagatttggtggtgtgtttttttttggcaatcatccatcatcgttgcctggtgctgtataggtttggtgagcccatgcatgcatatttttagtctcaaatttgtttgtaatcttaatactaaagaggatcggatgattatatatatatatatatgctggcc

SEQ ID NO: 16192 - DNA, 1556 bp, Oryza sativa
  ref <308>: DATABASE ACCESSION NUMBER: AK066695
  ref <309>: DATABASE ENTRY DATE: 2001-12-06
ggctcgctccgctcttcttgacaaggaagcaaaagccgccgccgccgacgccgacgagagaggagagagagatcgccgccgacgtcgcaggagggggagggggagatggcggcggagggggaggacgcggcggccgcgcgacgccgcgcggcggccaccgactacaggaagaagctcctcacctgcagggagctcgaggcgcgcgcccgcacggcaagggacaacctgaaaaatgcaaagaaagattttgggaaaaccgaggatgacttgaagtcattgcaaagtgtaggccaaataattggtgaagtacttcgaccattggatagtgaacgattcatcgtcaaagccagcagtgggccccgctatgttgttggctgccgaagtaaagttgacaaagaaaagttgattgctggaacgagggttgttcttgacatgacaacccttaccatcatgcgcacactgccacgagaggttgatccagtggtatataacatgctacatgaagaccctggcaacgtcagttactcagctgtgggtggattgtcggatcaaataagggaacttagggagtccattgaacttcccctgatgaatccaaaattgtttcttcgtgtagggattaaaccgccaaagggtgttctgctctatggtccacctggaactgggaagacactacttgctagagctattgccagtaacattgatgcaaactttttaaagattgtgtcaagtgctatcattgacaagtacataggtgaaagtgcacgtctcataagagagatgttttcctatgcacgggagcatcaaccatgcatcattttcatggatgaaattgatgccatcggtggccgaaggttcagtgaaggaaccagtgctgaccgggaaattcagagaacactaatggagctcttaaaccagttagatggatttgatgagcttggaaaggtaaaaatgatcatggcgactaatcgtcctgatgttttggaccctgcactccttcgtcctgggcggttggacaggaagattgaaattccactgccaaatgagcagtcgaggatggaagtcctcaaaattcacgcagctggtattgctaaacatggtgaaatcgattatgaagctgtcgtgaagctagctgaaggcttcaatggtgccgatctgcgcaatgtctgcactgaggctggcatggctgctattcgagcagagcgcgactatgtcattcatgaagatttcatgaaggcggtgcgcaagctgaacgacgccaagaagctcgagtctagtgcgcactacagcgcggactttggcaaggaatgaggctgatttggtgatgtgctgacttctttttttttctccatgggggaggaactgtcatgctgatcctactcctcacttgcaaaaatcctgcgatgatgatgatatacacgccaaattgaattagaaactgatccctctgaggtcaacctgacaaggagttgtgatcctgtcttctatttattgtacttcttgtaactttgggcatactcctatatgggatgattaattcgatttcatttattccc

SEQ ID NO: 16193 - DNA, 1958 bp, Oryza sativa
  ref <308>: DATABASE ACCESSION NUMBER: AK066696
  ref <309>: DATABASE ENTRY DATE: 2001-12-06
ggggctcgtcgtcgtcgtcgtctcccctccccccacctgacttgagacggggagatgcggaggccgtcgccttcgccgccggcggcgaggggcccggcgctcgccgctgcggcggccgtcgtcgtgctacttccgtccatcttccccgcgatcttcaccccgcttggccgcgccttcccttccctcttctcggagtggaatgcccctaagccaatgcatgagtctcttctgaatgaggctttgcggcgaacaatttcaaacgaacaaaagagagagctgtggtcaccattgccgtaccaaggttggaaaccatgcttgaagtcatcaagtgttcacggggtacctttggaacccactggatatatccaagtatttcttgatggtggactgaatcagcaaagaatggggatatgtgatgcggttgctgttgctaaaattctgaatgcgtctcttgtgatcccacatcttgaagtaaatcctgtttggaaagacacaagctcctttgaagaaatttttgatgtggatcattttatcaacaccttaaaagctgaagtttcaatagtcaaagttctcccaaaaaaattttcctggagcacaagagagtactatggtacaggcatccgtgctacaagaataaaaaccgcacctgttcatgcctctgcaagttggtatctggagaatgtcagtcctatccttcaaagctatggcattgctgccattgcccccttttctcaccgtcttgcatttgatgacttgcctgtggacattcagcatctgcgttgcaaagttaacttccaagctcttgttttcctgcctcacattatctcactgggggagactcttgtgaaacgcttgagatctcccgtccagggccaatctggtgaacttatccaagaagttggagaagacacaaaccaagccggaaaatatgcagttttgcatctccgttttgataaggatatggctgcacattctgcttgtgacttcggtggtggcagagctgagagattagctctggctaagtacagacaagtcatctggcaagggagggtattaaattcacagctaactgatgaggagcttcggaacttgggacgctgcccattgactccagaagaaattgggctgttactggcagctcttggatttgacagcagaactcgaatctatctagcctctcacaaggtatacggcggggaagccagaatttctagcctgcgcaaacttttccccctaatggaggacaagaggagccttgcgtcggaagaggagctgactaatgttgaaggcaaggcttctgttctagcagctcttgactactatatcagcatgcacagcgacattttcatctctgcatctcctgggaatatgcacaacgcactgatggctcaccgtacctttgagaatatgaagaccataaggccaaacatggcattgcttgggcgcatctttgttaacaagagcatggagtggttggaatttcaggaggctgtacaagcagggcacaagggtagatacgggcaaatcagactgaggaaaccaaagcaatctatttatacttaccctgctccagactgtatgtgtcaagggtagactgctaaattttgcaacaaaagactagattctttagtgtgtgaagctgaaggatttttgctcggcgaccagtgaatgttacaatgaggttctaattgttgtcagtttcttaggacgacaaggttctttggatatagggttgggaagaagttttggttgacccaagcattcagctgacttaatttttaccctagaaaaaaaattcagtctcgttccacattcagtgtaaaggttgtagtttcgtgagtgatgtagacttggcatattgtatctttttgtcctttccgtactacattctgtgcatatgtaagtaaacatggatctttcggccgtgaacttgtaagcacacatgttgagtttccacc

SEQ ID NO: 16194 - DNA, 3496 bp, Oryza sativa
  ref <308>: DATABASE ACCESSION NUMBER: AK066697
  ref <309>: DATABASE ENTRY DATE: 2001-12-06
gacttctccacgctctctctctcgcgcgcgcaaatggcgtcgtcgaccagcctcgccgcgctgccctcgcagctcgcctcccccgcccgccgcgccgccctctcccggtccgctaccgcgcggccgcgccaccaccaccaccccctcctccgcgcaccgcccaaaggctgcaggctggtggtgacctgcaacgcgcagacggcggtcccgaccagcattgcgcagggcacgcccgtcaggccgaccagcatcctggtggtcggcgccaccgggacgctgggacggcaggtggtcaggcgggcgctggacgagggctacgacgtgcgctgcctcgtcaggccccgcccggcgccggccgatttcctccgcgactggggcgccactgtggtcaatgccgatctcagcaagccagagaccattcccgcgacgcttgttggtattcataccgtcatcgattgtgctacagggcgtcccgaagagcccattcggacggtagattgggaaggaaaggttgctctaatacaatgtgctaaggccatgggaattcaaaagtatgtgttctactctattcataactgtgacaagcacccggaggttcccttgatggaaatcaagcattgtacagagaagtttattcaggatgccggtctggattatctcatcatccgtttgtgtggtttcatgcagggcctaattgggcaatatgctgtgcccatactagaagagaagtcagtatggggaactgatgctcctacccggattgcttacatggatacccaggacgttgctcgactgacgtttattgccatgcggaatgagaaggctagcaagaagctcttaacttttgccggaccacgtgcctggacaactcaagaggtgattacactgtgtgagcggttggctggccaagatgccaacgttactactgtccctgttgcagtgttgagatttactcgtcagttgacacggttcttccagtggacaaatgatgtggctgacagactggcattctcagaggtcctctccagtgacacaattttctcagttccaatgaatgatacataccagcttcttggggtagattcaaaggatattctcaccttagagaagtatttgcaagattacttcactaacattttaaaaaaattgaaggatctcaaggcacagtccaagcaaactgacatattcttttgacaagaaggatatctacaaacctatggatatattttctgatgcagatctgtgcttcaaaacacagatgagtgaatacaaattttcttgtatatctgttgttgtggtatgtgcaagaagtgcatgctattaggttatgtctacagaatcccaactattgaactatcaggtcatgtatataggatctcaactattcaactatcaaagacctggagtttgtgtagatcagacctaaattcatgaattcacagtcagcttctgcttttctataatcacgcgttttagcatgactagtgaaccagaatgtattgtattatcttgggatagactaaagatgaattattgtttttaatctgtactatgacaaacaataaaaattgcataacaattaaagaaagagatgcacatgaaatttccttggacctttggagaaggcctacctggcttacctgtgaagaggaaacaaatgaggccatgacatccagtgataaatacaatcttgctacttaataccataaattttgtgtgttaatgtcctagatttgtgttgcaacagatcaatttcaaatcctcaaaggagccataagcagcaaagctttctagcctcaaatagtgtaccgcacattttatattccaaatgaatgttttgcttattacctgggggtgggggtgggggtgggggttaaagtttgatttcttttcccctttatgattggcacatatcagaccaactctggtgtttacttctattttagaccttgcggctggagctggcatatttcctatataggccagatccacctcataaggagtgtatcagtgtacaaatcacaatcattatgagttgttgaaacaacactactatttgtaaatcagataactaagcttaatctctatccctgaaaaaaaaaatctgcactaccatcccagatagatgcaccaaaatgtattttctcataagacaaaaaatatacttttgttactgaagcacggatatactttttctattgatgtattttcatctgttcaaatgtcctgcatatttgttgacttcacgtatatatatgataccattttgatattagtgagattggtggttctgtcatagtaaattggcaacatgaactatgccaacattttgtttttttcactagaaaggcaatagtgcagacatctcatggaataatgacattgtgaacctcagtagtatgtgaacattgaatgcacaacacaaattagatcaaacttttgtctcttcatgtatgaacatttctgtacactacatatacaaatgggaaggatcggcaaatcctttaaaaggcggataccgatcacatgctatcaagaatgacagaggagtatctatgagctaagaatgttaaggagagtaaccctgctctggaccaatctcctgaacacaagtccagccccagcctcaagatctccgatgcagcactctaacacctgcaactgttcctcactgcaaacaactgagtttttcttcaggaatgccttggagatgatagacatttttggtgttgcgatttgcttcgataagaggtccattgatgactcaagtacagaggttgtgatctctctagccttgctcaagagcttgaccatcttgtcatcctccttgtctgagagatccagtagctcaagggagcattccatttctccatccaacaacttcctttgctgggatgagcaaatttggttgctaggcaggcacatgatgccctcaacagagctgtagatatcctcaagcctctttaaaccatcggagaggatctcaatggtcatcgaggttgaagagatggatgcctctacgatgtgaagctcttcttcaactttggagtgagtcctagaaggcaagctaattgatctttggtggcaagccatatctgttgatgtaattcttgttgtgttgtggctgaggagatgggaaggagagtccaagctttggtttgatgtgtttggccttctgccaaggcctatttatacagaggaactgcacgggacagcatcgtttggtttacagacaagtagaatccctccagttcatctcccagatgctgtctatcaaggtctgagatctggtagcagcatatagaatctattctgtcactcatgtgtagctgcatatattagtgcactacatatcctcccaatgaactatcacattgtcatgttccaactattggaagcaagaatcagaaggttagttcactctattggtggatcttgacattattgcgttttcaagatgttactttaagggagtggtactgagtattgttggtgg

SEQ ID NO: 16195 - DNA, 3884 bp, Oryza sativa
  ref <308>: DATABASE ACCESSION NUMBER: AK066698
  ref <309>: DATABASE ENTRY DATE: 2001-12-06
ggtccccaacctgcaaaccctaatcccgccgctgactcccccaaccacggcggcggcggcggcggaggcggaggcggctgcctgatgcccagccgcccgcgggggccatggagctcgtccccttcaagcccgaggccggggccctggtcgagtcgggcggcggggcccacggggactcgatcccggccatggtggcggcgcagcaggaactgctgcacgcgcaggtggaccagctccagctcctcgtcgtcgcgcagtgccgcctcaccggcgtcaaccccctcgcccaggagatggctgctggggcattgtctatcaagataggtaaaaagccaagggatttgttaaatccaaaggctgtcaagtccatgcagtcactttttgctatgaaggatactattggaaaaaaagaaactcgggaaattagcgcatcttttggggttactgttacacaggtgagggagttctttgcaagtcaacgtacgcgagtaagaaaatttgttcgcttatcacgtgagaaagccctgagaatagagtcatccaaggctcctgacaatgtatgctccataagcactgagcagacacctgttgacattgaggcacatgctcaagttattgagcctctgagaacattagaaccattggaggcgcaacaaatttctttgccgcatctggtggttcctcaaatctctttacaattgccggtggtcctgcagagctgtgcaatccctgttgccccaataggtgtaatgcaacccaccgaggctaagactaatcccgatcccattcaaaaggaaactaagcaagaggaagttgctggagttgagtcagaagataagaagtttttggaaagtatctttgttctaatgcggaaggagaatacattctctggacaggtcaaattgatggaatcaattctacaaataaacaatgtaactgttcttagttggttcttaacaatgggtggtttggccattgtatcgacgtggttgggccaagcagttactgaggagcaaacaacagttattcttgttgttttcaaggtgcttcttcatctcccattacataaagctctgccagctcatatgtcaactgtattgcaaactattaacaggttgcggttttataggacacaagatcagacatatcaagcaaggcgaggaacctcctctccaggttgagcaaagtgcttgtaagaagtcaggcattgaagaaatctcagaaggacttaatctgtaaacaaaggataagtgaaattctccgtgatgagtcttggaaatctgaagttgatattactgaggacatccttgccttgactgatgatgcaagtgagagcagaatgcctgagcccagaaaaacgccattgctgctcactgcttctgcggacgaatcaaataaaaagagttctctgcagacaaaatccaaagggaaaaggaaagttctacttgtagaacatccaaatcggaaagctgctggcaagaatgttaaccctgtcagaagcacatctacgaacaatagtagaccgttatctgcagatgatatccaaaaagcaaagatgcgtgccatgttcatgcaggagaaatatggcaaggttgacacaagcaaagtgattgaaaaacctcatatgatggaaattcaaaaaccgtctggcttagttgattcaaatgtaccgcttgtgcccagaacccctcttacttcaatcattaaacaacctgttgaccctagcccatcaacctctaaacaaagtacactatctccacctgataagccagaaattgcagttagcttgaagctgaacgtaacagccaaagaaaactttatagagaaattggattccaagagagttatttggcagataccaccagaggtttggatagaccctgcttggagtttaggtgctggagagaacagcaaagaatttgaggtccaaacccagagaaacaggcgtgagaaggaaaccttttatgctagtctaaaggacataccgttgaatccaaagggcccatgggatgtggaaatggactttgatgacagccttacaccggaaattccaattgagcagccaccagatgctgacgctatggaaacggatagcgtgagcacagcccctccaaacattgtggttcctgttgtggacaagcaaataggatcaacctcatcagtatctccagcagttgctgctggtgcgaacggtgcaacttctgaaccagatcttgagctgcttgcggtgctgctcaagaatccacaacttgtctttgctctaacttctaatcagggtgggaccctgccaagtgagcagaccgttgcacttctggacatgttgaagcagactggccttggactatcagagctggtaaatagcctggccaacaattctggggtccaaaaagagcccgaatctggtcctgaagctatccctgcttcgcttccatcgccaactcctccaaaagacctgatagccagggatggctggagttcagagttcccatcacaagtgaggacccaaaacttgcagcacgcccatttgccaaacagagcaaatgcacctcctgttgcaagcagcgtgcagcaaagtttctcaaatgttgtcagttcgttgccttcacaaccttatgcttcagcttctgctttgccggcacagactcgaactaatatgacatctctcccccagtcgatgatctccgtaaatccgtcaactcaacatgttgctcctatgaataatcttctgagcagagccacggtacaccagcacacccaatcatatgctttaacgtctgatcctgttgcagtggcggtccatcatcagccagcggtgaacaaactagcccatgaggttcagagcatctcacaccctgctgtatcacattcttcggtggctgaatcacatgcctcttacacatcatacacctggcaatctagtgttgctaccattgccgccactgggcgaaatgctacacctgatcgatgggctgcacctgcacgcactactaattcctttaacgctgccccatcaaattcaaaccatgtgacgtatcctaaccagaatgcttacagtaaccacagcacacaagctactacatacaattcttatggttcagctccagtctcgtcccactccctccacccagggcagggactggaccgaaatggctacactcacgcagcggagtaccagacgacaatggcgcgagacgccctatggcggaactcgcggtctcctgagcttggtgctggtgctgtgtatggtagtagctcacaaggctatgttcccgagccctcaaggcagtggaactacgggcagcagagctacaatcctgagccttattctaggcagtggagttctgggcaacaaagctacaacactgtcactgctgagccttccaggcagtggagctccgggcagcagagctacagcaacccagctgagccttcaaggcagtggagttcatcagcacatgcacaaccaagctacaaccctgagccttcaagaccctggaattcaggtcatcagagtcaaaaccctgaggcatcgaggcaatggagtcatcatcatggaaagcaagaacgttataatccgacagatggtagaaattcttatgatcaacattggaggagatgatgagggtcaccattgtatattagctgattcttgaggtggttctccgggcttttttttccctttttttttttctttttgatgggaagctttgtgattcgtttactttgggccttgtgattggcacagaggccattgagaaagctatacatcatgtaccaaatgtagtaggagtgggggaaacaaaaaacgagaaaactaaaaaaaaaaaagagaggatgcatcagctgaattgctgaatccattgatggataaaaagtttcacttc

SEQ ID NO: 16196 - DNA, 2221 bp, Oryza sativa
  ref <308>: DATABASE ACCESSION NUMBER: AK066699
  ref <309>: DATABASE ENTRY DATE: 2001-12-06
gacccagccacccacccgcgccccaaatcacgaggaggcgaagccgcccatctcatcgccggagctcgcgaattcgccgccgcgattccgaccaccgccgcgccggcgcccgcgcccgctacggtactccgccgccgtgctgagatcgccgggggagccatgtcgcggtccctgagcatgaggtcgtcgatgagcatgaggtcgcgccgcgacctgcctcctccccagcagacaatcgaaaagcttgagaatatggtggctgaaggaaattattatgaagcccaacaaatgtacaagtcaaccggtgcaaggtatattgctgctcagaagtatttggaagccttggacatccttcagtcaggagctttagttcaactgaagcatgggcaggttctatcaaagctaaatttcatagatctaagtaaaaaaaaaatattcgctacatttgatggcaaagtaacacccctcccaaaagaaaagagaagagagagccaaccaaaagctcattgctcccttcgtaacgatttgttgcaaccagccaatggaccttgacgtgttcatttgaagttgtttttttaatgtgtgtattgtcgatgtggtggtagtgattcacatcttattatgggatgtttttattgggtgctatgctgtagttacatacatgtgttatcctagattggtgttttatatcattttaaaccttcacatttttgccttattggttaaaaattcctgatttcaggtaacttgtggtggtgaacttgctataatgtttgtggacacccttgtcaaggcagcgcttccttataatgaagaaacctttgatcgtatcagaaagatgtacgacgccttccccaggatatctgttccacacttccttggagatgattatgatgacgacgggcagaaattatccgaagctatttctgcagcaaaagtgcgttctgagagttgttcatcattcctgagagctgctatcaggtggtctgctgaggttggggcatcaagaagtggatctcctgagctgcatgttatgttggcggaatacatatattctgaatctccagaaacggacatgactaaagtgtcaagtcattttgtgaggggaaatgatcctaaaaagtttgcctctatgctggcgaactttatgggaaaggtaatggtttttagaaaataattgataatagacttgcagctgatgattgtctaatgccaaattctattgaactgttacattcttctgttctctgagcaatgattaaaatgtcttatctgaatatgatcagtaggttcacattctttacaacaattttcattttacaacgggtctcttgcttatagtttttatttgagttggaggtcatccttctccgaaaatagaaacacggtgccagcaagtgattgttcaatcagttatctatatccatttttgggttggattatttcaagaccaacataatcttcgtgtaaagcagtattcatagatgttttttctcaatcaaaaaaatatttttattaatatttttcttactgcacagtgctaccctggtgaagatgatactgcaatagcacgtggtgtcctaatgtatctatcacaagggaatcttagggatgcaaatttgctcatggacgagctgaaggatcaactaaaatctgctgacttggaaatccccaaaacagatttaattcagttcatcaagtatctcttaccgacgctcgaaagagatgcttaccctcttttcaggacactgcggcagaagtacaagacaagtacagatcacgaccctgtatttgaggagttattagatgaaatagccgcaaaattttatggaatacggagccagagcgctttggaaggactttttggtgatatgttcagggtataatgatgagaaaaggatttcgtcataaatattccagcacaaagctcccgacgcgcatttcgttcgctaatacaaattgctgctggaagatgaacacccggcccggcccgaaaagagcataagaaaaagttctgttgctgccttcctcagccttgattatcctgaggccatacatttagctccaaactgcatatgatgatatatgctccagttaccactgatctcttgtaaaaccattcaactgttttgctcgtatcatggtcgtgttctaatgatattactattctttaacattttttgtagttccagttttgcagttttaaaacggcatttatccg

SEQ ID NO: 16197 - DNA, 1028 bp, Oryza sativa
  ref <308>: DATABASE ACCESSION NUMBER: AK066700
  ref <309>: DATABASE ENTRY DATE: 2001-12-06
gagatatcattcatacataaatgccaacctgtttgctttctcagctagaaaaacagagttcttggttacaaagatcttgacttgcttgggagaggaagagagaggagtttcttgctttcttcagagggaaattggcttcttggaatcctaattagagcaaatacatgatatcctaggagataaacacacacacaaaaatctaattgaggaaactgattgccactagcttcaccaagaaatggagagggagcagatgaggatggccatcctgaggcaagaacaaacattcagacaacaggttcatgagctgcacagactgtaccatgttcagaaacagctgatgaaacagatgcagatcgccaagctgaaccaagctcaggcaatcgctgccaacgccgaaaccaaaccgaaattcgagatcactttcgccgagaattcaaccaaccatcaccaccaccaccaattctacagcttccagagcagcaagatcatgtctccccctgcagcagcagcagcagcagcagatcaagaagaggaagaagaatgcgacctccagctgacgctggcgacggggagcagcggcggcggcgatggcacggcgagggggcacaaggggaagaaggaggtgaggtcatccaactcggactccggcacggcggcgtcgtcgacgtcgacggagtccgagctggcccagttcaagaatcatcatcaccatcagttggactgcgcggcggcggcgccggtggcgtcgccggcggcgaggttccagggcgagagcaagaagagggtggtcgtcgtcgtggacaacgagatgagcctcctccagcctccatggctcaaccagtgcttgagcttgaggatggcgtgattagcttatagctagaaattgtagatttgttgcatcgatgaagaagaagaagaagaagaagagatcgatcgatcgaggagggatggatggatgctgtcacttacgttgtaaatcacagagctaatcttctttttttcctgcaagaattggtaaagagatg

SEQ ID NO: 16198 - DNA, 1085 bp, Oryza sativa
  ref <308>: DATABASE ACCESSION NUMBER: AK066701
  ref <309>: DATABASE ENTRY DATE: 2001-12-06
gtcctttctcctacgtccaccttcacagccgccctatgcccttcctccgccacccgcaccagccaccctaccccccagtcccccacctccgccacccccacctccacctccaccaccccacacctccgctgcttcctcgagctcagcctccccttaccccttcacccccaatcccttcctaaaaaatcagggaagtgttcaagagcctctaagcaagttatatgggtattgaatgattgaagaccacgggtgttcgcatgcagcaagacaacatcatttgaaaggaagacatcaagaattgactttggctgtttgtagagcccaccatgtgaagaacaagaacttgctattgggagtcatgatagtgatattgaggctgactgtgctcatttgcaagaagtgcttttcaattacaatgaaaacattgtgcacagaagagttgtacaaaggggaacttcacgatgtgtttctgtcactccaagaggccgcacaacctcttgcaatgaagatggaagccttgttggcaaggatgttatactctatgctgtcacaagaaatgatgtcccagtagccaaggcaacaattgtctcaacgaacccaataacaacagtgggaggtcaagctcttggagtccaatactatgaggtggttgtgaatgtggtgttaaagagggacaccgtgcttccttgtccatttcgtattaaaactatggctgatgcgtaaatgctgtctattgcatggccaaataacaaaatcagggcaaacaagaggccaggtatctcccaatgcggaggtggaggttctggaaggacatagaggtggaccttgtcttatgttgacaacaagctatggaggatgaccttgttttgggggcaagacaaggtcatccttttgtaatggagtttgctacagaggcgaacttgttgggaaatgccaacatactgcatgtaatggagtttgcttcaggatagatatggtggaacttggatgaaatgtaaatcttttggacacctgttgtatctatgccacatgcgtactgcatgcatgtatgcttgaattaatctgtgaatgaattaaagttagtc

SEQ ID NO: 16199 - DNA, 1272 bp, Oryza sativa
  ref <308>: DATABASE ACCESSION NUMBER: AK066702
  ref <309>: DATABASE ENTRY DATE: 2001-12-06
gacggtgcggcggcggggccaaaccccagatagaaccctgcgccgcgtggtgcctagccccgcggccgccgccgccgtggtgctgcccggggcttgacggcgtcgctcctcagttcctgcctccgccgactgtttcttcttctttgagagcaagctggtaaagcaaagtagtatacgatctccagtccaaacatccattcgtgtgagcagtcaaacagttaatccttaagtatggtttctgtatacgaagaagcacgggaaaggtggacttggaaaaatcaagtaacagaagaagggccttatggctttaaaattctctcccaaataagacgccaggaccatgactgctgtaccttctctgctatggcttcaactctcgaggccaatgtaagagttcagcatggaaggaacgatcaattttccatacctcacctgcaatttatagatgctcaatcaaaaatcagtgcaccaaataccaatgagacaaaggtactgaggcttttgaaaagtctaaaagagagagacggtggggtttacttggatgaagactatgatagtgaggggaatctccgagccttagatgctaaagtttgcagggtatggaagttcaatctctaccatgtgaaggacattattcatcttcgaagtgctcttcatcggctgcgcaggcaagggcctttactggctgttatccgcatcagccgtaattatgatgagtgccgcaagtcaggccatgtctacaaatatgatcctgcccgaatctgcacatatgatgatgggaaacccaagacgcacgcgttgtgtgttgtttcgtttgtaactgagaagggtacaccatgccttgagtgtcaggactctcacggcacagcttggggtattggcggttacttaactgtggaaatcaggtcactaaaagagctatacagtgttagagttacgtagctggtggctgtcaagtcaatgcaactcaagactctacgtatgcactcattttctatcattttaatacttcctgcttacagtacgtggccaatgcaaagatttcatggctcagaagaaagggatctttggaattaatactttgtatttaagtgataatggcctgttgcttctcttgaccttttgtcccttttttggatgtgagagttatggaagttagatttggggaacagaagattttgtgattctatcaaagcgagatcatttctttaatttgaatatccacatgcctgagggtatggttgtagagtgcctgaatgctgatatacgtgg

SEQ ID NO: 16200 - DNA, 1794 bp, Oryza sativa
  ref <308>: DATABASE ACCESSION NUMBER: AK066703
  ref <309>: DATABASE ENTRY DATE: 2001-12-06
gaccaaaggccgaagccgctcgcgcgcgctcactcgatcgaccagtcgcgcgcgcgacgagagggagagcgacgcggcgccgaaccggctagctctcgtaggcacaaaagcccaaacacgttgcttctgcagtagctagtgtgccgtgcccgtgatcggagatggcaggctcgttgtctgccgcgctgtgcctcactctcttctgcttgctgggggcatgcattgcgcccggggcgcgtgctaacggccggcacagccggcgggacctcgacatcaacctcggcaacggcaacggcgggggcatcagcatcggcataggaggaagtggtggtggtggtggtggtggctccagtggtggctccagcggcggcggcggcgatctgcggccgtgcgacttcgagaacgagcggctgtacaaggcgtacaaggtgatccagaagttcaggaggacggtgacgtgcgacccgcagaacatcatctcctcctggagcggcgccgacctgtgcagcacctacaaggggttcttctgcgagcggccgcccaacatcaccgaccggaccatcgcctccgtcgacttcaacggctacaacctgcaggcgtcgtcgctgaaggagttcgtggacgccctcccggacctggcgctgttccacgccaacagcaacaacttcggcggcgccgtgccggacctcagccggctgcagtacttctacgagctcgacctgagcaacaacaagctgtcgcccgccacgttcccgacggacgtgctcaagctgaagaacgccaccttcgtcgacatccgcttcaacagcttctacggcgagctccccggcggcgtcttctgctcgttcccgcaggtgcaggccatcttcgtcaacaacaaccagttctccggcagcctgcccgacaacatcggcgactcgccggtgaactacctctccctcgccaacaacaacttcacgggggagatccccaagtcgatcgcgcgcatggccaacacgctcttcgaggtgctgttcctcaacaacaagctcagcggctgcctcccctacgagctcggcctgctcgccaaggccaccgtcatcgacgccggcaccaaccagctcaccggcccgatcccggcgtcgttcgcgtgcctgcgcaaggtggagcagctcaacctggcggacaacctcctctacggcgaggtgcccaacgcgctgtgcgagctcgccttctcgtggtcgggccgcctcaggaacctcacgctctccaacaactacttcacgtcgctcggctcctgctgctgggacctgatcaaggaggggaagctcaacgtcgaccgcaactgcatcccgtacgcgcccaaccagcggtcgcacgacgagtgcgccgccttcttccaccggaccaagacctccgcgtgcccctgcaacacctacgtgccgtgtggccacaacaagcactccgccgccggcgccggcagcgagcaggacacggcggcggcggaggaggacaagtacaggacttactcggcgctgcatccatgagcgcgagaaggaagggcaaaagcactgtgcttctcgtgaacgtgacacgattattgattgattcggttgctcttggctggttgtgttaattgatgtgttgtgtctacttttttgttacttttgtttcctttctcatccactgttacgtacggccaacttagtttcacatatatctgcatgtttaggtaaggtaatggagattttattttgatgaaccacagaagcttgtaataattcagatcaccatgaaagatcagctttaaattcc

SEQ ID NO: 16201 - DNA, 1907 bp, Oryza sativa
  ref <308>: DATABASE ACCESSION NUMBER: AK066704
  ref <309>: DATABASE ENTRY DATE: 2001-12-06
ggcgcgcagctcaatcatcaggacgctaaacttggttcaaggtggtattctagtctctctagactacatgcatgacgggaggacttcaggaaggtagcagcagccgtactagagatgtcccccgaggaagtggtggaatcacctacttcatcggaagaatcgtcgtcccacgccaatataaaccgcaatgcgtctccatcgggccctaccacaggaatatgcctctccgggggaacgtggagaagaaagaatgcctcaacgacatcctgcgcaaggaggcgcagaggcgcagcggcgatctatcttcatcggaaattaagagcgaatggatgaacgagctgagtagatacgtggataattcacccgagtgctactacgacttcaactctttaaataaaaacgaaaagcatatgacaacggaggatttcttgagcatgctgctcgaggacggctgctacatccttcacaagttcgtagttcgacaggataggacagcagcggtaggaggaggaggaggtagcggacgatacagggaagacatcgacgttaacgtacaacgcgacatcatctacctcgctgagaatcagataccgttcttcatcctagacaagatcaacggaataataggttggagcgtgactggtaaacctctggtagaggtgttctgctcgtacatcgaacgagaggtgctcaactggtacgggtacgccatcggacagcggtggaacgtgacaccggaacccattcatctcctgcacctgctgcacatactcctgataggatgccagaagccgcgggcgctgacacacacacaccaggtggctaccggcgcagcagttccgacggagccgcacgctgctcgttcccgcatcgaggcgtcatcggcgaacatcacccggcagaacgaaacagcgatcgagatggtgccagtcatcacggatgcctcgactacccagcacgagcagacagcagcagggacgcgcgccgcccattcccacggcgaggcgtcatcggggaaccacccccagcaggacgaaacagcgatcgacgtcatcacgggcgcctcggcgaccgagcacaggaatgagaagccaccagagaagaagggggtgcgccgtttccttcgttggcgccgggccaagcaatatgaaaaggcccgcgtcgatctcacaggcgtcgacctgatttccatcgccgagggccccggcggcgaggcatgcggtgctctctcaatcctggagtgaagctgatcgggcggtgtggcggaatacgactcgaatttcccagcctgtacgtcgatggcgagacatggtgcatgctaggcaacctaatcgggctggagcagagcaaccctgacatgatcccgcagcgtgtcacggcgtactgcgtgctcatgtcccagctggcgtgcaccaaggaagacgtcgagctgctggcccggagacgcgtcaccgatcaccttatgcgcaacgacggagattgtgccacaaaattcgccgctctctgcgacggggtcaacttcaacctggacgaccctagccgcaactacctgcagaaagagtgtgtggcgctggaccaacgctaccggagtcggccatcccaatggacagcgtggatgctgcgcgagcactgccgcaacccctgcgtcgccgtcgcttctgtgcttgccatcatcgccatcgcgttcggcgtgctgcaggctgtctatacggtcctaaagctcgtgcgaaaggtaaaataacaatctgattgagcctgcagtttgtgtgtggaaagcgctcgtataggcatatatgtgtttgtttcaagtctatttcttatcttttccctatcttttcttcttaaattacttattccactttgagtggtctgtttataaactcataataagagctttgtccatcgcc

SEQ ID NO: 16202 - DNA, 1327 bp, Oryza sativa
  ref <308>: DATABASE ACCESSION NUMBER: AK066705
  ref <309>: DATABASE ENTRY DATE: 2001-12-06
ggctcgctcgccgcttcgcctctcctgatccccctcccctcctcaagaatcctcgcgaaaccctaggcgcgcggcaggtagggcatggcgaaggatcagaacggctcggccgccggcgagggggaggcggctgcggctgtggcggcgcgcagccgcagcaagtccatagaagccgacgaggaggagcgttcgaaggggagacgggaccgggaccgggaccgccgtggcaagtcgaagaggcgggaggaggaggaggaggaggaggaggaggagggggacgccgggagcgagtcctccggcgaggactcaggcgagcggcggaagtggcgcaggaaggaaaaggagcggcggcatcggcggcgccggagccgtagcgcgagctcgggctcgtcgtcggagtctgagtccgaatccgagtcttcttactcggattgcagtgcggggtcagagagcgagacagactcagaggaggagaggcgaaggaggcggcggcggaggaggaggaaggagagggaggaggaggagaggaggcggaggaggaaggataaggaaagaaggaagaggaaggagaaggagagggagagggagagaaagaaaaaggagaagaagaagaggaggaaggaggaaaagaagaacttgggcaaaaaggctgcagtgacaaactcgtgggggaagtatggcattatccgcgaagtcgatatgtggaacaaacgaccagagttcactgcatggttgtctgaagtcaagcaggttaatttggaggcattgtcaaattgggaagagaagcaaatgtttaaggaatttatggaagatcacaacacagctacttttccgtcaaaaaaatattatgacttggatgcatatcaccgtcgtgtgatggaaaaagagaaaaagaagggcctaaagaatgccttgggaacagaacgtactgtatttaatgatgaggaacagcgacggctggaattgctcagggaacgtgaacggcaaaaggaggaagaagtggcagctttaaaacgctccatgcaaactggaatggttcaagcaatgaaagagcaggcccggctacgggaggaaatgatgtaccagtacagattgggcaattttgaggctgcagctgcaatccagaaaagattggatcctgatgctcctctacagtaggcagcttgtggagagcgatattttcatttagttgacccttttatgaatactgtagaaccttatgagtactgcagtactggttggcaaaaattttaattttaccgagctggcttgtaaaatgccgtgagcggatcgatatgattttcagaatctaagcaatcttagctcc

SEQ ID NO: 16203 - DNA, 2943 bp, Oryza sativa
  ref <308>: DATABASE ACCESSION NUMBER: AK066706
  ref <309>: DATABASE ENTRY DATE: 2001-12-06
tttaatatgggtgaggacgagggaaagaaaaaggttgagcttgatgattgggaagacgctgcagaaatgtctactccaaagttggagaggtctgattccagcaatcaaacaaccgaagctaatgggaggaagagatattcacgcgattttttgctaactttagcacagagttgtactaatcttcctgttggtttccagatgattgagtacgccagcgttctgttccctaatttggccggaaagtcttatgttgttgatcacccaagtcctggaaggggagctgacaggccagcatctcgtggtgatcgccgtggtgttgtcattgaggatgatagatggggaaagtcgggccatctttttggttctggtcgtgatatgtccatggacaatggccctccaactatgaatcaccgtggtgctccaggagttatgaggaatccacgaggtgggcttattaatgtaggaccggttgcacctcaaatgtctcgaagtggctctgatgcagatagatggcagcagaagggtatattcccatctcctgttacacccatgcaagtaatgcacaaagcagagaaaaaatatgtcgttggcaaagtttctgacgaggaagaagctaagcagaggcaactgaaggcaatacttaacaaattgacgccacagaattttgaaaagctttttgaaaaagttaaagaggtgaacattgacaatgtggcaactcttactggggtcatttcacagatatttgacaaagctttgatggaaccaacattctgtgaaatgtacgctaatttttgtttccatttggctggtgcactgccagattttagtgaggataatgaaaaaattacattcaagagattgcttttgaacaaatgtcaggaggaatttgagaggggtgaaagagaagaagctgaagcagacaaaactgaggaggaaggtgagattaagcaaactaaagaggaaagggaagagaaaagaatccgtgctcgaaggcgcatgcttgggaacattaggttgattggggaattgtacaaaaagaggatgttgacagaacgcatcatgcatgaatgcattaaaagattgctgggaaattatcagaaccctgatgaagagaacattgaagcactgtgcaaattgatgagcacaattggagagatgatagaccatgcaaaggctaaggagcatatggatgcgtactttgatataatgctgaagctttcaacaagtcagcaattatcttcccgtgttaggttcatgctgagagattcaattgatctcaggaaaaataaatggcagcaaaggcgtaaggtggaaggcccaaagaaaattgatgaggtgcacagggatgcagctcaggaacgacatgctcagtcgagtaggttagctcgtggctcagttgttggttctggtccaaggcgaggagctgcacctatggattatggtcctcgtggctcagcagcagcattggcttctccaagttctcagcaagttggccatagaggaatgccttcgcattcccgagggtttggtacccaagatatccggtttgaagaaaggagtcctttggaccatagaacaactgtccttcctccgcgtaaggatgaagccatcactcttgggccacaaggtggcctagcaaggggtatgtctataagagggcagccactgatatcaaatgctgagctttcttctgctgatagtcgcaggatggtatctggtcccaacgggtataattctgcttcaactgcaagagaggaacctggctcgagaattcctgatcgctctggaagaatagcaccaaatacacagtttgctggaccatcgaacaggcctgccagccaagagggccgttcagggaataaattatactctgaggatgatttaagagagaaatctatttccgccatccgggaatattacagtgcaaaagatgagaaagaggttgctttgtgtattgaggagttgaatgctccaagtttctatccctctgtcgtatcactgtgggtaaatgattcttttgagaggaaagatatggaaagagagttgttgacaaagcttttcgttagtctttgcaacagtcgaaataatttattgagcaagtctcatctcactgcaggacttgcgactgtccttggttcattggaagatgctctaagtgatgctccaagagctgcagagtatcttggacggcttcttgcaaggtttgtggtagaaagcatattgtccttgcaggaggtgggtacattgattgaaaaaggtggagaagaacctggagagcttgtacatcatggcattggagctgatgtccttggtgcagttctagagtcgatcaaagtagaaaagggggattcattcttgaatgaggccaaggcaagctccaacctcaagttggaggattttagaccacagcatctcaagagatcgaagttggatgccttcatgaaagcataaagaagctttgttactagcttaccgattcatgggtgttggcaccatggagtttttggcatcagaccagccttttttttattgacaactggaaaggcccatcagatgctgcccctacttggcatgcacccattaattcttccaggagctcatgctgtgtgaattttcttcatcctgttcagagttggttctgatggtaaattatggaattgtcctcgatgtttgttgccaatagttagtcccatttcgagtcggccgtagcgagtatcagggttatttttttgtgatcacaggggggagaagtctttctaaccaatgtttgttgggagtagggagaattctaggttcacagcttgatgcctcccgtggcttctgaccaatatttcattgtgataagactttgtagttgcttataacttatcggcattttcctgatagccaaatgtttcacatgactcacctaccactgccttttgtttaaatcttgctgtacgt

SEQ ID NO: 16204 - DNA, 1509 bp, Oryza sativa
  ref <308>: DATABASE ACCESSION NUMBER: AK066707
  ref <309>: DATABASE ENTRY DATE: 2001-12-06
gattattcccccccgatatcctgatccggccgccaccgccgcctccgccccctcgccgccgccggagccccgcctcgaagcggaggagccatcccgcgctcgtcggaggcaccggtgtgtgtgtgtgtgacggcgacggcctcctccccgcacgcgcacgtcggcgagaaggtctggtggggcgacgcgcgcggcctccgtgtctctcggcttggattggaatcgaattgaagatgctggaactggagctgtcctataggctatagaaagagaaatttattcatgtagtgtaatacatatgtttggatccgtgtcggcgtgataaggaatcgtgtcgaattggtaccagaaggttgaaaagatggctgatgaggtggcttttgagactgccaggaagatcatcatgcacccgctttatacgccgaggtcttcgccgtggcttgacttgaaggtgttctatgtaagggtgagcaattgcgaggtggatgagtctgcgccggaccgtctcacgctcaaccacatcccgctgtctcccgatacggttatcgaggtgaatggtcagcggagtagcatgcacaccgagttcatctcttcatccctcaggagggacagggttgacaaaatgaccgaggaggctacattcgtgagcacagatagtataaggatgacagggagtgtcaggtttcaggtgttcgataagaacgatctgctgctcacaggcgacctagagttgtgcagtgccaatggagttgtcggggaatcgaagaacagcagcaagagatggaatatgaagtgccaaccagcatcatcatgcaatggttttctcaaggggaagccgtccacagcttcagagtctgtacatcctgtgatagaggtttatcttgctggcactttctgtggcacacctattatattaacaaagactgtgcagcatatatcacggaggaaatcccaaatgaaactaaagcttgattccatccctgagaatgaggcaactgaacaacaaaaagaagagttaaatgaggactctttgcaggtatcagaatcacagaatcccaaatctgagcaagatgtggatgttgattataacagcttgtactcgaggcaggactttatagagggcgaggacggtgagctttcatggtttaatgctggtgtccgagttggggttgggattggccttggtatttgtgtgggtgttggattgggtgttggcctgctggtccggacgtaccaaagcaccagtaggaacttcaggcggcgattgccctgatggccagaccaccccatgaatgtagatgtgtctttatcttgttctgtagggaactaactgtccaaccatctttcctgttcatgcttgtggtagatataagtgaggctttttgttcttcgattctgcagtcactctggaatctgttgctctcttgtctgcaatgccaatcatttttgctcccttgagatgtaaatattagtctgtatggcaaataaagagtcgaatcacttgctgct

SEQ ID NO: 16205 - DNA, 1080 bp, Oryza sativa
  ref <308>: DATABASE ACCESSION NUMBER: AK066708
  ref <309>: DATABASE ENTRY DATE: 2001-12-06
gagtgtgattcatttattcattcgttcctcttctctctctgtcgtcgtcgtcttctctcctcgaacccccaaggccccaactcagtccccaattaaaaagaagagaaagcacaagaggaggaggaggaggagacgagcatggcgatggggcctccgcgcctcctgcggggcctgattccgcagctcctgtcagtggacgcctggcttccctgcacctgcagcagccggctgcagctgctgctctcccacttccactgccgcctccaccttcgctggccctcctgcgccgacgccttcaagctccttctcgcccttctcctcgtctccgccgccctcgccgaggtccgctacatcgcctcctcctccatggcccccacgctccgccccgccgaccgcgccgtcgccgaaaggatcacctacttttttcggaggccatctattggtgatatagtgtttttcaaagtgcccacgaccttacagaattatggcgtaaataaggatgttgtgttcatcaagaggatattggcaactcctggagatttcattgaggttcggcaaggacagcttattataaatggtgttgcacgaaaagaacattacacagcaagccatgcatcatacactatggaagcaatgcgccttcctgaaggccacgtatttgtcatgggtgataaccgtaataacagctgcgattctcgtgcctggggaccgcttcctatcagcaatataattggaagatacatgatgtcctttacaaggtcctccatccaataaccaaggtaccaagacgaagaagattgatgaccccaaggactgcaaactacctgatgctgtttgatattatggtgataagttgataacgatcgagttgtatggaaactagcaggctgccagatgggtggagcctgcaaattgtatcagtagccctgtagtaggttgggagaaggaacttttcgactggcatggttggttttaggcgtcggtacacgttagtatttgtcgcatgccttaacggcagtatgcatttcgcttgaaactatctattttagtgaatcagttcaggagaacatccagtgctcc

SEQ ID NO: 16206 - DNA, 1969 bp, Oryza sativa
  ref <308>: DATABASE ACCESSION NUMBER: AK066709
  ref <309>: DATABASE ENTRY DATE: 2001-12-06
gctgcttccttcatccacaccaaaagcaagaaccccaagaaccgcagataaaaaggggagcaagaagaactttgctccgatccgccgccgccatctgctccctccaccccggaactgggaatactgcagttctcgtcttatactaggctactagcactcctctgatctgatggccaacattaacatggcagatactgttccttcctgtgatacttacctgttgttcaatggagaaacactgcttccaattggtgtccgtgcgtttatttataccgctgtcctcgcgtactgttttattggtctatccgcgatcactggccggttcttcaaatcgatggagagcatcatgagacactcccgggaggttgtcacagtagacccacacacaaatgctactattgtcaagcatgagaaggtgtggaactacactatagcggacgttgctctcctcgcatttggtactagcttccctcaaatttcactagcaacgattgacgcaatccgaaatctgggtcagctgacagcaggaggtttaggtccaggtacccttgtgggttctgctgcatttgatctgttccccatacatgctgtttgtgtggttatgccaagggcaggctctaagaaaaagatatctgatctcggtgtttggttagttgagctgttctggtcattctgggcatacatttggctgtatattatattagaggtgtggacacctagagtgatcaccctctgggaggccttgctgacagtactgcaatatggactgcttctgcttcatgcatatgcgcaggataagcgctggccatatgtgtcaatccctttggcaagaggtgagagacctgaagattgggttccggcgaaagatgcttcagttgattatgatgataactatgatgggattggggatatactccctggccagaatgaggatattgtggatatattctcagcgcattcttacagtaatgaagggtatcaccatgtttcagaagaggatgtggaagaatcttcaacaggtcttacattaaagaacaaatgggaggatactcactggttttctatttggtggcaacaatttgttgatgctgcaacgttggagagttcagtgtcaagaaagatggattctacctgcttgagagtcatcggaatctcatggaatttaatcattgcaccttggaaaatgctatttgctttcgttcccccttatgaaattgcgcatggctggatcgcttttatttgctcactaatcttcataagtggtattgcttatggggttactaagattacagatcagataagctgtgtcacaggagtaagtccatatgttatagcattcacagcactggctgctggaacatcatggcctgatctagttgcaagcaagatagcggctgagcgtcaaatcaccgccgactccgcaatcaccaacatcacttgcagcaattcggtgaacatatatgtcggcattggtgttccatggttggtggacacaatgtacaactattttgtctaccagaagcccctgtacatagacaatgctgctggcctcagcttctcccttctggtcttcttcgcgacgtcattcggttgcatcacggttttggttcttcgtcgcgtcatacttggcgccgagcttggtggccctaggatgtgggcttgggcaacatcagtgtacttcatgatcctttgggttgtctttgttgtactttcatccttaaaaatctctggagtaatatagattacctacaaagtatatatagctgtagttcttcattcttttctatatctatctcttatggttttctttttatatatacatggccatttttacacacaggaaatgtagaaggccgaccaaagttagtcatcatataggtactgtacatatatacattacatgtgcttgatcgatgtattatttttgtaagctactgcatattcatataatgaaaagcttttctgcctg

SEQ ID NO: 16207 - DNA, 1811 bp, Oryza sativa
  ref <308>: DATABASE ACCESSION NUMBER: AK066710
  ref <309>: DATABASE ENTRY DATE: 2001-12-06
gaattcagctagctcattctgaaccccatctctcgctggaatggggatcagaatgggaaggcgactcctcttcaccttgttcttgggagctctgttctgcaatggcgtttacgccaagtttacccggtacagcttccccaaggacttcatcttcggcacaggttcagcagcttatcagtatgagggcgcctacaaagaagggggcaaaggtcctagcgtctgggacaacttcactcacattccaggtaaaattttaaacaatgataacggcgatgtggcaaatgacttctatcaccgatacaaggaggatgtgagcctcctgaaggacatgaacatggatgctttccggttctccattgcgtggaccaggatcctgccaaatggatccttgagtggaggaataaacaaagaaggggttgctttctacaacagcttgatcaatgatgtcatagcaaaagggatgatcccatttgtcactatcttccactgggacacccccttggctctggaaagcaaatacggaggattcctcagtgaagacatagtgaaagaatacgtggacttcgcggaggtgtgctttcgcgagttcggcgaccgtgtcaagtactggaccacatttaatgagccattcacatatagcgcctacggctacggcaagggcgtgtttgcgccgggacgatgctcttcatatgtttccaagtcatgcggcgtcggtgactccagtcgcgagccctacctcgtggcacaccacatccacctctcccacgctgccgctgtccagctttaccgcaccaagtaccagccaacacagaagggacagatcggcatggtggtggtcacccactggttcgtgccgtacgacaactccgacgctgaccgtggcgctgtgcaacggagcctagacttcatctatgggtggttcatggaccctatcgtgcatggtgactacccaggcaccatgagaggttggctcggcaatcggctgccagagttcacgcctgaacagtcggcgatggtgaagggctcctacgacttcatcggagttaattactacaccacctactacgctaagagtataccgccgcctaactccaacgagctatcctacgacctcgacaaccgcgccaacaccaccggcttccgtaatggcaaacccatcggtccacaggaatttacaccgatcttcttcaactaccctccaggtctccgtgagctcctcctctacaccaagaggagatacaacaacccgaccatctatgttacagaaaacggcatcgatgagggtaacaacagcacactgccagaggcgctcaaggatggacacaggatcgagttccactcaaagcacctgcagttcgtcaaccacgccatcaagaatggggtgaacgtgaagggctacttcacgtggacattcatggactgctttgagtggggtgacggctaccttgacaggttcggcctcatctacgtcgaccgcaagacgctcaagcgctaccgcaaggagtcagctactggatcgaagacttcctcaagaggcactgatccagccccacaaaatttcggattgatcacgagatcgatcggctggccaccagatttgtgtttcgtcagtctagctttcagctggttaatttgtgatttgtgcatcagtggtgatgaccgatatgatggcgtgatgaattatgctgcattactattgaatgtgtacctcagtacctgtgcatcattgctggctgatcccattgagccggacaataataagaagaaacaataatgctccctgtcgagcagtgttgggctggttcaggctt

SEQ ID NO: 16208 - DNA, 3324 bp, Oryza sativa
  ref <308>: DATABASE ACCESSION NUMBER: AK066711
  ref <309>: DATABASE ENTRY DATE: 2001-12-06
ttggcgatcgtaggtatgcaattttgtcgaaatttacatagtaacaaccgaaaggcccccgaaaacctcgaaacgcatgagccaacccacgccgccgacgacgacggccaccaccaccgccctgcgcgagtggaaccgcctgatccagcacgccgccgcgtcgggctcctactcccgctgcctccgccactacgcctccctcctcgccgcgggcctcggcggcggcggcgcatccaccttcccgtccctcgccaagtcatgcgccgcgctccgcctcccccgcctcggcgccgccgtccacgcccacgccctcctcgccggcgccgcctccgccgtgttcgtccggacctccctgctcgacatgtacgccaagtgcgggcgcctccccgacgcgcgccgcctgttcgacgaaatgccgcgcccgaccctggtctcctggaactgcatggtcgctgcgtacggcaggagctcccaggtggaggagtctgttgcggtgttcaacgcgatgcggcgtgcgggggtcagacccagcgagggcacactcgtcggcgtgctctccgggtgtgtgggctccgtttccgcaagcaatcctggcatgtgcgtctacgggtttagcgtgaaatctgggcttgatgccggtttgcctgtgttgaactcggttctcaccatgcttgtccgtggtagccatctggatgctgcgcggttgttgtttgatggaatatgcaacaagtctgtagttacttggactgcattggcatctggttatttacttagaggggattatctggaggtgtttgatctgttcaaccgcatgcggggagttgggaaaaatgttgactcggtagtgctcgtgaatctcatatcagctgctgttctgtttgggaacttgtcggtggccaagggtgtgcatgctctcattattaagcttggctttgaatgtgaggaagaccttgcggcatcattgataaacttgtatgcaaagtgtggagatcttgaatccgctcgagaagtctttgatgcagttcacatggcgaatgtggttgtgtggacttcaatgataagtgggtatgttgaaggtggtcatctgaatgaagcgttggtgatgttcgatagcatggtgtgcgcaaacattgagccgaatgaagcaactctgtcatcagttctttcagcttgtgccaaattggggtctgctaatctggggaaaaaggttgaggagcaggcaattgccactggactgcattcagagccgcgagtagctactggattaatcgacatgtatagcaagtttggtagcatcaatctggctaggaaaatatttgagggtgttaccaatagagatatagctgtttggagtgccatgattaatgggtatgcttgcaatggagaaggaagtgaggctcttgtccttttcaaggagatgaaaaacaaaggttttcaaccagatgggattgcgtttactcatgttcttaccgcatgcaactattctggtttagtagatgaaggtcttgagtgctttcacagcatgacaatggaatatggtatcgagccatctattgaacatcatatgtgcatggttgatttgctttgtaaagctggtcattttgggagcgccctaaagttcttcaagcagatgccaagtgaggtgcaaaataaggttttagctcctataattagttcatacagtgctcgttgtgctgattcatccatagatttcataccagaggaacttctgaatttggagactcaagattctgatcactgtgttctgatgtctaatatgctcagttgtttagggaaatggaagaaggccacaagttataggaggcaactaagcaagcaaggattaatgaaggaacctggatggagttgtattgagctgagtggctaattattcttgatgtttagagcacttgattcacataattttccaatcctaagagtagtcacgtctctgggggaaaaaagaggggtcatgtctcatgagtttattgaacagatatcattctcaagtgaagccttaaggttgaagaattaattcatcttgcagtctcaagttcaacgtgcattactagaattacacacttgcagccaatatggtttgaggatatggtttggcacaataaaatgtgacatccgttccagatacattgatttggtgaggaccatcctctggttaatggagaagggtaccattcaggaaagtggctttttattggtattcaagcacgtcaggtacttaaggttcataatggtccgtgtctggtgatctaataaatagaacccttcaatggaacgaaaagagagaaaacattttaagatggcaccactgaatctactcagagttggaattatggtcctgtactctcctccatccactaacctgttcaagctggcatggtcacttgcctactggctactgccgttccacagcatgcttctctctagctgggtgtgattgctaaaagttggtgataaggaggagaaaaagcatccctcgtgtgatcccaagcaagaagcttaagaaggatccctaggacgagggggagacaagcaggcaaatataaagatgacactgcataattgataattcactgaccacctcagatatgctgagaacgtgctcatagcatggcggtgaagtcctcatttgtgaggctacaggccagggctcaaccctggctctcacaaaaaaaaaaaaggtcccttgctgtgtgttccccaaaagcgcgagttaagaaccggtcttcgggtcctcatataggaagcagaagggaacacacacatatactgaatttcaaggtgaccgatatcactggaacgggaggcacacggaatgccaacaacggttgcagcaccgaacatagttccagtagcctcagctaccaaagtctgggaatgagaccaggggggctggagcacttggttgccttgcaaagttgcaatggcatcaagcagtgcagagaaagaaggcacggattcaaagcatgccggtcacatgctcacagccctccggcgatggcctcgttcagccgttcttcttgagtgatctctactcgtaggggcttggcttgatgcagcgcacgagtagggatgcaagcgggggcggacaagcgggcttttttattccgcttatccaacttctagcttattttttcttctaaattttgtactaccataccagaaataaactagcaagcgggtaacgagactacccacttgcatccctccctacgcacgagctgtgctcacgtgatctgaacacatgcatgttagcttgtgcttcagaacgattttttattcagtttagtgggaggatattagtcc

SEQ ID NO: 16209 - DNA, 1284 bp, Oryza sativa
  ref <308>: DATABASE ACCESSION NUMBER: AK066712
  ref <309>: DATABASE ENTRY DATE: 2001-12-06
gatttttcgtcctttctctcatgtcgtcatcctcatcgactcatcatcaccagcggcggcacagcgcgcgcggggagcgggcatggctgccgccggcgaggacagtcgaggggcgtggggagcgggcgcgcaccggatgctcgtctctttccagaacagcgtccactcgtctggctgctccgggtgtaggcggtagctgcagcctgcaggtctcctcgacgtgcaccaacgcccggaggttggcgttgcgggagaccacccacatggcccgagcgggcccgtccacggtggtgcttgacgcagagcaccacggcggcggggacgacgaggccgcggaggaggagcaggagcggcggcgcccggcccgcgatggcgtgcacggcgtcgatgcgccccaatccagcgtcgacgcgacggaagagcatgtgcacatcgaggatatgcgacagcgcgccgccgcgcggtgcctcatccgttgcctcgcccgccggcgcgactccggggagcgggcgcagccgcagcagcccaagccggcgtccgacgacggcgccaacaccggtaggtcaagggcggtcggcgctgcatctgcctgtcagagctgaggcggacggcgccatctgcctgtcggagctggcggacggcggcgagcgcgtccacgtgctcccggcgtgcgggcacagctcccgccggcgacgaggagacgatgagctaccagaaagtgccattccgtgatttcttaggtcgttctaccgtgatttctctgatggaatatttggttttttttgtttctgtggatgcagggtacttgcagccgtacccgctgccgccgtcgtcgacgttgtcctctttgcagtcgcagggagtcacacgtcgggccgaacaccatcgaggcgtgcgtcgtcgtcgtgtcctcgccggcggcgagcggcctcgggcgcagcacgtagtggtccatgaggcttcagttgagggggccgtataggccgtcgtcgatccagtactcccggagctcgccgcgggtgcccttcccgatgacgcgcgtgggcgtggcgagggtgaacgccgtctcggcgaagtaccggccgggctcgccgatcacctcgacgcaggggaggtctccgaagtagcgctcgagcgcgtggtcattcctcgattggcttttgcgccggtgaaagaaacagtagctaccaaaagcagggcccaaccatcatacggggccaacaaaccatattatgggatccaatttttagttctctctttgaggtggtaaagattttagagtct

SEQ ID NO: 16210 - DNA, 1742 bp, Oryza sativa
  ref <308>: DATABASE ACCESSION NUMBER: AK066713
  ref <309>: DATABASE ENTRY DATE: 2001-12-06
gattgactagggggtggggtggtacggaaaccctatcaccagggaagaggggggcgggggcgcacagcaaatttcctcctaatccgtttctcccttgggcgatggcttccatcgctatggctgcctcgttgcgaaccttcctccgccctcaccgttgccgtctcctcctccgccagagccgcagcctctccgccagcgccgccccggccggtgccgccgccgcatccacggttatccggcgcagcgtagtggaggtgctccgggagcgggggctcgtggaggccaccacttctgagtctctggggtcggcttcagcgagccctagggagctcaaggcgtactgcggcttcgaccccacggcggagagcctccacctcgggaacctcctcgggctcgtcgtgctctcctggttccgccgctgcggtcacaacgccgtcgcgctcgtcggcggcgccaccggccgtgtcggtgacccctctggaaagagcgccgagcggcccgagctcgacctcgccgccgtcgagaccaactccaacgctatcaaatcgctcatcggccagatccttgaccgagcacccgagccctcccaacatgcgcaatccggaaaaaacttgaacttggagcaaaatgagcaggctttggtcaattcgggagaaaagatgggtcttttcagatccttgataactatgactggtggaaggacatcacgctgctggatttcctcaaggaggtggggagattcgctcgtgttgggacgatgatagccaaggagagtgtcaagaagcggcttatgtccgaggacggaatgagctacactgagttcacctaccagctgttgcagggctatgacttcctgtacatgttccgcaatatgggtgttaatgtgcagattggaggaagtgatcagtggggaaacatcacagcggggactgagttaattcggaagattttacaggttgagggggcacacggcctgacattcccactactgctgaagagtgatgggacgaagtttggcaagacggaggatggagcaatctggctttcgcccaagatgttgtcaccatacaaattctatcagtacttcttctcagtgccagatattgatgtcataaggtttatgaagatactgacattcatgagcctggatgagattcaggagctggaagagtcgatgaagaagcctggctatgtgccgaacacaattcagaggaggcttgcagaagaggtcacacgttttgtgcatggtgaggagggattggaggaagcgttgaaagccacggaagccttacggcctggggcacagactcagttggattcacaaacaattgaggggatagcagatgacgtaccatcatgctttttgccatatggccaagttttgaagtctccccctggttgatctagcagtctccacaggtttgcttgctagcaaatcagcggttaggcggcttattaagcaaggggggctatacttaaataacataagaattgatagcgaggataagttggttgaggaaggtgatgtagttgatgggaaagtgctgttgctatctgctggaaagaagaacaagatggttgtgaggatatcttgattgttttaatttgttcgttgcatttaaatttttttatcattgaggagcaaaggaatgagacgaagtcttgtattaagaatttaagattaattttgatgaacatcggcattaattttaatgccactttactggaatgattaaactgat

SEQ ID NO: 16211 - DNA, 3176 bp, Oryza sativa
  ref <308>: DATABASE ACCESSION NUMBER: AK066714
  ref <309>: DATABASE ENTRY DATE: 2001-12-06
gacaaacaccatacgcgcgcggacgcggaggccgcggagctctcagccatggaggcggccgcactcctatcccccaccgccacctctcgctcccctctccccctcctctccaccgcgcccgccgcccaccgcctccacgttctcctgcctctctccggccgccgccgccgcctgtgcctccgctcctctcctcgaccccgcgggtcgttgggctgtgcgggagattgcgtcgtgaggagtatgggttcgtctcgtgagcgcggggtgctcgtgaagaccagcagctcatcagcctcagtcgaatcggcaacccaggaggtgggcgcagcgagttcgggggagtggagcggggacgccatacgccgacgtttccttgatttctatgctgcccgtggccacaagatccttcctagctcgtcgcttgtgccagatgaccccaccgtgttcctcactatcgccgggatgcttcagttcaagcctatattccttggcaaggaacctaggcgtgtaccgtgtgctactacctcccagaaatgcatacggacaaatgacattgaaaatgtggggcgtacgagccggcatcaaaccttctttgagatgcttgggaacttcagctttggtgattacttcaagaaggaagcaatcacatgggcatgggagctaacaaccaaggagtttgggttacccccagaaagactatggattagtgtatttcaagatgatgatgaagcattttccatttggcacaatgaggttggagtaccaaaggagcgaataaagagattgggcgaggatgataacttttggactagtggtgcaactggaccctgtggcccatgttctgaaatttactatgatttctatcctgagagaggatcctcagatgcgttgtatgcaggatttgggtgatgatagtcgattcatcgaattctacaatcttgtcttcatgcaatacaacaaaaaggatgacggatctcttgaaccattgaaacaaaagaacattgatacagggatgggccttgagcgtatggcacgtattcttcaaaaggttccaaacaactatgagacagacttgattttcccaattattgaaaaggcagcaagcatggcattagtgtcgtacaccacagctgatgatgctatgaagacaaatcttaaaataattggggatcacatgagagcagttgtttatctcatatcagatggagtcattccctcaaatattgggagaggatatgttgtccgaaggcttataagaagagtagttcgaactggtagactgataggtataagaggtgaagggcatggaaattcagaaggtgcctttttaccttcactagctgaggtagcaatcagtcttagcactgagatagatccggatgttgaatctagaaggaaatcaattcttggagaacttcaaagggaagaactgcgatttgtgcagactttggaaagaggtgaaaaattattggacgaacttctggatgaggcattatcaagtgctggtaataatggtggtaaaccttgtctatctggaaaagatgttttccttttgtatgatacatatggttttccagtagagattacagctgaaatatcaggtgaacgaggtgtaattgttgacatgaagggatttgatatggaaatggaaaaccaaaggaaacaatctcaggctgctcataatgtagttaaactttctgtaggaaatgagactgagattgtcaagagtatccccgatactgaatttctgggatcggacaccattttatgctgaatcaggtggtcaagtgggagataatggtttcttgtatgtctatggagaagaagatgcaaaacagaaggcagtcatagaaatcaatgacgtccaaaaatccctggggaatatctttgttcacaaaggcacaattaaacaggggtccgtagaagttgggaaggaaatcgatgctgctgttgatgcaaaattgaggcagggggctaaggcccatcatactgcaacacatctcctacaatctgctcttaaaagtatcattggttcagaaacatcacaggcaggatcccttgtggcatttgaccgtctccgatttgacttcaatttccaccgccccctttctgaagaggaattgatgaaaattgaatcacttgtaaaccaatgggttagcagtgctactcatcttgagacaaaagtgatggatctgcaagatgcaaaaaatgctggtgcaattgcaatgtttggagagaaatatggcgagcaggtcagagttgtagaggtccctggggtgtctatggaactctgtggtggaactcatgtgagtaacaccgctgagatccgtggtttcaagattatctcagagcagggaatagcttctggagtcagaaggattgaggctgttgcaggtgatgcatttgttgagtatgtttgtgcccgtgacaactatatgcggtgcttgtgctcatcccttaaggtcaaggctgaagatgtgaatggcagagtagaaacaattcttgaagagctaagaacaaccagaaacgaagtatcatctctacgcagcaaaatcgcggtgctcaaagcagcatccctcgcaaataaagctacaactatcgataacacgagggtcgtggttgagaacatgggtgatgtggacgccgatggtctgaagagcgccgcggagtatctcgtggacacccttgaagaccctgccgcggtgatcttaggctcaagcccgggcgatggcaaggtcagcttggttgcggccttcagccccggcgtcgtcaagatgggtatccaggcagggaagttcgtcggcggcatagccaaactctgcggcggaggcggcggcggcaagcccaattttgcccaagccggtggacggaagccggagaacttgccgggtgcgctcgagaaggcacgggatgaaattgttgctgctatatcgtcgaagtcgagctgatttttgtactgaaccatgtacatagggaatagaacagccttacggctatatggttcacagtggcagtaacatttttcgtcaaccaaaaataggaaattgttgttttgggattttttttctgcccggttgcgtacgtactttgcagaaaaccagcttgtaccatttgtaactaccccgtcccaaaaaaactcaacagagcaagtttaataatatagtccactactagcc

SEQ ID NO: 16212 - DNA, 3393 bp, Oryza sativa
  ref <308>: DATABASE ACCESSION NUMBER: AK066715
  ref <309>: DATABASE ENTRY DATE: 2001-12-06
gattttttcctttaatctatattctggttcactcatggttgtattgtatgggatttaaatctatctgctgcacttgtagtgatcgagattattttagatgactacactatgctttatagacttaccattcgaaaatcaccatgtttccaccgtgtggttgactgattcttatgaccggctttcatcagaccccccccccccccccccccccccaaaaaaaatatattctcgatctaacttacggagtaattagaactgctaagagtttcgtttgttctatgttggccttctgtatgttattggcggggtattttccacatgatttctgccgtatattttaaaattttaccatcaactgatgatattgtctgtccggggttcagaccggagcttgctgtcatacatgatggacaaaactatggtagtacaagctatttctcttaccggctttgatgactcccatagctgtcgacaaaaggcttgtgtagttgtgtacctctgactctgagaagtatgaaaaccagaagtaaaccaacttggcaagatgtgctcggtgttacggaactatagttacaaaatttcggaaactagattgacgcttgcagcggtacagatgatctaaagacatttgtttgttgaaacaagttgaggctcgattaaggcagcactgtagacaatttattgtgtcaaatatccatatattttcccttgaattgcttttgtaccatggatggttgtcttagatacttcctagctttgccctaaacttacttaaacctgtgaatgttgaaaagctacccttttttttataaatattttaggtttcatggttcaattcttcgttctcaggatatttgctgctcaattatgcgataaagtgcttccagttgacgcggagttggtggagacgccttgctctataatctattctccattgctcagcagtgatcagttggaagattctgcctttcttcctcttgctgcctgtttgtttgcttccttggtggagtagacgagaggaggagggcaagaagataaaggtagcttctttcagccactctatgtccagggacttggattgtcctgttcagacacagatggccgttgcagtactggatcggagcttcagcagtgaatatcctgcaagcagcagaactgaggggagatcatgtagttggaaaagagtctttgtccaaactgaaaatggttatgtcctgggcattgaactggagaggggagaaaatgcacacactgtgaaaaagaagctccaggtagccctcaaggtacccacagaggagagctcactgacctttggtgatctggttctgaataatgatctcagcagtattcgcaatgactcaccactgctcctcagaaagaatcaaatgcaccggagcagctcaactccttgcctctctcctactgctcatgatgtgcaggagcaagatcacagcgaacccattgaaatccttggatgtttgagcccctcttctcggatgaagcagcttgctaaggatgttgtggaagccataaggaatggtgttgacccggtacctgttaatagtggcatgggtggcgcatactacttcaagaacatttacggggaacgtgttgcaattgtcaagccaacagatgaagaaccatttgctccaaataatcctaaaggttttgtggggaagacccttggactgccaggcctcaaaagatcagtaccggtcggtgagactgggctccgagaggttgctgcttaccttcttgaccatgataactttgcaaatgtcccacccacaatgctggtcaagatcacgcactctgtgttcaatgtgaatgatactgtcagctgcaaaagtaaagtcttccacaacaaattgcaggctgtgagcaagcttgcatcattgcagcaatttattgctcatgattatgatgctagtgaccatgggacatcaagcttccctgtatctgcagtgcacaggattggcatacttgacatcagaatattcaacacggacaggcacgcaggaaatcttctggttaggaagcttggacctgggcctgacaattttggagtgcagactgaactcattcctattgaccatggtctctgtcttccagaaagtctagaagacccttactttgaatggattcactggccacaggcatccattcctttcactgaggaggaactcgaatacattgcaaatctggatcctgtaaaagatgctgaaatgcttcgcttggagctgccctttatccgtggagcatgtctgagggtgctggtgctatcaacaatatttctcaaagaagctgcagcatttggcctctgcttatcagagataggagagatgatgagtaggcaattcactgggaaagaagaggagccaagtgagcttgagcttctttgcatggaggcaaggaagtgggtcaagaaaagagagctatttcttccagaagccggagttgaagatgacaatgatggcatcacccagttctctatcgacagcgaagatggttcagatgcatctgaattaccatctttcagcaagttcgggctcatgaatgctagtcacagaaatccactgtcaaagttagatgagtgtgatgaggaagatggtgaagaggaagaggatgatgatggtgatgaagaggatgatgatgaagatatgttcaaagatgatgctggcaacttgaaaaatccgttttcgaagcatattccttcagtctcaaagttatcagcatcatttaaggggctcggtttcattgggaaagctagagcctaccacaaaggtgttcccaagaacaaggtgactgctaaaactaactatagtggcaaaggtagtgagcatcagtctggtagcaggagtgccaatgagcttctccctcccagcgccagttttgtgaagctgtccgacatgggctctgatgagtggagcgcattcctcgacaagttccaggagctgctcccgagcgccttccgagcccggaagcacgccgctgctgatggccctcgtccgttgcagaggctgggcacttcttgccagttttgaaactagaagaagaagaagcagcagctttataccaaggtaatgtagatggaacccatcaggtgttcagcagcagcagctttgtccgtcgaaggcagctagcagaagctctgtacgcttgtaggtgtctgttctcggagaagatatagaggtggttcgggaataagaccgtccgtccttgacaaatatgagcttgcaggagggtttgtgtcgtgtttgtgaatagctttgacatatgtgttgggttgttctttcatctgtacatatatgaaatgaatgagtacctctcgataccgggcttgacctggtagtggtgagtgtgctggccttgccggtgtaccggcgctgtacc

SEQ ID NO: 16213 - DNA, 608 bp, Oryza sativa
  ref <308>: DATABASE ACCESSION NUMBER: AK066716
  ref <309>: DATABASE ENTRY DATE: 2001-12-06
gatcttccacacttatcctctcctctccctctccttctccggttctccctctcctatctctctctcaccggtcggcatggagcagcggtaactccacgaaaaggcccggcggcggtgactgcaaagcgagcatggctcgcggcaactcaacaaagcggcccaccagcgacggctgcaaagcgggaaggaggggcgtagcggcggctcagtgaaggggtttggcgcatctcctcctctgctcccgcccgcctctaccaactaagcccatagtcgacgagcctcgagaggccgcatcagaagccaacagccttgggtggtgacgacgacctcgatgatgtgacgatttctaggaacaagctcgggggaggtggatccatcgccggtgagcttgggggaggccgacgatccgttgccaacaagctcaggggaggtggatcatcgtctgcgggctcaggggaggccgattattcatcagcttgtttgtaacctattgtttgttctagtggatctaattatagctgtgttcgatgttgttcttgtttatacttgtcttttcttgtttgtctatggatctgattctaatttgaatatgatgcttgcatgcaatg

SEQ ID NO: 16214 - DNA, 3567 bp, Oryza sativa
  ref <308>: DATABASE ACCESSION NUMBER: AK066717
  ref <309>: DATABASE ENTRY DATE: 2001-12-06
tagctaagcagcaagctctcactgcactcaccgcatcgatctctactcgatacacagcagcagcagcagccgcctaaacccccattagctagctgcatgcctcagcgagccatggagtcgcctccaatcccctcttgagacaagctgtgccaagggcaacgagtacaagccggagctattgggctctctacttttcaagatatagtgatgcaactactgcgaatggagatttgaaagcagttgatgagttatcaatctacgccacatcatcataagaaacgtgcagagagggaaagtgaattatcaaatggagttggccactggagcgataggtgcagtcctccccaagttgggcaagctgctaaaggaggagtatgacctgcataatagtgtgaaagaggggataaagttcctgaaggccgagctcgagtacatgcaacctgctcttaagaaggtgtcgaatgttccacgagaccagcttgacgaacaagtcaagatctgggctaaggatgttagagagctatcgtacagcatcgaggacatcattgacaccttcatgctacaggtggatgcacttgagccacccaagaataacatcttcacatggttaatcaataaatgccacaagttgtcccagctaatgatccaccacaaaataggcaatgacattaaaagtgttgagaaccaagtcaaggaggtgaccgaaagatacgatagatataggattgatagtattgatgctaagcctccaatatttattgaccctcgtatcttgggactgtacgagaaggtcaccaatcttgttggtgttgacaaggccagtgaagatctaatcaggatgttgtttgtaggaagtgatgcatccaagatgcttaagattgtatctgttcttggattaggaggtttgggcaagacaactcttgcaaaattcgtgtttgacaatctgaaagtgcaatttcagtgttttgcttttatttcggttggtcagaaacctgctgacatcaagaacgttctcaagcacatcctgattggacttgacaaacacaagtacatggaactcgatacatcccaactaagtgaaagttatttaactgatgaggtccgtgaatatctggataacaagaggtacttgattgttattgatgacgtatgggagatattcacatggaaaaggattaattgtgctttggtggatagtaattgtggaagtaaagtaattacaacaactcgtatttctgaagttgctgaagtagttggtgatgtttataggatgaagccgctttccagtgacaactccaaaaggttattcaacaatagaatatttggtattggttccaatggaccaactaataatcaatcagttgaagcaactgagaagatcttaaagaaatgtaatggcatgcctttgtctatagttacaatggctagtttgttggttaataaaccagtggaggactggatcgaagtgtacgactctattggttttgggcctacaggtcaaaatcaagaagttgagaacatgagaaagatattatcttttagctactacgagttgccttcatacctaaagacttgtctactatacctaagcatatatccagaagaccaccggatcatgaaaaaaccattgatatggaagtggatagctgaaggctttgtccaagaggaacaacaaacctggttatttgaggttggcgagaggtatttcaccgagcttgtaaatagaagcatgatccaaccaattgagatgtatggccgggtgtttgcctgccgcatccatgacatggtgctagatcttattcgcatcttggcaaccgaagagaactttgtaaagatactagacaggttatatgatgttcatagctcatcttcacaaagcagcactgcccgtagggtagcatggcacaagagcttgaaccaagataaattcgataacttgaccacagggatggcacaactgaggtcactcaatgccattgagtgtcctattagtatgattcccccgttagtgagctttgagattctacacgtgctagcactggaatcgtgtggtgtcataacaggatatcacttgaagcatattgggaagctacaaaggttgcgttacctgggacttagaggcacacgaattaccgagctcccaagtgaaataggggatctcatgcatctgttggtattggatgtcaggggcactaatgcactgccagcaactgttggaaagctaagaaggctgatccgactatgcgtcggaggcaccatagttccttctggggtaattgggaacctgacctcactgcaagatttgcgtttgggcgagataaccgatgatggctgcccaaacattgctgtggatctctgcaaactgacagacctgaggaagctcaccattgattggttgcatctagatgagggctcactgaagacactggtggagtccctatgcaccctgcgcaaactacagagcatcaagatcaagggcagttggaaggtgttggaaggttgggaaggctgggagcccccacggcagttccgcaagttctacgtggatggttcattgcctcggcggccaacgtgggtggattccgtgcgtattccacacctctcccatctgaaccttcacttgctggctgtggaacaaagggacttggatgcccttgcgatgatgccggagctccgcgtcctcgaagtgaactccgatttgtcaatttcatggacaatcgctggtggcggtttgttcccaagcctgagatgcttctccacggacatagagatcatgtttttgcagggagcaatgccaatgctcacgaatatttcatttgagccatctggtgatgattcagccaatgacattggattaaggtacctcccttagctgaatgatgtttttatacatctgctgtactgctcagatctgacggccaggcaagtgaaggaagccatagcggtgtggaggcgtgtgattaattctcaccccaaccgtcccatcactcatgtgcagataggtgacgaggcttataatctgattccatcagacgatagcgatgacgaggagatttccgatccagggaaagatgacataaatgatgaggaggaggatcaaatttcagatccagaggaaaccgacagaaattatggcgaggaggagatttcagccacggaccagaagcaggacaatggcgcagccgacgaggcaaagaggaggaggctatcttgaaccaattcgctctgcactctcgttccttgatgcgtgcagcggcaggaggataatttcagagaaactctttggtggaaccctccatggctttatgacgaggaagaagaccagtatcctccggcagacttgagcgccagaacagaaccggccgttcgatggattggctagtttttcctaatagtttcctgtgccattttacttagcttttctacattgtttttatttacagatggattgtaatatatgcatcagtgaggcctaatcataggcccagataaaaacacaaactgatggtgtgtaattggttggaagtgcaatgtttgatggaatgatcccatccaagttttacggtg

SEQ ID NO: 16215 - DNA, 1088 bp, Oryza sativa
  ref <308>: DATABASE ACCESSION NUMBER: AK066718
  ref <309>: DATABASE ENTRY DATE: 2001-12-06
gatatggtcttgctgctcatctgtcaatttttctctgtttcatcatcagtgaaaaatctgttattttgtgcaaagatgtaagatttatgtttgttcccgctgctaatcgttacaccgtttgaaaccttttgcagaaggaaattgtcatcaggctgcagagctctgagaagggccacaagaaagctatcaaggttgctgctgcagtctccggtgtggaatccgtgacgctcgccggcgaggacaagaacctgctgctggtgatcggcttcggggtggactccaacgacctcaccgagaagctgcggaggaaggtcggccacgccgaggtggtggagctgcgcaccgtcgacgccgacgagctcatgcgcgtcgccgccgccaaccagtacccgtaccgctactaccccggcgcgccgcccccggccccgtactacggcaacggcgggtaccctcctcctcaccagcgcggcggcggcggcggcggcagcggcggtggctactacacgccgatgacgatggccacgggtggctactacggcggcggcggcggcgggtacccgcagtacgggcagtcgtcgtcgtacccgcagtacgggcagtcgtcgtcgtactacccgccggcggcggcggcgacgacgaacacgcacaccgtcgtgcaccaccagtacgccaacaacgacccggacagctgcgccatcatgtagctgcaccagctagtgtacgatcgatgctgcttctgctcgcgcgcgagcatgccggccgtcgtcgtctcgatcgtcacgatgatcggatgatcggaggacatattgcgaccgaatctagtagctgattgtcccaatcgataactggcccaaagtacgtagatataccttgaattttctgtgtgatgatgaggccgatttgattccgtgtgattactgaacaacagacaggtacgtacctgttgtctgaaactctgaagtctgaacgttatatgtgcagtagtatatgtgtagtagctgctcccggcctccaagtgtatacggtgtgcaagtgtaaattaggtgtactagggagatatatataaggtgcaagcgactttatagttc

SEQ ID NO: 16216 - DNA, 2143 bp, Oryza sativa
  ref <308>: DATABASE ACCESSION NUMBER: AK066719
  ref <309>: DATABASE ENTRY DATE: 2001-12-06
cgcagctcaaggacgcggcacgtttagcttaggacagtcaaacagcagaaatggtgacggcggcgaggctactccccctaatcctcttcctcactgcggtggccgtgggctgcagcgcgtgggagatgaacatccggttgccgacggagagactggcctacggcggcggcgaggctgtggtggcgccgatcatacacgcgctacggccgctgctgggctccggccggcagctggcggcgcgcgccggcgtggcctgcgacagctggaggctgggcgtggaggcgcacaacgtgatcgactggaggacggtgccagccgagtgcgagggctacatcggccactacatgctaggcgaacactaccgccgcgacttcgccgtcgtcgtcgacgaggccgtcgcctacgccgagaccctcaagctcgccggcaatggcaaggagatctgggtgttcgacatcgacgagacctctctctccaacctcccctactacgccaagcacggcttcgggtacgtatacgtatatagttatataatatacacgtatttctaccagtatatacacttcattttcatcggggctcccgctgaccttgctatatactccctccgtttcatgccgtttcatgttataagatattttgatttttggtcaaagtcaaactcccttaagtttgactaaattcatagacaaatatagtaatatttataataccaaattagttttattaaatcaataattgaatatattttcacaatgaatttgtcttgggtcgaaaatgttattatttatttctacaatcttagttaatcttagttaaacttgaagcagtttgactttcaccaaagttaaaatgtcttataacctaaaacagaggttatacaaacggcaatacggaagaagtatatatgataactggctgacaagataataacgaacggcaatacggaggaagtatatacgacaacgggctcacaagacaatactgctatatacgaacggcaacagggtccattaatactctctccatccaaatccaaaagtttaaaacctatttcttttttaccaagattaataagtaattaattcattcatcatgtgataaaatcaataaacatgtaactaataaatactaaaaatgactttttgggcttcgctcaaaaatttaatatagcacatagtgactataaatagtacttagatttttgaaaaaaaaaccaaagaatggaacttttggatggatggagtacttactaagacgcgatcaaaattgacatagattttaaaactaatctttgactttaaatttctcatatcctagtataatatttgtagcaacaaaattataatcatataaaataaatttaaatgacaatccgatgatattactttcatcaaatcaaatttagtttgtaatatactatttattcgtcaaatatttaaagagttgaaccttaaaatacatgtacgtcttacagagtcggacggagggagtatctacaaatctagttgatgtctgataattaattaaatgtcaaaattatgatgaactatgttgacttttgtcacgaagtttaaccattcatattgttaaaaaaatatataaatagtatttattttcttgtgatatgttttatcattaaggaagagacatgcatacacatggcacacgtactgtcacattaatagatacatagcacctagtttataaaaaaacattaatagatacataatagttacgtagcacctagtttataaaaaaacattaatagatacataagttatacatgtcattaataaactctctaaacaataaacgatagatacacaagttatacgttttattgaacggtggatgtgcataggtgttagtacaaaaatcatacgtgttactaaacggtgaatatgaagttatacatgttaggacttgtttagatcaatttgctgtggcaaattttttttggtaaaagtgttggtggcaaaagatttagtattgaagttttgctagttggtgtttaaatgtataataaagttttgctagttggtatttaaatgcaaaaaaaaaaaaaaaaaaaaaaaaaaaaaaaaaaaaaaaaaaaaaagaaagtatacaagtcaagacaaaataaaaaaaaaaaagaagt

SEQ ID NO: 16217 - DNA, 1927 bp, Oryza sativa
  ref <308>: DATABASE ACCESSION NUMBER: AK066720
  ref <309>: DATABASE ENTRY DATE: 2001-12-06
gcttctccacttcgtcccacacttcaacgcctcgcgatcgatcgccccaaatccccgccgccgccgccgccgccgcgaatcgccggatgcccgccgccgtcgccgccgcgggggcggcggcagcctcgggcaccgcgctgctcgcctacatactcctcgcatgctgccggccgcagccggcgccggaggccggcgaggaggaggaggaggagtcgcggctgttgtcgtccggggcggaggcgcgggggagggaggcgggggatggcggcgaggaggaggaggagtggccgtacaggccgccgtcaacgtgctgcgaggcggcggcggtggccgcgcgcacggcgcggcgcacgtgggacctcaccgtcgggcgctggggcctccacggcatcgccttcgggatcaagcgccacatgaagcgccagggtgatttgcagcatgagtatagtggaaatgattgccttcaactaaaaggtcacgacgcacacactgaagtagcttatctacttgagcacttgaagatttgcatgttctactcaaagaaaacattttcagcgtttcttcagtttggtgggtacaatcaagaagacattcttattcacaaggctagggcgaggcttatgcaaccttctttcgcgcttgtgtgtgacaaaaaatccaagtgctttctgcttttcattcggggtgctatcagtactaaggagcgcctaacagccgcaactgctgctgaggttccttttcaccatatagttttaagtgaaggacaaatcagcaacgtggttttaggatatgcacattgtgggatgcttgctgcagctcgttggattgctaaccttgccaagccccatcttcacaaggcagtacaagaattccctgattatcaaataaaggtcattgggcattcaatgggagcaggtatcggagcaattctgacatacattcttcatgagcatcatgagttctcatcgtgcacgtgtctggcatttgctcctcctgcctgtatgtcatgggagctggcggagtcgggcaaagaatttgtcacttctctcatcaacagaaatgatgtggtcccggccttttcaaaagtttctgctgagaacctgcgagctgaggtaatggtatcatcaaagctagatgatgagcaggatcaagctcactttagcttatttacggcaataagtaagcgtgtagctttcataaagtctcatatgctgtcagtatctcatccaacagagaagaacacagatcctgattctagcatatctgagcccttgctcaaacatgtccccggaatcacgcagcctgtaacaaatgggctaagcacagactgcaaccagcatcaaacggacctcgttgctaatacagagcaggacttttcagctgtatcagttgttacctctgaagaaaagattgtactatctagcaacgataatgttatcagtacaaagtctgttgctggatcaggctttgcagcacaaggggatgtgaacatcaatggatcactggacactgaacaagaacaatcatccttgacagggcaggaggaaccagaatcactgaagcagaactgtgatatcaaagacaagctgaaagaaccgctaccaacctgcagttcgcgccagtttttccctcctggaagaattattcacatggttgcaatggcctcacctgacccaaatcctggtgagggatccagcagcaatgagatcattagcatttatgaaacgccaagagatttgtatgggaaaataaggctagctccaaacatgataaaggagcattacatgcctagttacataagcacaatggaatcattattggaacagctgctcaaagacgataatgtagatacagtaacaaatgatttgtaaattatgtaaaaactcaataaattattaatccaattctttgcaaattgcattgttct

SEQ ID NO: 16218 - DNA, 3485 bp, Oryza sativa
  ref <308>: DATABASE ACCESSION NUMBER: AK066721
  ref <309>: DATABASE ENTRY DATE: 2001-12-06
tctgatgaaggtaaggctccaacttcccatctgacaacaaaccaaaggaagaaactggctgctgactgtgctctacaagtgaaagcattttcctcagcagccttacaatttgtttggccaagtactgaaaagaaggttatggaagtcccaagagatagatgtggttggtgccttgcctgtcaaagttcagcaggtggaactaaaaaagcttgttttcttaacatggccactgcaaatgcttctaaaggatctgctcgaattcttagtggcatgcgtttaatcaagaattctgatagccatttccccagcattgttacttatttaagccacatggaggaaagtttgcgtggccttttagttggttcactacaagatgtgcagcggagacaacagtggtataatcaactaaaagatgcttccaactgtggaaatataatacccctcttgcttgaattggaaagtaatattcgtggtgtagcattttctactagctggctgaagctaatagatgactggcctgtggaatctcctagtgcatctgctggtgcatcccgtcctgcagcataccaaaaacgtggaactggtggaaggcggggcagaaaacgttcaatggcatctgaatctgctcctgttactgatgatgacaacagctggaaagaagtgaattggtggagtggaggaaatgtttcaaagcgtatcttacagaggggggctctaccaattttgaccattagaaaagctgctcgtcaaggtggaaaaaaaaggatgttcagtgtgtcttatcatgaaggctccaattttccaaggcggactcggcaacttgcttggagggcatgtgttggattaagccagagttcatctcaacttgctctccaggttagatatcttgattcccacataagatggaaggagttcatccctccagatcaaattccttcagaagggaaaagtgtagattctgactattctgttctcagaaacgcagttgtttgtgataaaaaaatagttgacaataagataagatatgcacttaagtttcccaaccagaagcatcttcctgtccgtgtaacaaagaatattttggaagcagaagataatcaggatggggatgggaaattttggttttctgaaaaccatatcccactatacttgctacgagaatttgagcagaaagctggggttagctccttgcctactccaggaatgttagattctaactgttttgccaatttctaccaaaggcgagtaaaatcatcaattggagatgttttcttctatctgcttcacaagggtgatgtatatccttgcacctcatgcaagaaggatgtttccttcagggatatcataaaatgcagctcttgtcaaggtaattgtcataaagagtgcacattaaggtctgttggtagcaaagagggcaatgctgcttccagtttaacatgcaagttgtgccttcagaagcgtagtcttatgcttacaaattacaatacaaacgcaagtttcatcctacctcaacagaagagtaatgtccatcacgcagtggcagctcccaaaataatctttaaggttggttcttcccattccgctgaaccagccacaaaggttgaagctccgccaatcgtgaaggtagaagcccagccagtggtcaagaaggaaacctggccagttgtgaagatggaaacccagccaactgcaaatgtagaagcacagccaactgcaaaagtggaagcctttccaatttcgaatttggcaactcagaataatgcaggggcgcaagtccagcctaagacaaaatctaaaaaacccaagccagaaaaaccgagaaaatccaagaagactgaagagatcaaatactttggtctcgtgtggaagaaaagcactaatgacaaaaataataatgaaaattctggagaagtgttcagggcgaatgatgttatcctaaaaggcaaggatggtgtaggttcatcaataaaacctacttgctgtctttgtaataagccttattgcccagatttcctgtatgtccgctgcgagaggtgcaaaaagtggtttcatggcgatgccttgcaacttgaggaagaaaagatatttgaattggtttcataccgatgttgcagatgccgaaggcgagccataccaaaatgtcctcattcagatgattataagaagcctgaaccagaatacagtgagcaaacagtcgctacgtcatcacagtcaactatgctttctagtgaggagaattttgctgtagcagatcaagatccactgcttgcttcatatggcagagttgaaccgtttggagcacaaacaatggatgctgatttatcgatgaacatgatgagctttaacccaggaaatcagaaactatcagtaagaaggggacaaaacaaaaattgtgaatatgttgaccaatccagtatacatgtggatgactattatatccagaatcaacctcaagggaatgcaaacatcaatttcagtcactcgaatgaattctctttgtcagaggctgatggtgtggatgcttcagagctgttgggatgggatttttctcaaggaaataccagtgctgccccttctgatttcgcagctaattgcccgtggaatgacatcagctgtggcagcgttgctggtgatgaatatgaaccacagacttatttctcattcaccgaactacttgaagctgatgatacacagttcgataatacatttgggatgtctaatagtgtgcaagatgatggtgaccaacaaggaattggttttgatgaaatggctttcatgatggaagatggggcctcaaacatgcctttcccagctattgactccgcctctgacgaggtagcatgtgacaggtgcaagaatcctcagccgccacctgatctcaaatgcgcagtatgtggactgcagatgcaccgtcattgctcgccttgggaggatggtgaacagccatcagatagtgccgattggagttgtggtgcctgccgggagtggcgatgatgagcttcaaactttcattgcacttgttacctgagagctgcatagagcagctgtctaattacagtcgaagaagaaatctcatgaagcacaccaaggaggagcgagggaaaatttcccttctagctatttggcattgtcagtgccactgaccgtttgggagttgtggcgttgattactggacacaccttagcaatatggtttgacaaccaaggttttcggcgaactgtacatatattaatgaatggttgatcgaaaaagccgttttccattcatctaggcggttttctttttaaggggaggattataggattagattgctcttagttacgtgttatataggagctctggactttggaagccatgttcctgacaatgtgttgtcttggattcttttgcccctttttttccctcagaaaaagaatagaagtgcctctttctccgagtggatgcgatatccttgatatatatagcctcggctttttcctctgatt

SEQ ID NO: 16219 - DNA, 808 bp, Oryza sativa
  ref <308>: DATABASE ACCESSION NUMBER: AK066722
  ref <309>: DATABASE ENTRY DATE: 2001-12-06
gaacttggatacttgcctttgccttccaaaatctggagtccaaaaatacacaggagataagcagccatttgctcctggaagaatgagagaagcttgcgcgccggtgcctcctggggctcatgaggaggcctgcatagagcaaagtgatgatcgatctgaagatggttccttctcgggttcgtccatcgggtcgtcgtgctcatcggcatcggatctgagtgatgatgggagttcttaccgtcctggtgattatcttgagccgtcatcgtcgtcgtcatcagcatcttcgagcacattgcagctggattctgaagggccgctctgtgacttgtcctcactgatagcccagcttcctatcaggagagggctgtccaactattaccaaggaaaatcccaatcattcacatcgatatctgatgctacatgtgttcaggaccttgcaaagaaaattacctacaataagaggatgaaggcgtgcaaaagctatgcagcaggactagacatgaatcaacgatcaaatcacttgccaaagccatgcaacaagatgatagcgaagaggccctcgaaaggatcatttacctgtctgctgtcaagaccaagcagcaccagcctcctgtgcagcagtgctaaaccacctacacaccagagcaagaaagatgtacaaatgcatattaactcgtaacaaaaaatatgaccctggaaagtggaaacaaacaagtactagggtttcaggtatccagtttcagctaacatgttgtgctgcgcttgtactgctccttttcacaaggaaactcaactattttttttc

SEQ ID NO: 16220 - DNA, 1386 bp, Oryza sativa
  ref <308>: DATABASE ACCESSION NUMBER: AK066723
  ref <309>: DATABASE ENTRY DATE: 2001-12-06
gctactctctcctccctccccacttttgctttcccgtcgtctcgttgccgacgtcagatcgatcgcctcgtcgtcggcgccgcagtcgcgggcgggcgggcgcggtgggggttagggtttccgtgggggtggggggggggaggggctcgggatccatccatggcttggcccacgggatgcctcggcttcgaggccgccgccgccgtctgccccgcggccttccaggcgtaccagaagtactacgatattgtatcagcgttttcaaacgtgaacacacgagaaggattggctgagctttcacaagttatagatggcatggaaggattgagggatgcgatatttagtgacatccccaagctcatgtcagctcttgacttagatgatgctcaccgattcagtatcttctatgattttgtcttcttcatttcccgagaaaatggccaaaagaacatctctgttcagagagctgtgggagcatggaggatggttctaaatgggaggttttggttgcttgacaggtggtgtaactttgttgagaagtaccaacgttacaacataacagaggatgtctggcagcagctgctagctttcagcaggtgtgtaaatgaagatttggaaggttatgatccaaaaggtgcttggccagttctagttgatgattttgtggagcatatgcacaggatttataattcctgtgattgctccagtgcgatggaatcacaattgaacatttccaatacatttggaggaataaatccattacctggatcaaagaggaaatgccctactcgtcttaaacctaatgaggatgtggacctttcggataattttacgcgctcagtccatcttgcgcctctgaaacggctgaaggagagccctgtcattactaagtatggagtttgggaatacaatgcaggtactcctttggttcacagtccatcagattattgtgatgatgcaaatttgcacaacccaagaggttgtcttcagaactcaccttctatcgtcgaagattgtttgtcaaaaggatttgaaggttgcatttcaatgaaatgctcgttttaatataatcaggaatacatggcttattcacaatgacagtccataaacttcatgattttccagtgtgagcattctgtatctgtaattagtcaatttttgactggtaatattattggtctgtaccctaatgatgccattatgtacttgagacgaaatatgtgcaactgacgtctctgctgtaactgaagactgtaaccctttcttgtagatcattccttctaccgttttatcttgcctgataggtaatgttagaactttgtattgggcacactgcaataaaatattggcaagtgcgagtggtaagaggaaaatgcgtgacttttt

SEQ ID NO: 16221 - DNA, 2343 bp, Oryza sativa
  ref <308>: DATABASE ACCESSION NUMBER: AK066724
  ref <309>: DATABASE ENTRY DATE: 2001-12-06
gccatccccacctcctccccttcccgtcgctcgctggcttccaacgcacgcgagcctcgcatcgcatcggaatcctcacgcgatccctccgccccccgccgcggcgccggccaccaccgccaatgcccggcggcgcgcggcgccggtgaagggtgagggcgagcagcgccgtcgcgcgcgcgccccgcccgtttggattccattccttcctctccccactcacacccactgctcaatttattcccacgcgccccacgctgacgcctcgtcgcactcgtgtctcgcgtcccgtcccgtctcggcgtcgcctcgccttcgccttcgcctatttaagggggggcgatatgctcttcgccaggaggccgctcgccaccgccgccagccacctcgcgcccttctcccctcccctcctcctcttcttcgcctccgcctcctcgtcgtgctcatccgccgcgtcgccttcttcggcctcgggccctagagggtgcagtgctgtaaggatggagaccggtgcggtggagccagcatcaacaggagcaatatggtcaacgccatcagtggaacctagaaccatttctgttgggaaagagatattctgcaaccggtcactcaacatgaggaacatcactgcagtaggatttgatatggactacactcttgcgcagtacaagcccgagacatttgaggctcttgcttaccatggcacaatagagaagcttgtcaaggaccttggctaccctgaggagctgttaacatggcagtttgactggaaatatatggtcagaggattagttcttgataagaagagagggaatatcttgaagatggatcggcacaagtatgtgaaagttgcttatcatggatttagggaaatgtcaaaagaagaaaaagtgtctgcttatggaagtacattgatacgagattcctttgatgagcctgactatgccctcatagatacacttttctcattgggtgaagcctatctgtttgctcaacttgttgatttcatggataacaatcctggaaaagtaccttcaggcactgactatccgcttatgtacagagatgtgaggtctgctgttgacttgtgccatcgtgatggaacattaaagagaatggtcgcaaaggatcctagcaggtacatcaacgaggacttggccattgtaccgatgcttgaaatgattagaaaatctgggcgctcaacattcttggtgacaaatagtctgtgggactacacagatgttgtcatgaactacctctgtaggccatatacctcagatgtaagctccagtcacaaccacaagtggcttggatatttcgatgttgtgataacaggaagtgcaaagccagggttcttccatgatggtaaccgtgctggactgtttgaagttgagcctgattctggaaagcttttaaatgctgatcttcatattggaagccccagatcaggtcagcagccttcaaggccaatccacaaaatttaccagggaggaaatgttggtcatcttcacagattactttctgttgcttctagttctcagatcttatatgttggagatcacatttatggagacatactgcgcagcaagaaagtccttggttggcgcacaatgctagtaataccagagctagagcaagaggtgaaacttctttcggaatcaaaatctactcgaaaggagcttaggcatcttaggatggagcgtgattcaattgaagataaaatccatcgtcttgaatggtcactcaagtttgaaaatcttacagaagatgagaaggaaaagttattctcggagcatgacattctgctgcaaaagaaggaacatgttcgtcggcttcatcaagaggctcaaaggcaacatcatcataagttccataaagtgtgggggcaactcatgaagacgggttatcaaaactcccgatttgctcatcaggtcgagagatttgcgtgcctttacagtagtcaagtcacaaactttgctttgtattctcccaacaagtactaccgtccaagcgaagattacatgccccatgagttcgatgtgcttgggctgtaggagttctcccggtctccttgaatagattttcagcttgcatctggataggagcatgatcttttgtcctgtggctcttaccgtctaataacattgtagtttctgttaattttgtaagcaagtgtgggattaatctggtgaatgttcacctgttcttttcaagttaccgctgaaaaaagaaagcgaaaggtttgtgtaattatagtcggccatagcagatcagcaatttaactatatctttttgtacataataacaagcttatagtgaaattaaaggaaaagttcttgatgg

SEQ ID NO: 16222 - DNA, 3235 bp, Oryza sativa
  ref <308>: DATABASE ACCESSION NUMBER: AK066725
  ref <309>: DATABASE ENTRY DATE: 2001-12-06
gggttgcttgctccatgacacgacagcgcgtttgggaacgcctcgtgatctcggtgcagaaaggattccttctctgctccatttcttgcactctccactttgcattctagatcggttgggggaagaagaagaagagaagaagaagaatgaagctctcgccgtcggccggcggcgtctccgaccagccgccgtcgccgccggaagttgcagaggagcagaagtgcctaaattctgagttgtggcatgcatgcgccggccctctcgtttcgctgcctgcggtcggtagtcgggtggtttattttcctcaaggccacagtgagcaggtagctgcatcaacaaataaggaaatggagtctcagatccccaactatcctaacctgccgccgcagcttatatgccagctacataatgtgaccatgcacgccgatgcagagacggatgaagtctatgcgcaaatgacgctgcagccactcagcccgcaagagctcaaggatccattcctaccctccgagctaggcactgccagcaagcagccaacaaattatttctgcaaaacgttaactgctagtgacacaagtacacatggtggattctctgttccccgtcgagcagcagagaaagtatttcctccgctggatttcactcagcagcctccagctcaagagttgatggcgaaagacctccatggaaatgaatggaaattccgtcatatctttcgtggccaaccgaagcggcatcttctgactacgggttggagcgtctttgtaagtgcaaagagactggttgctggagactctgtcctttttatctggaatgacagtaatcagctgcttctgggaattcgtcgggcaaataggccacaaacggtcatgccatcatcagtattgtctagtgacagcatgcatattggtttgcttgctgcagctgctcacgccgcatcaacaaatagccggtttactattttctctatccaagagcaagcccttcggagtttgttataccactggctaaatatgtaaaggctgtctaccatacccgcatatcggtgggcatgcgtttccggatgctttttgaaacagaagaatccagtgttaggagatacatggggacaataacaggaataagtgatcttgatcctgttcgttggatgaactcacactggcgctctgtcaaggttggatgggatgagtcgactgctggagagagacagccaagggtgtctctttgggagatcgagcctctgacaactttcccgatgtatccatctccttttcctctcagactaaagcgtccatggccaacaggcttaccttctttatatggcggaaaggaggatgacttggcttcttctcttatgtggcttcgagatagtcaaaacacaggtttccaatctctgaattttggaggacttggtatgagtccgtggatgcagccaaggctggatagttccctacttggtctgcaacctgacatgtaccaaacgatagcggcggcggcggctttacagaacaccactaagcaagtatcacctgccatgctgcagttccagcagccgcaaaacattgtcggtagatcttctcttctatccagtcagattctgcagcaagcacagcctcaatttcagcagatgtaccaccaaaacatcaatggcaactcaatccaaggccatagtcagcctgagtacctccagcaaccgcttcaacattgccaatcatttaacgaacagaagcctcagttgcagccgcagcaacagcagcaagaatcacaccagcagcaacctcagcatcaacaaatgcaacaacagaaacacttgtccaactttcagactgtaccaaatgcattgtcggttttttcacagctttcctccacccctcagtctacaccctccacattgcagacagtttcaccattctcacagcaacataatttccctgacacaaatatcagttgtctctctccatccaatgtctcatccatgcacgatacactgagatcattcccttcagaagctgcttcagacctcccaggtgtgccaagaatcacccctgtacctgtctctgacccatggtcatctaagcgagttgcagtggaatctacgatcacttctcgcccacatgacatttcatcacagatagagaacttcgacttgacaccttctagtattcctcaaaactccacgttagcaccactgcctggaagggaatgcctggtggatcaagatgggagctctgatcctcaaaatcacttcttgtttggtgtaaatatagactcacagtcacttttgatgcaagatggcattccaagccttcacaatgaaaacagttcaagcacaattccatattccacatccaacttccttagcccttctcaagatgattatccattgagtcaaacactaactactccgggctgcttagatgaatcaggatatgttccatgttcagataatgctgatcaagtgaagcgaccgcatgcaacctttgtgaaggtttacaaatctggaaccgttggaaggttgctcgacatcactagatttagcagttatcatgaacttcgtagtgaggtagggcgcctttttggccttgagggccagttggaagaccctttgagatcaggctggcagcttgtatttgttgaccgagaggacgacgttcttctagttggcgatgatccgtggcaggaatttgtgaacagtgtgtcttgcataaagatactttcgccgcaggaggttcagcagatgggcaagccgggcattgaactcttctcgacttctgcaaggagacttggcaacagctgtgacaactacatgagcaggcaggaatcaagaagcctaagcactggaatcgcgtcggtgggctcagttgagttctgagaaatagggagctcatagcacccggcgttaggcgtccagttctgtacgtctctgtagctcttagttctgtgacctggaacccaagcacataggtcaagtgtagctctaagttatgcgctgtctggtaattatgtcatattacattgacttttagtggtacctattacattttggtatacatgccgacactttgtttcctggaatactgatcatgttaacttagggcatctaattattaggttcatgttgagtagtgctgtagtgccgcaggcgctagctttggccatattctgtatattgatgatgttttcctcctgcaatgtactgttaatgacagcaagtaaggttttccatgcaactgcg

SEQ ID NO: 16223 - DNA, 3056 bp, Oryza sativa
  ref <308>: DATABASE ACCESSION NUMBER: AK066726
  ref <309>: DATABASE ENTRY DATE: 2001-12-06
tgggcgcaaatcctcctcgccgcggcggagcactaaaccctagcgagagatgccgtcgcctgcggggggtccggtggccgtggcggcggcgtctgcggcggcggcggaggcgctggggatctcgccggagatgtacccgacggaggacgacctggcgtacgaggaggagatcctgcgcgagccgttcaagctcaaggggtggtggcgctacctcgtcgcccgcgccgccgcgccgttcgccaagcgcgccgtcatctacgagcgcgcgctcaaggcgctcccggggagctacaagctgtggcacgcctacctccgcgagcgcctcgaccacgcgcgcccgcaccccatctcccaccacgcctacgcctccctcaacaacaccttcgagcgcgccctcgccaccatgcacaagatgccccgcgtctgggtgctctacctcacctcgctgctcgaccagcgcctgctcacgcgcgcgcgccgcgccttcgaccgcgcgctgcgcgcgctccccgtcacgcagcacgaccgcatctggccgctctacctccgcctcgcctcgctcccggcctgccccgtcgagacctcgctccgcgtcttccgacgatacctccagtacgacccctcccacgctgaggacttcatcgatttcctcatctccgcaaaccgctggcaggaggccgccgaccgcctcgcgtccgtgctcaacgatgacggcttccgctccgtcaagggtaagacccagcaccagctctggcttgagctctgcgaaatcctcaccaagcatgccgatgaggttgcggggctcaaggtggacgctatactgcggggcggcattcgcaagttcaccgatgaggttggcaagctgtggacctccctggccgattactacgtcagaagaaccttgtatgagaaggcgagggatgtcttcgaagagggggttgcttcggtgatgacggtgcaggaattcagcgtggtgtttgaggcgtacacacaattcgagcagagtatgcttgcggcaaagctggaggcagccgaggaggagggtgcggggagtgagggggaagaggaagcgggcaggaagaatgggatggacaagctgtcgaagaaattcctcgcagattgctggctgaatgatgaggatgatactgatttgaggctggcaaggtttgagcggctgttggatcgccggccagagctcctcagcagtgtcctgctgcgacagaatccgcataatgtggaggaatggcacaggagggtgaaactttttgagaaggatcctacaaggcaagtagccacatatgttgaagctgtgaaaaccgtagaccctatgaaggcagctggaaaaccacatactctatgggtggcattcgcaaagatgtatgagaaacataatcgtctagatagtgctgaagagatctttaaaaaagcaacacaggtgaactacaaggcagttgaccacttagccagtatttggtgtgagtgggcagagatggagctgaggcacagtaattttgacaaggctattgagctgatgaggcaagctactgcagaaccctctgttgaggttaagaggcgagctgctgctgagggggatgaacctgtccaattgaaagtacataaatccctgaaactgtggagcttctatgtggacctggaggaaagtcttggaacattggaatcaactcgtgcagtttatgagagaatattggatttacgaattgccactccccaaatagttctcaattatgcatatcttcttgaggaaaacaagtatttcgaagatgcgtttaaagtgtatgagcgtggtgtgaaaatttttaaatatccccatgttaaagacatttgggtgacctacctcacaaagtttgtaagaaggtatcagagaagcaagttagagcgggcaagagaactgttcgatgaagctgtcaaacaggctcctccacaagaaaagaaggtattgtatttgcagtatgctaagctggaggaagactatggccttgcgaaacgtgcaatgaatgtatacgacgaagctgtaagggctgttcctaacagcgaaaagatgagtatgtacgaaatatatattgcacgggctgcggagctatttggtgttccaagaacaagacagatatatgagcaagcaattgaatctggactcccagacagagatgtcatgacaatgtgcatgaaatttgcagaacttgaaagaaaccttggagaaattgatcgtgcccgtgccatttatgtccacgcatccaactatgctgatccaaactctcatcctgaattttggaataaatggaatgaatttgagattcagcatggtaacgaagatacattcagggagatgcttcgcatcaagcgtactgtggctgctagccgcagtcagactcatttcatactcccagagtacttgatgcagagggaccagaggctgaacctcgatgaggcagttgacactctgaaacgagccggtgttcctgaggatgagatggctaacctagaaaggcaactagcgccaggaccttccacggctccaccagctccaagcactgctactgctcctgctaaccggatgatgaactttgtcagtgctggagtgcaggcacaggctgagagcagcagcaggcaacaacaggctgctgctactaacaatgaggacattgagctgcccgatgagagcgacgaggaggaagacgatgtccaaattgcggagaagagtgttcccgctgcggtgtttggagagctcggcaagagagctgcagagaacagggaggaggaaagctctggtgcccaggagaatgagcagcttggcgcccttgagaggattaagcgaaggcgtcaatgatctgccactgtcaagatgcccacaccattagctggtgcccttaacgatgttgtagctgtaacaacttgtaaacatgattttgagtggtgtttttgctcttgtacaagaatttacgggagttattaatccgttgttgatctgcgaccattttttcgtgtactaactattgggtacattccccgctttttattccctcttttaggctagaagg

SEQ ID NO: 16224 - DNA, 1070 bp, Oryza sativa
  misc_feature (82)..(82): "n"=any one base of a, t, c, or g
  ref <308>: DATABASE ACCESSION NUMBER: AK066727
  ref <309>: DATABASE ENTRY DATE: 2001-12-06
gaaacttagtcctcggtcctccctcgagctagagccatggctgccctggccctgggcgccgccgccacctggccggagcatncgtcctgtgcctcctcttcatcctcgccgccgccatgctcgtcgccctccactccctcccccgccgcgccgcccaccgcctccgccgcgcctcctccgccggctcctcctccgccgccgccgcgcagtctcgccgccacttcgcgcagggcgcccagctcctcgcccgcgcgcgcgccgccgccgcgggcgggaaccaagaagccacccggcccgctcgctcgcgcggcgctcgccgaggccgaccgcgccatcgccctcgacccgcgcgacgccgccccgctcatcctcaaggccctcgccctcgacctccagggccaccgcctccccgcgctgcgcgccctcgacgccgccctcgccccgccgctcgcgcgctccctcgagccacgggagcgcggggacgccctcgcgaagcgcgccgagatcgcgctcgcgctccaccgccgccaccgacgccgcctcgaccaggccgccgacgacctcgccgaggccgtccgcctcagcccccagaacgcccgcgcgcacgcgctgctcggcgagtgctacgagcggaagggcatggccgcggaggccctggacgccttcaagaccgccgcctccatcgacccgtcgctcgccgccgcgcgcgacgctctccgccggaccgaagggagcgatgatggcgtcgagagtgacagtgactgatgaacttgctgatgggtgaacatttctaactcttgttgtgtatctcgggtggaatgaacaaccgtcttgatggcaacaatggtaaatgtgtaatattataaggttttttgtggttggttaccttcaaacattgttacttacctcgctccattgttgtatattagtggatatgcggatttagtagaatggaaaatacccagtttacatactattcaggtgatggtatgcctgtggatttagttcagatatgctatatctgtatcttttggatttgcccccattatagttgttctgtctttttttct

SEQ ID NO: 16225 - DNA, 3646 bp, Oryza sativa
  ref <308>: DATABASE ACCESSION NUMBER: AK066728
  ref <309>: DATABASE ENTRY DATE: 2001-12-06
gaactctctctctctcatcggatcggtgtgggtttttttatggtcgtcgcctgatccctcctccgtgcgacagatcgatgacggaaggaagagaaggggaggggaggagaggaatctcgtcgtgtctgtcagtctgtcagtacaggagctcagtacaggagcaggagcgacgagagtttctgatttgagggagggaggcgcacagattttctcttctttctttcttcgtttttgttttgttttgttttgccagactttttaccaccctccccctcgcatcgcagaggagggaggagcagaggacatgcagtacctttttcgccttttgtggcgcgcgcagataatctcatgccgtcgtccatcaacgcaaaatcgcagtgcctccgatccggtccaacgctacgctgccatggatatgcgactgtataggagctgtacatcactaggagctctactgatcctgtaaatttctgatatgatataccacatgctctagcgacatgcgttaatacgctacgttttcttcttctttcccaccccaaacatatagtatatttttaagagagatacactggttctattttccccccatcattaaaatacttagtgctactgcctatatttgttgttggcttgtaagcactgctcgatccttctccaacttatttatacaaattgtggggcatcttttattttgttacgataatgctttcatcatttttttactatatatattaaatataattttcgagaaacaatattaatgtatttttagttttgtattcataaatactttcttctacttataattttgtacacaaatattataatatattaccaactacacagagtaatagttgatcaaagcattgtactggcgaaacaaaatatatgccctataactaaacttgtacggagtaacttgtagtataactttattttctctgtaccctccagaaaggtgaaatcgacctatgcatgccatgggagcactataagatgcacaccaatcacttgcacacggccttgtgaataaaatcttatttctaaattcctctttgaagttgccctaaggattcatgtgattttcttgcacaattttcttagctttctattcaagttacattgaactacaaacatgttacaagtggctgggtgaaaaataacaacatgatacatactttttttggggggtgcacttatataagattaatttatgaagaatgacaagacacaaaatgcaaacttattcttagaagattcttgccatgctatgccctgcttgaaccattgaattataatatggaataaaaagtctatccaacagttgttggtggtattgcttacgtggctcacatgttagctcattttactcaagccgagccctttcctcactaatcagtgagcccaggaatactatacattaacacacttctttttcatgctgtatgacttactgaatttttttttatcgaatccatcaccatttcactatcacttgtcatagtccacatggccaagccactatggagctgttcgaactgcttttcatactttagtggattgaatactcagttctatttttttcatagtttagtgggttgaatacttggaccattgattcagattgggcaatttctcctttcccaagatcatcctaatgccctctgtaatgaattctgttttagcagcctctttatgttgacaccgtaatcattttagcagcctctttgtactgacaccatagttttatttccattctattcgttccatatcactacaaaatgttattgaatttgagatgaccattatttatctttatcctctttacaaagagaagttaggcagcctgtgcagattcgtagtactaggaaatatcccatccagtcctggttcttatattttaggacggagggagtatttgtcatttttgcctatgtggcatgccagtctggcaaactatttgccattattaatataaatcatctttcatacactatataagatatttttatgctattatctcttgtataagcaaatttctctcatataccacataaaaatattttttttctaaaaactaaatataccagaaaaaatttaaaacatgtatacaaacttccatattttgtaacaaggcggcaaggccacacaaaaaaaattatatattttttgaaacttctaatgaaataaaccaattgttaatcttgtatgtctctaagtgtattttgggtatttttgaaaagaaggcccaatccaatggtgtattgtaaaacaactgataaagtcgttggtatattatagaaagagacaatgtcaatggcaaattgttaaactcgaacaaactcagtggtatataataaattctctctaatctaatatgcaacggatgacatgtgggctccacatattagtgtgcaccacaaaaaatttttaatgaaaaatgggtcccacataagcgctacatcaacgccatagatcaggtcaacactgccacgtagacgccacgtcagtgaaaccgccctccaaaaccactaaggatgcgttcattcccagccgttcccaactccctcttctcgttttccacacgcatgcttttcaaactgctaaatggtgtgtttttttaaaaaaaaagtttttatacaaaagttgcttaaaaaaccatattaatccatttttaaaaaaaatagctaaaacttaattaatcatgcgctaaacgctgctttgttttgcgtgtcggctcccgaacacagcctaagagagtaaaattgcatcagttttaataattgggtgtgtgtgtgaagatatccggtattgcagtcatacgaattagattgggtcactggtgtcaagggagtcaaagtgaacttagtctttatttatttattatcactggccttcgagaatctcggctggactaaatcggagactaaggccgacccaagtcgaacgcaacccaaacaaaaacgaatctggctaaccctaactctagcaggcgacatcgaggtcgagatcgagggatttatggcgttcccttgagagagaagctgacgaggagcgcgcgccatggttcccagatggccggcggctacggtgttgagtggtttcaagtagtgtatgggaaggcggaacaagcatcagccgttctgtcacaacatgatctggttagagaaagcggtgagagcttgatccttgagcgcaggaagaagattggcacacacaacataaggcatttgtggatggttgctgcatttgcaatgtctggctaccttttcggtgctggggtcgctacccttatcaaagggaacaacagacgaacacctgaagcggcaggaactaaggaagatacaacagacgaacactaggagcggcaggaactaaggaagaagcttggacgactagaagagtaatagtactcaattccaaatggactggaaatgattctgtaatcaaatgcctctaacaagctgtggtaaccttggaccgtctatgatttaaatcgttgttgattgggacctcccttttatatcatgtaacttagctgctgttgcgagttctctgaaatgcttgtcacttttttttaattccctcctgaatcctgaatgatggtcatcagaatgtcataaaggaagtggttgattctctc

SEQ ID NO: 16226 - DNA, 1011 bp, Oryza sativa
  ref <308>: DATABASE ACCESSION NUMBER: AK066729
  ref <309>: DATABASE ENTRY DATE: 2001-12-06
ggcgagtaacatcgaacaatcccgcgaggcggcggtgggcggcggaggctcacttcacttcctcctctcgccgccgatcgagaggcgctcgaagcaccggatagcggtgccccccttcgctgccggcggcgacctgtcgtccgcggcggccgagtggtggtggtggtggtggtgccgctgggcggcggcgggggacgggcggttgctgccgctgccgctcgacacccaccggccggcccggttctgctcgccgccgtcgcctttcgaggatgtcccccggctagacggggtggcggcggcggcggcggtgggcatcttcgccgagctcctgttcctggatatggttcgtgttctctccgaatcaacaacctgattcacacgaaacaaagtgatgaaccaaaggaatccgcgaggcttttgtgcctggaattgtctccgaggcgaccggaacccgggtttcttctggcgaaggcctcaacagcaccgggaacgacagtagtggaaatatgaggtgaactctgatggataagatttgcacagaacctggtgaaaacaattttagtgcatatgcatctaggagttgccaataatagaatgacgaacttcgtgatggcaagcatcagtacctctgctggggtgtgtttggaggtatggcttattcgtgacacgcatccaaaaagcatggtttctttgaaaacattttgtatcagcgttgatcatgcaataactttctctaataatctactacctctgtcccacgatataagaagttttagagtgttggacacatttattaagaaagtaggtaaaattaaatatgtaaagattgtgattggttgagaagtggaagtagatgagaaaagtgaatgatggataattgtgattggttgggaagagaatcttggtgaagttatattttgaggcaaattgtaagtgattaaagttgttatattttgggacggagggagtatttgttagctttatagctttgtaatagtacttaattaatcc

SEQ ID NO: 16227 - DNA, 788 bp, Oryza sativa
  ref <308>: DATABASE ACCESSION NUMBER: AK066730
  ref <309>: DATABASE ENTRY DATE: 2001-12-06
ggccgtacaccatttcgttccgacgcgagtaattcctccccacgggcggcgactagggcggctagggttcgtcgggcgccgccgtgccggagatcgcctctcgccgccgacacccggatctccgccgccgccggtcgccccaggttatcccgctcccgcagtcaccatcccgtcttctccgccagtcgcctcacgcccggcctggacgccacggaatccattgtcggtctcgccccgccgactgccgttgacgccactggctgaaggtgtgaatatgtcggacagtgcgttgaaagatctgaatctagctcagtgctgggacttcacctgtgactttgaaattgattatggatccgaggaacgcgcatccatagtttacaaaacgctagctgttgataaggagttgcaacctgacaaggtaaagagggagatgtctgtttctggtggcaagctcgtcgtgcactttgaagctgtagaggctcggttcctgcgagcatcgttcagcgcgttcgtcgatcttacagtactggttaccaagcttgttgaagaatatggcatcagcaaggaaggagaaggcagtatctagctagttttactcccctgtatcttagaaaaatgttttacaacacctttgagcattcataccttcttttatatcatattatgtgtgttcttcgtttcttaggccagaaatctacaagatagaagcagctgttgtaattccagatatcttgaatcttggtatgggatttgcctctcaagagtaactctgaacatacttggttggg

SEQ ID NO: 16228 - DNA, 3245 bp, Oryza sativa
  ref <308>: DATABASE ACCESSION NUMBER: AK066731
  ref <309>: DATABASE ENTRY DATE: 2001-12-06
gtctctctcctaataaaagagaaaaaaaaaacccaagaaaaataagagagagaaactctctctctctcatcacccacccaaccaagccaccccctctctctcttccttgcaagcatccatctcatcaaaggccaaaccctcctcctctccccaacaagaacaacaaggaggcgcgattcacgcgaacaatcacaggagggggagagaaggggagaaatcatccgctcatctcccaaaatcctccaaaaaaatccatctttatcccgaaaagatcctccttttcttggggtttctgacaggcgtgcacggctatctttaggcgttctcggcctcatctctcgtggaaaggttcttcttcttcggggttgtttgctgctgcttaatttgaggaggaaaagcccaattcttgtggggatgaagggagggaggaggggggcatggcggaggagggggaggagaggcggcggttctcgaatcttcgcggcgtccggtggcgggtcgatctcggcatcctgccggcttcgccgggggcgtcggtggacgagcaccgccgcgccgccgccgattcgcggaggagatatgttagtttgagacgacgtcttctggtagaccctcatgttccgaaggaggagggcagatcatcaaacctcattgtcgacaacccgctatctcagaaccctgatagtagctggggtcggtttttcagaggcgcggagttggaaaaaaccgtagatcaagatttgtctcgtttatatcctgaagatggaagttactttcaaacgcctacttgtcaggccatgctgcgtcgaatactattgatgtggtgccttcagcacccagaacatggataccgccaaggaatgcatgagctattggcccctctagtgtatgttcttcaagttgacattgacaaactatctcaagtacgaaaattgcatgaagattgcttcaatgatgattttgatggagttcctttcccagataccgatatggttttcagctataaacctagaaaggacccaaaatggagttttggagctgacaatcagaatgattctgaacgatcttccaaaagtaacactcttgatgagcttgatccggacacaaaagaaataattttacttagtgatgcatatggcgcggaaggcgaactaggcattgttttgtcagaaaggtttatggaacatgatgcctattctatgtttgatggtttgatggatggaggtagcggagtggtacgcatggcagagtttttctccccatcctctgttggatctagctcaaatctaccacctgttattgaagcctcatcagcattatttcatttgctctcaattgttgagccaaccctccataatcatttcattgagttgaaagtggaaccacagtggttcgcacttcgttggttgcgagtcttgtttggacgagaattctgcctcaatgatcttttggtagtatgggacaaagtttttgcttgttcaaacaatatgctgctaagtagtgatgaggaatataactttcgtatcttgtgttcagatagaggagcatttattgcagccatggcagtttctatgcttcttcatattaggtcgtctttgttggctactgaacttgatgtcttctgtcttcagagattattaaattttccaacgaatattgatgtgcagaagctaattgagaaagccaactccctacagtctattgcaattgatgcgaacacttcatcctcatctttccttttaaagagggatagctatgagtttgacagagttcacagcaatctctcttcttcaactcctccgagaactccattgcatcctgtttctgagagttactgggaagagaagtggaggaatgtgcacaaggacggaacaacccccaaggaggttgagaggggcaattcttttagtaaacaattaaagaaatctttgacccagaagcttggtttatctaggacagagtcagatccttctccagtgaaggtcctcagtgtgagtagtaatgatactcggaattcagtaagacgttgccttctgaatactttatcagatgatttggattgttctaatgaacttgccgggaaaactcaggaagacgaattccctatcatctcagttcacagggagcatcctctgagctctgcagagccttccaagttaaaggcagctggtgaaaatgtaactgtgagcgcatcatgtgtggcaaaactcagccctctaaaaaaatctgtggttgagccagctaatgagaacgcaacacaggggacaaagtgtgtaccagaagcttgttccagcggtgagaactctccagtgttctatgcagccagagccagtgctggtaatgaacctttgaatggccaggacacggattctgagagtagcagtgttacctcaaattcctttgctggtgaccatgatagggatgaaattctgaaagatgagccatccagctctaatgatgataacaaaaccatccaagattcagaagcagcatcttctgataaaagtccagaccgaaatggaacctctgagagggctgtcgtttctaatgaaagaaagccattcattagtaaattccagtggctcttgaagttgggaagaccttcggttgaaggcaacatggagaagagtagtggagagacatcagctgataaacaagacggggacacatcctgttctccttctgatgggaattcaaataactcccgtggtagcgtaaagttggcttctggtgataaaaaggtcatgggcagcctaaagaatcttggacaaaacatgcttgaaaatatccaggtgattgagtcggcatttcagcaagaccgtggtcagcctggccctgtggagaacttctcaaacaacattcttggaggcaaaggacaggtcactgcaatggctgctctgacggagcttcgcaagatcagcaatctgctgagcgagatgtaacagtgtaagatgtatcgcccattctttcccagctttctagctcagctaaggcctggtagtaataagtcaggtacctaggtctttttcattcagcagtgcttggcactgcttgaatatgtatatatagattcgattcgattccattccattgagtaaatcatgtaagcattgtacgaggatcacccgtggatttacctggcgcgtgatgagggagtagttctctccggcattaggaagctatctaatgatggatgaaattttgtaagataaactttttaaggaagaataagcagaatatgttgc

SEQ ID NO: 16229 - DNA, 2545 bp, Oryza sativa
  ref <308>: DATABASE ACCESSION NUMBER: AK066732
  ref <309>: DATABASE ENTRY DATE: 2001-12-06
ggcggctagggttttagggttttttttttcccttctcctccccattcgccggcaagcctccgctcccacgcggcgacggtctcctcccatggcgaagaagggcgcgccacgcaggcagcagccggcgccggcggcgcggcaactggccgtggcgaagaaggggaaggcccccccgaaggcggcgaagagggcgccgaagaagaagcaggagctgctcgagccgtcctccgacgactccgagctggagcagcagcaggagcggctccaggaggtggaggaggatgagtcagggtcggacctcgacgcccccccggactccggcgccgaggagctctccgactccgacgatgcctccttggagggaggagacagcggcgacgaggaggacgatgacgaggaggaggaggaagatgacgacgaccccctcgctgacgacttcctcgctggaagtagtgacgacgaaagtgccgaaggagatgactccggagtggattcagatgagtctgacgaccttgaggctaagtcacgagcaattgatgaagcgaaggggaaggcagaagaagaagctgaggaggaactcaaactcaatattagatcagaatctgatgagttccgattgcctacaaaggaggagttggaggaagaggcacttagaccaccaaacctgccacatcttaaaaggaggatatcagaaattgtccgggtactctcaaactttagtaagctaaggcaaaaagatgtgccgcgaaaggattatgtcgatcaactcaagactgatgtaatgtcatactatggatacaatgattttcttgttgaagcatttattgagatgttcccagctgttgagcttgttgagctactggaatcttttgagaaaagaccacctgagtgcttgcggacgaatacattgaagacccggagaagggatcttgctgctgctcttataccaagaggatttaatctggatccgatagggaagtggtcaaaggttggtctggttgtatatgactccaccatttcagctggtgccactgttgaatatatggctgggcattatatgaaacaaggtgcaagttctttcttgcctgtgatggctcttgctcctcaggagaaggagcgaattgttgatatggcggctgccccaggtggcaagactacatatattggagctcttatgaagaatactggaataatttatgcaaatgagttcaatgagaaaaggttgcatggacttttgggcaacatacatcgcatgggtgttaccaataccatagtttgtaattatgatggtaaagagctacccaaagttcttgggatgaattcggttgacagagttcttttggatgcgccctgcacaggcacagggaccatttggaaggacccacaaattaaaacatcgaagggcattgaggacatcagagactgcgcttttgtacaaaagcaactcctgttagcagctattaatttggttgatgccaactccaaaactggcggttacattgtttactcaacctgttcgttgatgattccggagaatgaggcagttattgactatgcccttaaaaagcgaaacgtaaagcttgtgccttgtggattagattttggacgtccaggattcatccggttccgagagcatcgattccatacttctttagataaaacaaggaggttttatcctcatgtgaacaacatggatggattttttgttgcaaagctgaaaaagttgagcaatacaatcccagtgacatccgagtcatctaaagtgcctgaagaagcaattgagaagactgatcctagcagcgacgatcttcaagaacagcccattcagtcaaaaatacacaaagatgtgaagaagatgaatgaagagacaaccatccttgatggggtgactgaggacaaacaacagacacatgataggcctgaaaagacgctcaaaaaccataagaagggtgagaagaaacggaatggccctggcagtggtaaaaaagaaacacacaacgaaaaagaagagcctacaagtgaaaaaaagcagcctgtgtctgctaaaattaaaaaaactgttcccaagagaacatcaggagccaaagaaaagaagccagatactgaccaaggagggaagaggaaaaggaactggatggttaggcgagaatgggaagcttataagaagtcgaggagtaaaaaggtatgaaaagcacgggtgaaggaactctagctgtagacaaattattgcagtgaaatttgataaccccatgagggaagatgtttaaaaggagtaacaaaactctagccgtagacaaactgcagtgaaatttgataacctacatgcggggaagatgttcaagaagagacaaaacacagttttgccgttggttatgttcgtggtgaaggaaaaaaatttgttgtactagaagtgatcgtgtgtaattttaccccttttccgtcttggtttaatgtatcaataacttattttgtcatgacactaacgcaaactctcagagatgagtgttatgaacatacgaggggagagagagatgtgatttacttc

SEQ ID NO: 16230 - DNA, 3961 bp, Oryza sativa
  ref <308>: DATABASE ACCESSION NUMBER: AK066733
  ref <309>: DATABASE ENTRY DATE: 2001-12-06
ggtgccgaaacgccgcctccttcaaaccgctcctcccctcccgcctccgggccaagcccctcgccggcatctcctcctccccacgccgcaacgtgtccgcctccgccgcctcctcccagtcccgccgcgacttcctcctcctcatcccctcgctcgccgccgcctccgccatcctccggccgctcccttcctccgccgccgatggcgaggcgcctcccacggattcatcctccccctcgccgccgtctgcggaggaggcgggggcggtggtggaggaggtcgacgagtcggcgctgtcgagggtgtacgatgccacggtcatcggggagccggaggctgtggggaaggacgcgagggggcgggtctgggagaagctgacggccgcgagggtggtgtacctcggcgaggccgagctcgtgcccgaccccgacgaccgcgtgctcgagctcgagatcatgaaggggctcgcgacccggtgcgcggaggccgagcggggcgtggcggtcgcgctcgaggcgttcccctgcgacctccagcagcagctcgaccagttcatggacggaaggattgatggtagcatcctaaagttgtacacgttgcactggccacaagaccggtgggaggagtatgaacctcttctgaattattgccgtgataatggaattaagcttattgcttgcggaactccacttgaggtgaaaagaactgtccaagcagatgggattagaggcctttcaaaggcagaaagacaagaatatgcccctccagcaggctctggcttcatctctggcttttcatctatctcaggccggtcattgatagacaaaatttcatcagctcgtgattctccttttggtcctacctcatatttatcagcacaggcaagagtagttgatgattataccatgtcacaaattattctgaaagagcttaatggcggggatacttcaaggatgctaattgttataacgggtgcaagccatgttatttatgggtcacgaggaatcggtgttcctgccagagtatctaaaaagatgccaaagaaagaccaagttgttgtactacttgatcctgagagacaaagcataaggagggaaggtgaaatcccggttgctgacttcttatggtattcagcagctaaaccttgcagtagaaactgctttgaccgtgctgaaattgcacgagttatgaatgctgctggtaggagacctgaagctttgcctcaggatcttcagaaaggaatagatcttggtgtagtttctcctgagatactgcagaactttttcgaccttgagaaataccctgttatgtctgaactgattcacagattccaaggtttccgtgaaagattgctggcagaccccaaattccttcaaaggttggctattgaagaagctatatcaataacgaccactctattagcacagtacgaaagacggaaagggcgatttttcgaagaaattgattatgtactcaccgatacaattagaggctctgtggttgatttctttacagtgtggcttcctgctcctactatttcagtcctttcttatgctgatgatggttctggtgagagtttggagttcgtcaaaggccttttaggatcattgccagataatgcattccaaaagaatgtattgggtcaaaattggaatatgaagcagagagttgcagcagtgttagttggtggtttgaaacttgctagcgttgggtttatttctagtgtgggggctggagcttcctcggatctcctgtatgctgctcgaggtgtgctgaaatcttcagtgaatgcagaagcaggacggaagagatctcctatttggaagtcagcagctgtttatagttgctttcttggaacgtcagcaaacttgcggtatcagatcattgctggtttagtggagcatcggctaggagagagtctagctactagctacaatcagccacttcttgctagtttgttgtcctttgtggcaaggacagtgaactcatactggggaacacagcagtgggttgatcttgcgagatatactggactacaaaaaaccaaggaagttcctcctgttgaggccacagcaccacctgctgaaacgtcacagttagccacaccgcccgctgaaacatcacagttagccacaccacccgctgaaacatcacagttagaggatggtagaacagaagtacaaaatttggatgacaacagcaaccaatcaagtggttgaacctagtgatttggttacttcacaatgccttcaaagtacataacgatatagctaggtttgtatcacaattccttagagttagggagtacatcacttgttaacccccaacacagtacatgcatgtactgcttgtgattttagagtaaaaattggaagggggacacttgcagtcttctgaggattgcagcaacaaccgtttttcttctctgtaattcaaaacaggttgtaatttagtaggatcgcatactgtagaaagtttggcaggtttgcctgttgcaataaaatctttccgcctgctatggagccagatgtttcagtgtttgcagattttatcgtccgacatcgccctggtaaagatggtaggcaagcaagtccctggatactaatgtacgtggcatctcttccttgaactctcttcctatatatggaagttttgcatccacctcatctttagttgcgaagaaagcagtctagaaaggtgaagatagctaaacggtgtgacaagcaaggtaatagaaaggcgcgatcatggcgagtgccaaggcgatggcgcaggatgagcatcactttgttctgaagagtggtcatgccatccctgcagttgggttaggcacttggagggccggctcagatactgctcactccgttcagacagccatcactgaggctggatacaggcatgtagatacggctgctcaatatggaatagaacaggaggtcggcaaagggcttaaagctgcgatggaagctggaatcaacaggaaagatttgtttgtgacgtcaaaaatatggtgcacaaacttggctcctgagagagttcgaccagcattaaagaacacgctgaaggatctccagttggattatatcgacctttaccttattcattggcccttccgtctaaaagatggagcacaccagcctcctgaggctggggaagtcttggagtttgacatggaggcagtatggagggaaatggagagacttgtgacagatggactggttaaggacattggtgtctgcaatttctcagttaccaagctcaacagactgttgcaatcagctaatattccacctgcagtatgccagatggaaatgcaccctggttggaagaacaataagattttcgaggcctgcaaaaaacatggaattcatgttactgcctactccccactgggttcttctgaaaagaaccttgcgcatgatccagttgtcgagaagatagccaacaagctgaacaagactccaggtcaagtgctcatcaagtgggctctccaaaggggaacaagcgttattccaaaatcaactaaagatgaaaggattaaggagaatatgcaggtgtttggatgggagatccctgaagaggacttccaggtcttgtgcggcatcaaagatgagaagcgagtcctgacaggagaggagctcttcgtgaacaagacccatgggccatacaagagtgcatctgaggtctgggataacgaggactaagctgccatgtttcacccaaagatatggcaaataatggttatgatgttggtcatgcacgaaggagttatgtgatgttctccaagcactgtgacgaaaccagctaactcagcacaagatgtactactatgtgtaaaactagtattgttctatgtgtgctcttcttcaagctttgtgtaaccagcttctcagcacaagatgtacagccagtgctgtaagataaataaaagtatcatggctttgccgttgcacttgctact

SEQ ID NO: 16231 - DNA, 1550 bp, Oryza sativa
  ref <308>: DATABASE ACCESSION NUMBER: AK098965
  ref <309>: DATABASE ENTRY DATE: 2002-08-28
gggtaaaggtagacgacgagagctaaagaaatctggcatggcgccaccggcaccggccgctctcctcatcccctccaaccattcctatcgcccgctcctgcctcgcccaatcctgctccacgccaccggcttcgcctgcgcctcggcctcgccctcgccgccccctcgccttcgccttcgccttcggcatgccgccccgctccgtgccgccgccctgccggccatcgccatcgcccccggcgaccactggggcaactgggccttcctcctctccgccgccgccttcggcacctggtcggaggagtccacgtcgtggggcgccgcgctcagcggctcgctcgtcagcatcatggccggcctggccgccacggccacgggtctcgtcacggccggcgcgccggcgcaagacgccgtcatggactacctgctgccggccaccgtcccgctcctgcttctcggcgccgacctccgccgcgtcgtcagcaccaccggcgacctcctcaaggccttcctcatcggatcagttgcaactacaattggcacaacgatagcctttctgttggttcctatgaaatcactgggtcaagatagctggaagatcgccgctgcgctcatgggcagctacattggtggagcggtgaattacgtcgcaatctctgaagcacttggcgtttctccgtcagtgctagcagccggtgtggctgcagacaacatcatctctgcactctacttcatgaccctcttctcgctggcagccaagataccagctgaacctaaaactgctcaagagggtagtaacggcggcgagtctgagggcggaaggcggatgtcggtgctccatggcggcgcggcggtggcgctgtcgttcgtgatctgcaaggccgggtcggccatctccagccagctgggaatccagggcggcaccctgccgtgcgtgacggcgctggtggtggcgctggcgacggcgttcccgcggctgctggggaagctggcgccgtccggcgagaccatcgcgctgatcctgatgcaggtgttcttcacggtggtgggcgccaacggcaacctggtggacgcggtgaccaaggcgcccagcgtgttcgcgttcgcgctggtgcaagtgaccatccacctaggcatcgtgctcgccgcagggaagctgatggggttcgagcggaagccgctgctgatcgcgtccaacgccaacgtgggcgggccgacgacggcggcggccatggcgacggccaaggggtggagctcgctgatcgtgccgggcatcctggtgggcatgttcgggatctccattgccacgtttgttggcatcgggttcggcatgtttgtgctcaggaggatctgcggcgcctaaccaatctatagtactaacaattcaattggtttatatatagctgtgatcaataaataataatggaggagtagtagcaatgaagaatcatgcatgcatttcaatgaaaagtgtaaacattagaagaagaagaagaagaagaagaaaatactgtattatttatcaagagtaatactattattattagaag

SEQ ID NO: 16232 - DNA, 1257 bp, Oryza sativa
  ref <308>: DATABASE ACCESSION NUMBER: AK066734
  ref <309>: DATABASE ENTRY DATE: 2001-12-06
gtcacgctcgcctcctccctctatccccgactcgaccaccaccgccgccgcgcgccatcgccgtcgaccaccaccacccatggcgttcgcgctcaaggcctcaactgcctccgccgcggcggcgtccacggcctcggcctcggcctcgtccctgtccgtggctgcggccgcgcccgggaggcgcggcggcgcggcggggagggtctcgttccgcggggtccctgctcccatggtggcgatcagggcggaggcggctgccgtcggggaggacgagcgcgtcatctccggcaccttcgccaagctcaaggagcaggggaagaccgcattcattccattcatcactgctggtgaccctgacttggcgactacagcgaaagcgttgaagattcttgatgcttgtggttcggatctgatcgaattgggcgtgccttactctgacccattggctgatggccccgtcattcaggcttctgctacacgtgcactatcaaaaggcaccacatttgaggatgttatctctatggtaaaggaggtgatacctgagctgtcctgccctgtagcgcttttcacatattataacccgattctgaagcgtggcatcgcaaacttcatgactgttgtaaaagaagccggtgtccatggtcttgtggtacctgatgttcctctggaagagacaaatattttgaggagtgaagctgctaagaacaaccttgagctggtgctactgacaacaccaactacaccaacagaaagaatggagaaaattacaaaagcttctgaaggatttatttatcttgtaagcactgttggagttacaggtgcacgtgcaaatgtcagtggcaaggtgcaatctcttctccaggatatcaagcaggtcacggacaaagctgtggctgttgggttcggtatatcgactccagagcatgtgaagcagattgcgggatggggcgcagatggtgtgatcattgggagcgctatggtgaggcaattgggcgaagctgcttcacccgaagaaggattgaagaagctagaagagctagccaagagcctgaaggctgcattgccctgaaacaatcagttccatgaggaaagaaaatacagtccatttttttgtagtcaggtttgaagcatagtattgggagcatgacttttgctattggggttttcggggttactgttgtctgttgaaaataattaagtcattgtgttagttgcttgaacgaataaatcaaggtaagaatgatactaaatgttgcg

SEQ ID NO: 16233 - DNA, 3042 bp, Oryza sativa
  ref <308>: DATABASE ACCESSION NUMBER: AK066735
  ref <309>: DATABASE ENTRY DATE: 2001-12-06
gaccaagcccatctggacgctcaccggagatggccttcgccgtcgcgccgccggtagcgccgcctccaccttctcccgcggcggcatgggggaggcgccgcgcgagggcaactcctccgcggttcgcgctggcggcatctaccagagacggcgacccggccccgccgacgttcgagcggctgcgggagcagctcctacagctccacgcagaagccgacctcacccaatccaaagcaaatagcacgagggtaaggcttgtgcggttgactgaggctgctgagaatcttaagaaaagagctgcggtcagcatccgaatgggcaaagagaatgaggcagtggatttacttgtgcaaaagaagaagctgaccaaagctcttgaaagcataaaacagcgcattgaggtgcttgataagctttccatgaaaatcagtgaggcaatttcagtgaagcagaacatgttaattgaacatgcattgcatccagggatgtctaatggcaaagaatccaatgacaacataagagttttctctagtaaagttggtgatgaggctgatgagactactagctctcctgcgaaatcatctgaaaaggcatttgatctgcaacatgtggtgcattcaggcatgactggccagttggagcaaagtgaacttcagacgtccgatagcttctcattttccagtgatcttgaatcaccaaacagcataactaaccattcttcttatgatgcttttctagaccatattggttttcagctggattcattagaatgtgaaattgaacaatatatcgtttcccaactagcagaacaggtggacattcagaagccaataaatgccaagtggcaaaaattgtctgacgtattgaagcttgtaactgaaactagagaaaggattgcaaagattgtggataatacagtaaaggaggctggatctgaggactgaggtcatagcgaagtatataaagcaatgtattgatgacatcaaaccctgtttcttttatttgtaacatggtatatggtttcatggaaaatttgtgcaataccttacagaagcatcatggtctaggtctgcagccagtggctcattgtccattttcttctggaggatccattttgtagtttttcggttccttctatccatccttagatctgttaggaacaggaaggccttggcaactgccaaagtgctcactaacaaacacactgttgcagagagccttcctgctggtgttgagaagccataatccccatatccaactgttgtcacagaaatgactgataaatagaagctatcaatccaatttagaccctccacctcatgcactatgattgtacaaattgagatggtgcctacaacaacccctaacgcaagtagtactttcatcctccctcttgatcttttcttttcagcatcaatcatataggtgtcaaataccctattaagcttgttatcatccattgtgctaagtaagactgttctctgcttgtcaagtacatttgtcaacagctcatttagcacaatgtcaacaaagcgaacaccgattagtagaaacaagcatgtgaacacctttgtgaaggtagtgcaagggactatgtcaccgtatcctatggtgcacaagcttatgatggtgaagtaaaggccatcaactaacttcagtgtggacctccccttgaagccttcaacatttgtgatgtatacaaggactcctattgagatgtacaagatgacgctaacgatagcctgccttgcaaatgatggtacgtgttgtgcagcatggctttgctcattgaactcatctgcacagggagtttatttgattgatgtgaacatagaaggagaagaatgcacccgctggaaattttgtgcggtaactatattgccatttccgctagtatgtaacggatgattgggagtattggggttacctttgctatttgtacttgggtgaaaggaagtcacgaacctgtttgggacatcggaggattttcttctgtcttgtcttgaagagtatacttgatcacggtggactacaggcagcaggtgctcttccatggtagacatgttagatcttggattcatcagctcacagcttgcagttctcaggactgtactcatcaatttatatccatggcagttctgctgtgatctcggtgatggaattggtaaccacgagatggtcgtcaatcaaggatgtacacttacctgctctttctgggttgaaaggagtgtatcaaatctcaaaacatatctttcttatttattgcaacatttatatcacgtagtttccagtatattgcatagtagctgatacaagaggcaattgatgaaagggaaggaaaagacggatatcaagattaacaatggcttgttagcattctgattttgcaagttggccttcccttctctgggatgatccattgacataaaggcaatgccatattctccaggactctgttctacaacaggggttgcctttttctggatgggaacatgtcagtttcttgcggctatgagatcttattgccggtgagggaggtaaatgctgcgccgacggaaaggttctcaagctggggatccctgtttccgtgtcatctatgtatcttcgagctgtctttttctgacggatcttgactggagtatcttgtccctgatgatcagtctctgcgtgacactctgaagaaaaggctgtgcagatgaaaactgtaagaccttgcctagaggctagaatataaccgagcactggagtattttagagaaccgggcaagcaagcattcttcagctttccagcttcctggcataaatgttgatgaatttgtcgccatgaatatctattagcccctaacaaacttatctagcttgatcatctatctcgttgattaagacacagtttccacctggggaccgtgtgatcgacggagtcctgaaatttgttactgaagcagtcaagcagaggatgtaatactgtgctgtaaccagatcttcacgttgttcgctagaccggcaaaccggcattactacatatggtctgattggaatttg

SEQ ID NO: 16234 - DNA, 2822 bp, Oryza sativa
  ref <308>: DATABASE ACCESSION NUMBER: AK066736
  ref <309>: DATABASE ENTRY DATE: 2001-12-06
ggccaaagcaaaaatcctctcccatcttccatctctctttccctaggacgcgcagcgctgtttattcctctccgctccccttgcttctcgcgcacactaaccaatccgagcatctcgcctcgccccgccccgccccgatcgatcgactcgagcgccaccccacgccgccgcccccgcgccattggccccagccgccgggaggcattcgtctgcgctgccccgcggcggtggcggtgacggtggaggtggaggcggtgtggcatgatcgatagaggagtcgggagaggcggcggaggaggagggggaggaagaggcggtggagatcgctaggagtggtggtggtggtgggaggaggaggcgatgaaggcgacgcccccgccggcgaagaggcggaggggcccgcggctggcggtgctggcgctcgtcttctgctcgctgctcgtgccgatcgccttcctcttcaaccgcttccctgccgtgtatgtgacggatgagcgcccccaacaggagattgatttgccttcattcggacgcatggggttggaaaggggcggtggagtaaccgtagtgaagccggaagatggcagtggtgctaacgcagagacaaaggatacacctgagatgattcacaggggcggtataaactcacatcaccatagtgataatgtcccttccaaagttagtgctaacccaaaagtcccccctccaccaaaaattgaaccactgaagccaaaggcaaagtcagtaccagttccagttcaacgtacagaagttattagtggcaataacatgaaacctgccaaagttcaaaatgcggacgatgtggaaaaggctaaggcttgtcagcttgaatttgggagttactgcctctggtccatagagcacaaagaagttatgaaagacaccattgtgaaaagactaaaagatcagctatttgtagctcgctcgtactacccaagcattgccaaactaaaaggaaaggaggcactgactcgtgggttgaagcaaaatattcaagaacatgagagggttctcagtgagtccattgttgatgctgatctaccatcgtttatcaaaagcaagatagagaagatggaccaaacaataggaagagctaaagcatgcactgttgattgtagcaacgtcgacagaaagcttcgccaaatacttcatatgacagaggatgaagctcattttcatatgaagcagagtgcatatctgtacaatcttggtgttcacacgatgcccaaaagtcatcattgccttaacatgaggttgacggtagaatattttaagtccgctccattggattcagatgactctgctgtgcataagtttaatgttccagaccataggcactatgtcatattatctaaaaatgtacttgcagcttctgttgtcatcaactcaactgttagtaattctgaggagaccgaaaatgtagtatttcatatattaactgacgctcaaaatttctatgccatgaagcactggtttggaaggaactcctacagggagtcagctgttcatgtcataaactatgagcatattattttggagaatttgcccgagttcagctcccagcaattatatttacccgaagaatttcgtgttttcatcagtaatcttgaacgacctagtgagaaaaccagaatggaatatttatcagtgttcagtcactcacatttcttcatcccagaaatattaaaagatttaaagaaggtgattgtgttggatgatgatgtggttgttcaacgtgatctctctttcttgtggaatattgatatgggagataaggtcaatggtgctgtcaagttttgtggtctgagaatgggacaactaagaaaccttctgggtaaagcaacatatgatccgcagtcgtgtgcttggatgtctggggtgaatgtgattgatttggagaaatggagggagcataatgtcacagagaattaccttcaactactgaaaaagttccaacacaatgatgatgaagcttcagtgcgagctgcagctttgccaataagcttgcttgcctttgaacatcttatatatcctctcgatgaaagattgactatatctgggcttggatatgactatgccatcaaagaggaacttgtccggaattctgtatcattgcattataacggtaatatgaagccttggcttgagttaggtataccggactacaggaagtactggaagaggtttcttacacgagatgaacgattcatggatgagtgcaatgtaagtccataatgcacttaaacctgggaaacaaaatatctgacggtagattgctacgtctgctgctgtattatatacctagaggggacgagcacttccattgaggaaaaatggggccaggaaagcagttattagccatcaattttgacagagtagatccagcaccatctgttcattgaattagtgagcttgatggatggtttttctacagttagagaaattagtcttaagctgaaggataatgcagtagacaatgatgatgagtgttagtgaggcttcaggtaaagggagcatcactctcaccttctagagtacgggacagaacgatcgatcggtggtgggctgtggcacctttattcaaattggtaccttgcgcctcatcgatgcaggttaattcttttctttgttgaatttttttgacccccttgttttgtcctgtcaataagggcatacacaggctaaattcaaattctttgttcttagttgcacattgattgttcatcatttttgtgtcggtggaaagtatattttgttgtcagaaaaccatcagttacacaacgagattggcagctgtttgg

SEQ ID NO: 16235 - DNA, 2747 bp, Oryza sativa
  ref <308>: DATABASE ACCESSION NUMBER: AK066737
  ref <309>: DATABASE ENTRY DATE: 2001-12-06
ggcgtccatgctatatcctccagcctatggatatatcaaacaaaacatagatgggttatcccatccccatccacttatgaccgtgaactaaacgcgccctaatctccatttccgctcgatcgatcgttgttcagctgcaaatcattcacactgcttgttatttgcttgcatgcacgatattgcagtcgtacctcccgtctcagacgcccaggggcgtgaagaatctgcgcaaggaagagctcagggccatccgcggcgatggccgcggcgagcgcaaggagtgggagcgcatctacgactacgacgtctacaacgacctcggcgaccccgacaatgacccggccactcgtcggccggtgctcggcggccgcgggcgcccctacccgcgtcgctgccgcacgggccgccgccgctgcaggacagacccgtcgtcggagtcgccgccggccaaggacggcgccgggatctacgtgccacgggacgaggcgttcacggagcggaaggccggcgcgttcgccaccaagaaggcgctgtcggcgctgtcggcgttcaccacggcgcagagggtgtccggcgaccggcggcggggcttcccgtcgctggcggccatcgacgcgctgtacgaggacgggtacaagaaccggccgtcgtcgtcgcagcaggaggcggacaacctcgaaggctacttcagggaggtgctccagaagcaggtgaagctgctgctcaagggcgagaaggaggagttcaaggaggagctacgcaaagtgttcaaattccaaacgcccgagattcacgacaaggacaagcttgcatggttcagagacgaggagttcgcgcggcaaacgctggcagggatgaaccctctcagcatccaacttgtcagggacacggacttccctatattcagcaagctggacgaggaaacctacggcccaggggactccctcatcaccaaagagctgattgaagagcagattaatggggtcatgacagcagaggaggccgtggagaagaagaagctgttcatgctggactaccacgacgtgctcctgccgttcgtgcacgcggtgcgcgagctggacgacaccacgctgtacgcctcgcggacgctcttcttcctgacggaggacggcacgctgaggccgatcgccatcgagctgacgaggcccaagtcccccaacacgccgcagtggcgccaggtcttcacgccgggctccagcgtcgcggcgtcctggctgtggcagctcgccaaaacgcacgtcctcgcccacgacaccggctaccaccagctcgtcagccactggctgaggacgcactgctgcgtggagccgtacgtgatcgcggcgaaccggcggctgagccagatgcaccccatctaccgactgctgcacccgcacttccgcttcaccatggagatcaacgcccaagcgcgcgggatgctcatcaacgccaatggaatcatcgagagcgccttcgcgccggggaagctctgcatggagctcagctcggcggtttacgacaagttttggaggttcgacatggaggctctgcccgccgatctcatccggaggggcatggcgatcgaatgcgaggatggcaagctggagctgacgatagaggactacccgtacgccaacgacggcctgctcatctgggactccatcaaggagtgggtgtcggattatgtgaaccattactaccagttggcttcagacatccacatggacaaggagctccagggttggtggaacgaggtgcgaaccaagggccacccggacaaggaggaagggtggccagagctgaactgccacgggagcctcgtcgaggttctgaccaccatcatctgggtcgcgtcggggcaccatgcggcggtgaactttggccagtacccctacgccggctacttccccaatcgccccaccatcgcccggcggaacatgccgacggaggggcaggcgtgcagtcacgacggcatgcagccaacgttcgttgaggatcccgtcagggtgctactagacacgttcccatcgcagtaccagaccaccctcgtcctgccggtgctcaacctgctatcgtcacactcgcccggcgaggagtacatgggcacgcatgcggagtcagcgtggatggcggacagggaggtcagggcggcgttcgggaggttcaacgagaggatgatgagcatcgcggagatgatcgactgccggaacaaggatccggagcgaaagaaccggcagggccccggcgtggtgccgtacgtgctgctcaagccgtcctacggtgaccctaaggacatgacgtccgtgatggagatgggtatccccaacagcatctcaatttgagttgtgccaatgagcttgcatctgtttggcgtgctcatcgtgacattatgtatgaaataaaatggattaaaaatccggcctcgtcaaggaatggctaacacagcgagcctgcatctgtttggagtgctcatcgtgcgattatgaaataaaatgacctggcatctgtttgccactgttttcttgtaactactgcactgtagtaagtacaggacaccgtatatacataacgccctgcattatttccttgtcggtatagatggctatcgatcacagtgtagcgtgctagtactacagaaaggtcattcctattatacaacccctatgctacgtatgtagcacagaggggttgcatgatgtttacaataaagtagagacaagatatgaaggtgtggcatcttttcatcc

SEQ ID NO: 16236 - DNA, 2277 bp, Oryza sativa
  ref <308>: DATABASE ACCESSION NUMBER: AK066738
  ref <309>: DATABASE ENTRY DATE: 2001-12-06
gctctccctctcctgccttgcctcgcgccaccgccgccgccgcagtctcgcgccgccaccgcctccccctcgcgccgccgccgaacgccgccgccgctcctcctctctctccctctccctcaaccatcctcctcctccgccgccggtccactcacccctaaccctagccgctgtcgcccgcctcccctcctccgacgccgacggcgccgccgcctgcccatcgcggtgccacctcctgctctcgccggcctcctccgcctcgcggtgccactgccgtcgtcgctgtcgatcgccgtctccggctggctcacctccaccaatgccgagcagtgcctcaacctcttcggccccaacaagctcaaggagaagaaggaaagcaagttcttgaggttcatgtggaacccgctgtcctgggtcatggaggccgcggcgatcatggccatcgctcttgccaatggaggaggaagctgccgggctggcaggacttcgtgggcatcatcacactgctcgtaatgaactccacaatcagttttattgaggagaacaacgccggcaatgccgctgccactctcatgggctgcctcgccccaagggccaagcggacacagaatcgagctctccttgagcagcttgccgccattgtcaacgatgacaaggggatgaatcggctgcaacagggaggctaagggtctcagatcctccttccccttgtctttgccgcggtgttcatccctttcacaacagagaaaaaaattaccggttcaatcggcgacagcaatggccgctcaaccttggtggcggttcctcgccctgctgcttccgctgctcatagcggtcatgaggcaggtggctggcggcgtccaagccccatccccaaggctcttcccagtggccatctcgtgagggtggccggatttctgatcatgttgcgcgggagagatggcagcagcggctggagcgatgtgatggggaacaagggaggaggccagcatcaggtggggacaggaggtttgggcctttttatttttaatgaggggtagggtagttgtctggttgtccatgttctaatttacctcattagtgttgtgctaaatcgaaggcgagttccagtagtgccttattcacgatcattaggaaaatgaatcaatgatgtacacaaaagctggcagtgcaacattgctgccttccatgaaatgatttcttccaaaagaatggaatgataatttcatcgttcagcatgatgcatttttccactcgctctcagtggagtttaccaagtctcaagttgttacatcaatcccaggatttttcttttgcatatggtattctgcgaagaagcattggctagcaaacaatgttttggggattgctttctgcattcagggaattgagatgctatcacttggatcattcaaaactggtgctattctcttggggatgaaattgttaccaatgggaaggaaaagtttattttacctcacaatttatggatctgcggtaggggttggctcctatgctgtacactatttctccacattggttgcttctattctggaaaattttggtttaagtgaagagatgcacaaccctgcagaaagcacatataatctattgttaaggaaacatctcgcaacgatcaacggggcgaggttggagtccatccacaggaggacgacgtgagagtggccgcagctggagccaaggccgaaaaagaagccgaagctggtggcaatgtcagcggtaagcagagcacagcaggggaggggaggggcgccgtggtcctgctgcatcccgtgcgtgcctcggaactagggtcaactactatgtcgactgttgctcgcacctccattgacatcaatctcatatccaaggtttgacacctttggattgcataccagaattttccatgttcagctcgcaataattcatcttcaggcaatagctctcttgaaaggttctcacagccttacagatcagtagatcacaatgggcaagggcaagattggaaggaagtgagaacataacatgcatctgatgaaggattgacagcaggatagactgagaataagccggtccttttcttttccctttgtttggacataatattgaagaagtgggtatacatttttcagaagaatgtgagcataaatgttgatttatacagtactgaaaaacaattacatagagttgattcatttgttagtacgaaattagtagtgcatacctgaattctgaacatgagcggtctcgacaataaaaacttgagatcctaacacc

SEQ ID NO: 16237 - DNA, 997 bp, Oryza sativa
  ref <308>: DATABASE ACCESSION NUMBER: AK066739
  ref <309>: DATABASE ENTRY DATE: 2001-12-06
gggcggatccgtgaagcccaacaacgaatgaagactagtagctgtgctcttcgtccacctcgactcgtcggctcgcctcggcttccttcgttggtccgcaccttctcccctcacccgccgccggggatccgctccgccgtctcgcctcccgccccgtggatccaccttgccgctccagatggaatcctgcccttcggtgaagaacatccttctgctggattccgaggggaagcgcgtcgccgtcaagtactacacggatgattggcctactctctcggcgaagctggccttcgagaagtcggtgttcgtcaagacccagaaagccactgccggagcagaagctgagattgtaatgtttgatggccacattgtggtgtataagttcatccaagacctccatttttttgttactggaggagaggaggagaatgagcttattttagcatcggtccttcaaggattcactgatgcagttgacattattctcagaaataacgtcgacaaaagaacagcactcgaaaatctggatctcatcctattgtgcctcgatgaaattgttgatggagggattgtcctggaaacagaaggaagtgtgatagctgaaaaggtgtcagcacatggaatagaaggtgctacttcactcgctgagcagactatagttcaagccctaacaacagcaagagagcacttgaccaaatctcttcttatgtgatgtgctctgcttttggagctgaagatggagtagcatcccgttgttacatctctaggactgatacgttcattgcaatagaaacgacggaacagaatatctgaatccatttgcgtgtagagtggcacgttcccttcattgacactatctggttcagttttgcgagtatttaaaaaactgcacaaacaagattgtgaacggtgattgtttcaattttgattgttctttgttttgtagatttatatatatgttgttgtgcagtggatcaatatattgcttatggagatg

SEQ ID NO: 16238 - DNA, 1092 bp, Oryza sativa
  ref <308>: DATABASE ACCESSION NUMBER: AK066740
  ref <309>: DATABASE ENTRY DATE: 2001-12-06
gtttatggtggccatgtcccaagtggatagacggtcctgatcttctgccgtgctgttctgctggtgttgccgcataacccacggcggcggcgcgtaggcaaagccgggaggaaggattagggtttaggcggcggccatggcagctgaggagcagactccgcgaaccaaacccagcaccgggaacagcaagaagaggaagaagcccaggaaggacaagtggggccagcctatcatcgacgccggcgatcgcccggcggttgagccggagcctgagccagagccggagcctgtcccagcgcccgcagcggcggcggcggcggaggaggaggaggaggcggggatctatgaaaccggcaaggtggtggccagcggcctgccgtacaccaccaccgaggcggagatccgggagctcttcgagcggttcggtcccctccggtcgctccagctctctcgcttcccggactccggcaacttccgcggcctcgcgttcgtctccttcgagtcaaacgaggtggtaatgaagtctcttgagcttgacggattcaaaattggcaacaggtttatgagagttgaaagatgcaggttggctgctggctcgaagaggaaaaggactgtggagttccaaactgatcctaagaaggctgatgggtgtctgtcagcatatgttggcaatctcaaatgggatgttacagaaacagacttaagggacttcttcaagtcactgaagatttcatcgataaggtttgctatcaacaagagaacaggtgattctcgtggtttttgtcatgttgattttgaggacgacgagtcgcttgagaaggctgtaggaatgaatcaatctgaactgcgcggccgacctatcaagatatcatatgctgtcagtaacaggggctgaaggctactagatagtaaactttgagcatgagcgagcctcagtgttatgcttttgctccctcagttttgttacggttatatatccgtattaagtttctactgaaagtgttgtttcttgcatcaatctctatgtagaatgtaattcaccgtgtgacaaatacttggtgctacttaatatcgaccttataaacacttctc

SEQ ID NO: 16239 - DNA, 2900 bp, Oryza sativa; identical to SEQ ID NO: 16008
  ref <308>: DATABASE ACCESSION NUMBER: AK098966
  ref <309>: DATABASE ENTRY DATE: 2002-08-28

SEQ ID NO: 16240 - DNA, 658 bp, Oryza sativa
  ref <308>: DATABASE ACCESSION NUMBER: AK066741
  ref <309>: DATABASE ENTRY DATE: 2001-12-06
gatcgcgcccttctcttgtcttgtgaatctgtgagaaccccgcatccatggcggcggcggcggcggcctcctcgggctggctccggcgagcggcggggacagtcccgcgcattccatgcggactcgtgaccgcactcgtcccgacccctcctccacccgctgctgcggtggtgtccgaggcccccgcgctcgcgctcccttcccacgcagccgtcgccatggagctcatggctgttcccaagaagaaggtttcaaagtataagaagggcctgaggaatgggccaaaagccctgaagcctgttcctgtaattgtccgctgcaagtgctgcggtcgggtgaagctgccacacttctactgttgcagcggcgaaagagggaaccctggatctgagagctcgtaatatagccttcaagactctgaagtcgagagttcatagcggatgcagagagggggaaaaacaccaggaccccattccagtaaaatcagtcaagactccactacctgtctcctgaaatcaaagccatttcttcatctatgtgagtcctgaatcagtgtttaacttttgactgcttttgtcattgggtaataataagcgctggaagtcttagctgatatcatggttgacaaaaaagaaaaaaaaatatgcatattgctagt

SEQ ID NO: 16241 - DNA, 3519 bp, Oryza sativa
  ref <308>: DATABASE ACCESSION NUMBER: AK066742
  ref <309>: DATABASE ENTRY DATE: 2001-12-06
tttttccccactacccaaacccggctagggttttaccacactctctccccatggcggcggcggcgctgcggacgccggcgactcgccgcccgctcctcgcccccttgagcatcctacgtacgcccacgcctcgccacctctcctctagctccccaccctctcaacccccgagctcccccgccggcgagctgctccgcctcctctccgccgcccccacctggacccccgacctcgcccgcgccgtctcctccaccttctccgcctcccccaccgccgacgtcgtcatctccgtcctccgctccatcaggaacccatccctcgccgccccgttcttcctcctcgcctcctcctcctccgcctcggccccgcaccccctccccgccgacgcctaccacgccgtcctcccgttcctccaccacgacctcgccgccctcgagaaggtcctcgaggagatggccgtcctcgggtacggcctccccaaccaggcctgcgcccacctcgccgccgcgctcgtccgcgcccgccgcctcgacgacgccgtcctcgccgtcgccgtcatgcggcggctcaagttccgcccggcgttctcggcgtacacggtgctgatcggcgcgctggccgaggcgcggcggcccgagcgcgcgctggagctgctgagacagatgcaggaggtcgggtacgaggtcggggtgcatctgttcaccacgctggtgcgggcgctggcgcgggagggccaagtcgccgacgctcttgcgctggtggatgaggtgaaggggagctgcctggagccggacattgtcttgtacaacgtgtgcatcgactgtttcgggaaggccggcaatgtggacatggcatggaagttcttccatgagctgaaggcgcagggtctgaagccggatgatgtgtcgtacacgagcatgatttgggtgctctgcaaggcgggaaggttaggtgaggcggaggagctgtttgcgcagatggaggccgaaagatctgtgccttgcgcatacgcgtataacactatgatcatgggatatggatctgctgggcggtttgaggatgcatataagttgcttgaaaggttgagggagagaggttgtattccatctgttgtgtcatttaattcgattctcacttgccttggtaagaagaggaaggttgatgaggctctaagcttgtttgaggtcatgaagaaggatgcagagccgaattcctcaacatataacatcatcatagatatgctttgcttgggtgggagggttgaggaggcgtataggatacttgatgagatggagcatgctagtttgtttccgaacttgttgactgtgaatataatggtggataggctgtgcaaggcaaggaagcttgaggaggcctataagatatttgaaagcgcaagccagagaggttgcaatcctgattgtgtgacatactgttcacttattgatggtttaggaaagaaagggcaggttgacgaggcctataggctatttgagaaaatgctggatgcagggcacaatgctaatcctgttgtatacacctccttgattaggaatttcttcattcatggaaggaaagaagatgggcacaaaatcttcaaagagttgatccgtcgagggtgcaagcctgatctaacccttctcaatacttatatggattgtgttttcaaggcaggtgaggttgaaaagggaagaatgaattttgaggacatcaggagttatgggtttcttcctgatgtccgaagttattccattctgattcatggtctcacaaaagctggccaggctagagaaacatcaaacatttttcatgccatgaagcagcaaggttttgctcttgatgctcgtgcttataatgctgttgtcgatgggttttgcaaatctgggaaggtgcacaaagcctatgaaattcttgaggagatgaaggaaaaatgtgtacaacctacagttgctacatatggagcaattgttgatggtcttgcaaagattgataggttggacgaggcttacatgctttttgaggaagcaaagtcgaaaggtatagaattgaatgttgttctgtacagctctctcatagatggctttgggaaggttggtaggatagatgaagcttatttaattttagaagaaatgatgaagaagggtttgactccaaatgtgtacacatggaatagcctcttggatgctttagtgaaagctgaagaaataaatgaggcgcttgtctgtttccagtcaatgaaggaaatgaaatgcccaccaaacacttatacatacagcattcttataaacggcctttgccgtgtacagaagtacaataaagcttttgtgttctggcaagatatgcagaaacagggcttggtccctaatgtggtcacttacacaaccatgatctcggggcttgcaaaggtaggaaacataacggatgcttacagcctctttgagaggtttaaggccaatggtggaattcctgacgctgcaagtttcaatgctcttatagagggaatgagcaatgcaaatagagcgatggaggcatatcaggtatttgaagaaactcgtttgcggggctgcagaattaatataaagtcatgcattagtcttttagatgctttaaacaaatctgaatgtctagagcaagctgctattgtaggtgcagttttgagggagattgccaagtcccaacatgcttcgagatccttgtagtattgagggtacttgagtttttctttagggtgtgcctcggagaaacaggtctttgatttgatcgatcctgtttcagtgattgcaattccatgcttgactgctgttctgctgtttggaaagagaacattgttctgcgttttcgttgatgttgataaggatcgaattctcagaacttaaagatgacaagaattatgatttcgttcaaatctgctccattactgttggatagcatcaaaactgtcaactgcatgattagtgcatataaatgaacttatggacaaagaattcatagttcagtgtgcttgacttgcaagttggaccaagctcctctgcagaccacggtttatcaggcgggttggcttgatacgacgatgaggctggactgcttgatattctcctgaacttccattttattattggattaggccacctgtggatctttcaatggaattaaaatggtagcctggctacgcatggtaaaccagagctcctgctcgagttctcccctgtttggtcgatttggatcaaatttgtccttcaataggttccttttaagagatttcccttccacaagggtatgtgtatactttttgttgtgtatattgcagataccaatatatttcaaatttcacgagagaatgtggaatatacaggaggaaacaaataataatgggttttaatccatagtcatgttattcatttttttttcacccttgtacttctgataaaaagttcttgtacttatgataaaaagttgtgtatgtggtgagaattttggtataagaaaataaaagataagcactcttctacttctgatctg

SEQ ID NO: 16242 - DNA, 841 bp, Oryza sativa
  ref <308>: DATABASE ACCESSION NUMBER: AK066743
  ref <309>: DATABASE ENTRY DATE: 2001-12-06
gccccttctccctcttctcttcttcctcatctcacatcgtctctatagctacctaccttcatctctctctagagctagagctagcacacaagagagagggagagagagagagagagagcgcttggttgttggcgtggtggatggcgcaagatgatgaggacgtgggtctagctctgggcctcgccaccgccgccgccgccggagcttcccccaccgccgccgccgaccgcaccaacaagcccaccgccccgcacttgttcagccctttcgccaagtccgccgcctgctagctaaattaatctcgatcatcatcctctccctgcatatgcatgctagcatgattaattaattaatcatcatatctgtgtgtagtgtacatatatatagtttatagtagtacatatattaattcttgcatgcatgcttgcatctagtagtaaatatatatggctatagctagttagctcatcgatcagctggctctctcatgcatatgttcaccccctctgctttaattagttagcttcattttttcacaagttaattaatgtgtgaggaggatggactgagcactgccggccgcatctaggatcgatccagaaatcaaacaaaattttaattcaagttgttggttttgcttgcatctagctatagatggtcacttactggtgatgaattttattgtcaggggagttaagagtgttgtagttagatgacgacgacatgacacctagctagctagctagctcacacacatatatatactgtactctgtacgtgatccatgtattatattgatttgtttcagaaatattatatatcaatgtatattgatttgttt

SEQ ID NO: 16243 - DNA, 2441 bp, Oryza sativa
  ref <308>: DATABASE ACCESSION NUMBER: AK066744
  ref <309>: DATABASE ENTRY DATE: 2001-12-06
gatattgttaaatttctccctcctcgccgcgccgctgcgcctggttccacaaggtgtcaaggtctacgcccatggcggcgactccggcggcggacagccgcctcctcgtcatatacgcctcggagactgggaacgctatggacgccgccgaacgggtcggccgccaggccgagcgcggcggctgcccggccgtcgacgtcctccccatggacagcttcgaccccagttgccttccgagcgagaggttcgtggtcttcgtcgtgtccaccacggggcagggtgatcccccggattccatgaaggggttttggaggtaccttcttaagaagaatttgggtgctaggtggcttgaaggggtcagatatgctgtgtttgggctcggagattcaggctatcagaagtacaattttgctgcaaaaaagctcgataaaaggcttttacaccttggtgcagaaccaatcatacaggtaggcttgggagatgatcaacacccttcaggatatgaaggagctctagatccctggttgctgtctttgtgggaatcactgaatcaaacaactccatcgctgttaccaagaatgtatgatatcattaatccagatttgagtgtcttaggagatgcaaaagtcgaagtcatctatcactcttctgacgaggctcaacaagattctaaccttttggatttcaagaatttaattcagagagcgcgctcaatgtccccttctctacagttctataataatgacaaagaaccacattacatgttacagatggtatcaaatcggtgtttgactaaggaaaattctgacagagacgtgcgccactttgaactggaaaatccatcttctggcatcacttatcaagttggcgacgcgctagaaattctaccaagtcagagtccatcagctgttgactctttcattgaacgctgtaaattggatccagattgttacataacggttcgagccaaggacagggttaaaatttccaaaggttcacttttgaaagatcgtatcaagttaaaaacctttgttgctttgacaatggatgtcgcatcagcttcccctcggcgatatttctttgaggtcatgagcttttttgcaacggctgaacatgaaaaggaaaagcttcagtattttgcatctccggaaggaagagatgacctttatcagtacaatcaaaaggagggccgaactattctagaagtattggatgattttccctctgtacaaatgccttttgaatggttggtgcaactaacgcctccattaaagaaaagagccttttccatatcatcatctccattagcaaaaccaaatcaaatacacttgactgttagcatagtgtcatggcgtactcctttcaaaaggatgcggcggggtctctgctcttcatggctggctgggctaaatccaaatgaagaaaatcttataccatgttgggtacaccacggttctttgcctcctccacatccatcgactccacttattcttattggaccaggaactggatgtgcaccattctgtgcatttgttgcggaaagggctgcacagagtacatcagaagcaacagcacccattctattcttctttggctgtagaaatcaagaaaatgattttctatacaaggacttctggtatgctcatgcccatgaccagggggtattgtcctcgaaaaatggcggtggtttctttgttgccttttctagagatcagcctcaaaaagtctatgtgcagcacaggataagggagcagagtgcaagagtgtggaatttactaaagtctggggctgcaatatacattgcaggctcgtctaccaaaatgccagctgatgttacagctgcactggaagaagttatctgtcaagaaaccggttgttcagaagaggaagcctcgatatggctcaggaaactagaaaggaacggcaaatttcacactgagacctggtcatagttatggtagtttctaatcaaaatggcttaaaaatgtacgcatcgtcaggtttccacaaatgtgtggcaaataacaaacagaattttggtgtagatcagtgttgttaaaattggagaggtatattcacgtccacattcataaatgaaaaataattcctggacaaaacaattataatgggaagacatagcacgtcggtttaaccccttcacttccggctggatgatgaagattttggaatgaggatgaagagatatggttttgattttggatactcttgatgaatgatgacacaagaagagaacatttcattagaattcaggtgagagcatcacacaccagctcatgatgcatttgatacctctgtataccttcgtttccatgcagtttctgttggacttctaaggatgcagactgttgacaccggttgatagggattctttagttcttgctacaatatggttaatattcatttcaacaatcattttgcgt

SEQ ID NO: 16244 - DNA, 839 bp, Oryza sativa
  ref <308>: DATABASE ACCESSION NUMBER: AK066745
  ref <309>: DATABASE ENTRY DATE: 2001-12-06
tttgatcgaatcacacgtgttgcatttgaggttgctcgcaagaggcgcgggaagctttgctcagtagacaaagcgaatgtgcttgaggcatctatgctttggagaaaacgggtgacttcattagcttctgaattccctgacattgagctgtcgcacatgtatgttgataatgcagcaatgcagcttattaggaatcctaagcagtttgacacaattgtcacaaacaatatttttggtgacatattgtctgatgaagcatcaatgcttactggaagcattggaatgctcccatctgccagtgttggtgaatcgggaccaggtctttttgagcctattcatggttctgcgcccgacattgctgggcaggataaggcaaacccattagctacaattcttagtgctgccatgctattgcggtatggccttggagaagaaaatgctgcaaagagagttgaagccgcagttacagagacactaaacaacgggttccgaactggggacatatattctcctggaacgaccttggtcggatgcaagcgaatgggagaggaagtcctgaagactgtagagtcgcagagcgcggttgctctaaactcgtagctctcagtatttcagctgtagccctgtgattgtgatggtcgaaagcacatcagagattgaggccgccaaagaatcacattgatgctggacttcctgatgttttttgcctgtccttgtgtcattctgtaacttagcgcatgagttgcctctttccccttttctcttgtaccttgaattttttctgtggtgatggttgacttaactgtctaggccaacaataataaaatggggttggttcc

SEQ ID NO: 16245 - DNA, 4305 bp, Oryza sativa
  ref <308>: DATABASE ACCESSION NUMBER: AK066746
  ref <309>: DATABASE ENTRY DATE: 2001-12-06
gggaggggtccgacggggactcgtcggggtcgctggaggagatcagcgccgacgacttcaagaaggagtcgtcggccgccggcggcgcggcggcggcggccgcggcgcagcagagatctagggtttggatggggtacaacatcccgcggagctacgcgccggcgttccacagcttcgcgtgggcgcaggccgtgcagaacaagccgctcgtgccccgcgccgccgacgccgccgacgaggacgaggtggagcacgtcgctggacacctcggacgaggagaaggaggagggcgagatcgaggagggggaggccgtgcagaccaccaccacctcctcctcgtccccgccgtgcgcgcagccgcccgaaaccatcgacctggactccgacgcgccggagaagtccgagtcgatggtggccatgtatggcggtggcgccgcgccggccggtgctgaggaggaggaagtggactttgaccagcgtgtggggagtatactcgaggagcttgagatggtctccattgaggaagctgagaagtcgtttgagggtgcatgtacgcgtctgcgaacgtgcttcgagaacctgaagccgttattcccagagagcgggagcccaatgcccatgcttgatgcccttgtgcagcaggcgtttgttggaatcgacaccattaccaccgtggcaaattcgtatgacatgccgaagagggagcagaccaagaacatgcttcttaagttgttattccacataaaaaacagatattcagacatgctaacacctgaccaacgagatgagctggatagccgtgtgaggcagttagtgtttgaggatggaaaagacaatgcaaatggtccaaatgccacttcaactaatgctgcagctccatctggtcaggttttatcagagagactaccatttgaatcaggagcaggaaattcatttagcaaggttgaaataccagcaaagaatagaatggttagccccttgttggatcttcatgcagattatgacgaaaacagcttaccctcaccaactcgagatagtaaaccaccttttgatgtgccaaagcccattggatatggagcacttccaatggcacctgacagaccatcggttctagaaagagttgagcctgcgaagaattcttcgtatcaatcctttaacgatgcactgaaggctgtttgctattaccaacagaagcatgggcagaagtctaactttgcaagcgatgatctaccaagtccaactccttctggtgatggagataaatctggagacaaagggggtgatgtatttggtgaagtttcgagcttttctgcttcaaacaagattgcgttgccaattgtgaatcagatgccctctcgacctagcacagttagcagcaacagtgacagttttgcaggtggtccaccaggttatgctaaacagattgaaaactctgtttcaggatccaaccacctgctaaaagctacagctaaaagtagagatccaaggcttaagtttttaaatcgtgatactggtggtgttgcagatgcaaaccgacgtgtgaattttgcagaaccaaatccttctaaagataggaccatgggtggtggagtatcaatcaatagccgtaagaataaggcagttgatgaacctatggtggatgagaacgcgttaaaaagatctaggggtgtcattggcaacctgagagatatgcaacctacaggtcgaggtgggtgggctaaagatggaggtaatattagctcatattctagtgatgggtttcagccaaatcaaaatacaagacttggaaataacacaactggaaatcataatatcaggacagatagtacacttgctagtaacttaaataatacgacaaataatagtggaactagtcctggaattgtacaagcaccccaaactaattcagctccgcaaaccagttctgctcctgctgtttcattgcctgctatgttaaaagacattgctgtcaatccaacaatgctcatgcaatggattcaaatggaacagcagaagatgtcagcatcagaacctcagcagaaggtaactgcttctgttggcatgactagtaatgtaactcctggcatggttttaccacttggcaatgctccaaagaccacagaagttgcagcagtcccttctgttagaccacaagttccaatgcagtcagctcccatgcactcacaaaatgatactggagttatacgtatgaaaccacgtgatcctcgtcgcatactccatagtaacatagtgcagaagaacgatacagttcctccagttggtgttgagcaagccaaaagcaatggaactgctccgccagactctcagagcagcaaggaccatttgctcaaccaagaccaaaaggcagagcaacttcaggctattgcattgccttctctacctgttacatcatcagcacggccagtcaccatgaatgcaaatcctgtctcaaattcacagttagctgctacagcacttatgcctcctcatggcaatacaaagcaaacttcaagtagtgtaaataaggcagatccaagattagctgctggacagaatgaatctaatgatgatgctgcaagcaagtactggtcctgtaacagcacctgatgctgtgccgcctgctagcccatatggagatgttgatcatctccttgatggttatgatgatcagcagaaggctctcattcagaaggaaagggcaaggcggatcaaggaacaacacaagatgtttgcagcacggaaactttgcttggtgcttgatttggatcacacgctcctcaattctgcaaagtttatagaagtggaccatattcacggggaaattttacgaaagaaagaggaacaagatcgagagagggcagagcgccatctcttctgttttaatcatatgggaatgtggaccaaactgagacctggaatatggaactttcttgagaaggcaagtaaactttatgagttgcatctgtacacaatgggcaacaaggtttatgctactgagatggctaaggttcttgatcctactggaaccctgtttgctgggcgtgttatctcaagaggcgatgatggtgatccttttgacagtgatgagcgagtgccaaaaagtaaagatcttgatggggtgttggggatggaatctgcagtggtgatcattgatgactctgtgagagtctggccccacaacaaacacaatttaattgttgtagagagatacacctatttcccctgcagcaggcgtcagtttgggcttcctgggccatcacttcttgaaattgatcgagatgaaagaccagaggatggtactcttgcttcttcactcgcggttattgagcgcattcacaagaacttcttttctcatcctaatctcaatgatgctgatgtgcggagcatactagcatctgagcagcagaggatacttggtggttgccgtattgtctttagccggattttcccggttggagaggccaatccccatatgcatcctttgtggcagactgctgagcagttcggtgcagtttgcacgaaccaaattgatgatcgggtcacccatgttgtggccaactccctcgggactgacaaggtgaattgggcgctatcaacaggcagattcgttgttcatccaggatgggtagaagcttcagctctattataccggcgtgccagtgagctcgactttgcggttaaataacacgacaatgaatccctgtttgccatccaaagtcgtgagtaacttcctgggaccatccgaagtcgtgagtaaacttcccggggacaggatccggtcaaggaaaacctaacatgacaacaaaaatcaaacaacataagtgaaagaaaaaaccggaccgtactaagaaaacccctaaaagaatctcaggcgaaaaacaggtaaaggaacgcttcatcatacaacaaagcctgaaagaagagagggcaatccacattgtttctgaggtgctgagcgtttgcctgacaaaagggttccagtgtgagccatgaaagaaaattatgccaagcataaaaaatggcaaatgctcaccaatctccccttgtgtaacatgtagtagtaaatctggtacatttttggttgcagtcctaggtccctgcctctttgctgcagtcctgccaggctcctactactagccacagactactccgtggtggcttgctggtagcagtcacccatcgagaccaggtgagagtggcatgtcgactggcaagagcagcaggcaaggagtaggagcgatactgctttggactgtgtctctgtgtattcatgtggctgtaatactgcagctgccgattccttcc

SEQ ID NO: 16246 - DNA, 2143 bp, Oryza sativa
  ref <308>: DATABASE ACCESSION NUMBER: AK066747
  ref <309>: DATABASE ENTRY DATE: 2001-12-06
gactccaacccaatcccagccatcaatacctgcctccgcttcgccatctctcccgaagcctcctctctctctctctctccccccgattccaccacacgcaatccaattccaacctcgtgtgcttccacttgtgcgtttcgcccgctgctgtgaacgtactgcgagatggcagcggcggcggcggcggcggaggcgaagcaccggaaggaggaggaggaggacgaggaggagatgacgctggaggacggcgacatcgaggagagcccgcgccgcagcttcgacgacgactacgaggacggcgggagcggcgacgacgaccgggatgacgacggcgaaggtttgggatcgcctcgctcgttccagtcccgccagtggccgcagagctaccgagaaacaactgacacctatacaattgctgcatctccgagctttggttacttgggtccctctacaagcaaatactcgatccttgatggtggtcgtagtagtctgggatccgacctgaagttgcccttgttgtctgataagctagatgggaagcaagactctgtcaagagcttgagaaagactcttggttcagcaatagataggaaaagctcgttacttacgcaacatactggagaagtctacatcgctcaaggatgcagtgtgacacagacggtgttcaatggggttaatgtacttgctggtgttggacttctttccactccatttacaattcatgaagctggatgggtaggccttgcggtcctagctatgtttgctattgtttgctgttatactggagttctgatgaaacactgttttgagagcaaagatggtatttctacatatccagacattggcgaggctgcttttggaaggattggtcgtctgctgatctctattatactctatactgagctatattcatattgtgtggaattcattattttggaaggagataatatgacatcaattttctctcatattggttttgattggcttggcgtccatattgatgggaaacatttctttggagtgttgactgctctaatagtcttgcctacagtatggttgagagatcttcgggttctctcctacctttctggtctcaacactcttaacctcaagtatttttctcactgcgatcattaatgatattaaggcagcaaattgaattgacaaggtttattgaatttcttgtgcagcgggtggtgttattgcaactcttcttgttttcctctctgtcgttttagttggcgctactgatggcgtagggtttcatttgactgggaaagcagtaaacttaggtggtataccgtttgctattggcatttatggtttctgctactctgggcactcagtgtttccaaatatttaccaatcaatgtcagaccgcacgaaattcactaaggcactgtttatatgctttgcaatttgcacagcaatatatggctcgtttgctatcattggctatctcatgttcggagataaaactctctcgcaaataactctgaatcttcctaaacattcatttgcctccaaggtcgcactgtggaccacggttatcaaccctttcaccaaatatgccctgttgttaaacccattggctcggagtttagaggagttgcgccctgaaggatttttgaacgaaacaatctgctctattatactgaggactgcccttgttgcgtcaaccgtgtgcattgcgtttcttatgccatttttcggtctcgtgatggctcttattggatctctgttgagtatacttgtggccgtcataatgcctgcactgtgcttcttgaagattaggcaaaataaagcaacgactgcccaggtcgttgcaagtattggtataataatattgggcaccataagcgctgctcttggaacatattcgtcggtactcagaattgtggagaactactaattacgaaacctagctcgcgtgcagtgcagttcccagcaggtgaggccacaggcatgtcatatctattactcaccccgcttacggttacggcgctcaaaaatggtcaaatatcgtgtgtttatcagaattttgctagaattaccgagttcactgtaattattcgacccaaccatgtaatgcatgtacctgcatagctgcttgcttctcagttccttgaagtggaatatctcc

SEQ ID NO: 16247 - DNA, 1486 bp, Oryza sativa
  ref <308>: DATABASE ACCESSION NUMBER: AK066748
  ref <309>: DATABASE ENTRY DATE: 2001-12-06
ggcccccactgtccactctcacaccaaaaccagtaaaaaaatatcgtcaccttcgccggcgagatggcccaccgccgcatcatcctcctcctcgccgccgccgccgtcgccgcgacctccgccgtcgccgccgcgtcctccggcttcgacgactccaacccgatccgctccgtcacggaccacgccgcctccgcgctcgagtcaaccgtcatcgccgccctcggccgcacccgcgacgccctccgcttcgcccgcttcgccgtcaggcatgggaagaggtacggcgacgcggcggaggtgcagcggcggttccggatcttctccgagagcctcgagctcgtccgctccaccaaccggaggggcctcccctaccgcctcggcatcaaccgtttcgcggacatgagctgggaggagttccaggcgagccggctcggcgcggcgcagaactgctcggcgacgctcgccggcaaccaccggatgcgcgacgccgccgctctcccggagaccaaagactggagggaggatgggatcgtgagccccgtgaaagaccagggtcactgtggttcctgttggaccttcagcaccactggttctcttgaggcagcatatactcaggccactgggaagcctgtctctctttctgagcagcagctggttgattgtgctactgcatacaataatttcggatgcagtggaggcctaccatctcaggcctttgagtacatcaaatacaatggtggccttgacactgaagaggcttacccttacacgggtgtcaatggcatctgtcattacaagcctgaaaacgttggagtcaaggttttggactccgttaacatcaccctgggtgctgaggatgagctgaagaatgctgttggacttgttcgtccagttagtgttgcctttcaggtgatcaacggtttcaggatgtacaagagtggagtttacacaagtgaccattgtggaacttctccaatggatgtgaaccacgctgttctggccgttggctatggtgtcgaaaatggcgttccctactggctcatcaagaactcatggggtgcagactggggtgacaatggttacttcaagatggaaatgggcaagaacatgtgcggtattgctacttgcgcatcctaccctattgttgcatgaggtgcccacggattagttccattgtgtcaatttagttggcctcaataatatatttttctgtccaaggatgaagatgggtatacagaaactgaaactttcttgtgaatataagatcataaggacatgaattagcccagtgcatgtaatcttctcctgtatggttgtgtaggtaatccagcaattggggtttcagagtactcattacatggctgtaaattcctatttatgcgacagaatggcctattcatatttcatagtgcagttacgaaaattccgggtcatgtgtacattattattcgagtgattttacagccatctattatagtttctggtt

SEQ ID NO: 16248 - DNA, 605 bp, Oryza sativa
  ref <308>: DATABASE ACCESSION NUMBER: AK066749
  ref <309>: DATABASE ENTRY DATE: 2001-12-06
gctctttcgcttcgctgaccccccaaaaccctagctcgagcgctcccttcttccccccacctctgcggcggcggcgggcggcgagatggcgaagtcgctgcggtcgaagcgggagaagcggctgcgcacgctgcggcgggagatcgcgcagcccttctacgacaagaaggaggcggccaaactcgccgcgcaggccgccgcgctcgaggcgcccgcgctgccggtccgcgcgcctccgccgccgtccaaggattccggcggctcccgcgccgcctccagctcggcatcggccatggacgttgagatggcggatgaaggaaataacaagtccaagtccttcttgaagccaattggtagcattagcaagaagaaggtacaacttcacttgaagatcaagaaagataaaagaaaagctaggaagaaggggaggtttagtaaaaagtaggtgtcaaagcttactctgttatgagaaccatcaattttggttagtttgaacaatgcatgtaatggtaatctcttgtgttgttgtgcacctaagtgttaaccatccattctgggtggataccgtattgaaatcagcgaaagcagtgagccagtgacaccct

SEQ ID NO: 16249 - DNA, 1751 bp, Oryza sativa
  ref <308>: DATABASE ACCESSION NUMBER: AK066750
  ref <309>: DATABASE ENTRY DATE: 2001-12-06
gtttttctcgcgccgctgcttgcctccgctgagctcatctcgctgccctcctcacccatcgcccctggccacgccttcactgccgacttcgccgccttggctacgctcgcggtcgcgctcgcctggagggccgccgcgccgtggcgggatggggtcgtcgcgcagactccaccgcaccaggtcgccgcgctacttatctccaccgcaccgtcggccatggagataaaggctgctgccaccggcgataaggcggtagaggagcaccttgtgattttttttttgtcatctccatctaggtagaggagcgggtgaggtgaagcgatgatttctttgattgggatgttttgattgaggattacttaagtacacatgtgcctttcttgggtaagggaaggatgtgggtggttgatttggagggagtttcttagatcggtttgggattgggggagagtcgctgctggatttgggtttcttgctggtttctcatgattcttcttcccccacagccacgagatagctagaagaaaatggtaggccaatgcagtctttccttctcgaatgcctcggcagcgagaggagctgtccttgaaaatttgtggttgttttacggggatctttgcctctttgtgctttcctgattcgctagctttgatgctggttcttgccttgtgatgtggtgtatccgatttggttcatttgttgcattgaaaacctcctggtctgggctggcagacgctcaggatttctcggaggcgggaggcccagcaccgcgccatgcgtttttccaccgcgggggcaaccgagacggattacacgaatacacaacacggaagtcacacgcgtagatttttatcggataacaggagacggacgatttttttagcggaagccttgcgtattttttaattagatatatatagatttatatgcttcaagtccttggcggttggatctagatcggagggacaaaaaatttgacagattgagagggttgttttctgtcgaatgagcagtagacagtccattatcacaaaactatagatttagaactaatttagtcataaaataataatgcttatagatccaacataataataatggttatagggatttaaagttgtagttttgtgataactccaattttaaatatgtagttttgtgatatttaactttaaatctgtagttttgtgataaatatgatgctaaatctgtaattttgtgatataacgccttaaatttgtagttttgcaatagtttaatcaaaataccaaaagttttgtgaaatttactcttatgcgtttcttgccaattaattactccacatgtttgccaccattaaaacacataatagcatatttgcattaagaaaaaagaagctagaatacatgttatttagcttctcctaaacctccaactcttttctttcaaacagtctagttcccacctaaatcttaggaatatgtggttgtagaataaaatgaattagaaaaaaaatactgaagctaactacgtcacatcatctataatttagtacatattaaaactcgacatgtaaccaatgctaaaatttatcatttccataatatttcaatctatatctatctatcatttctttctttaacatttaatacatatccatccatcatttctacaacatttagcatatatttatcatgtatttggcagcaaagcaggagatgtaagtgatttgtgattcaaagacataacttttatataccagcttattcact

SEQ ID NO: 16250 - DNA, 1999 bp, Oryza sativa
  ref <308>: DATABASE ACCESSION NUMBER: AK066751
  ref <309>: DATABASE ENTRY DATE: 2001-12-06
ggttgaggatggtcccatggcttccttcctcttctcgcgcggtcattcttccccttttcccctccgccgcgggtgggctggtaagtcggtaggtaagggatcaatcggtttcgatctcacctcgttcgctgccgtttgttgattgatgatcaggcgcaccaactagccggatagattgcccgcttgctcgtccttttctggtgcttgatccgttcggtttggggggggtctagtttcggcgatttgcttctgctgttgtgttagttttctgaacacagtatctctttcgattggtttatggctaattgtggtttgctgtgttgggtacaatatgcgcgatcggttggtttgtgtcaattcatgtttggtgcgatggatttgtcatggatattttgggcttgatcaaagggtagatgaactgaagttttcgctctgaattggtcatggttaggattgctcactggcctcagattattgttcggttcctttcaagttcgtgatgcttggttttgtttgagaccgttcgtctgcttgcagctatgcagtttttccttcggatctagtaatttttatgataaggtcaagtcatatcagaaaatttaaggtctgttcagagctttcaaatcaccggctttaacttgttcaatttcggcaagacatactcttcagattatcttgaatatggttgtgtgtcatcttaaccggaccatgtattgctttttggctttgataaaaatcgtcactatgtgctagggcgttggaatgattcttctgtgtcagttcttagttaaagtttaacatcaggatttctcgcgaggatttaaggagctctttttgaccgccttccctgtggattaatttatcctagtacaggaactacagattacttgctgcttgacctgctcagtttgaggtacagatctcgtgatttccctgtttactggtgttagttttaggaaccttgatgctttggtttagggctatggttaattgcaatttattgaaatttcaatatgtcaatattgtgcagttggtttgcttccattacaagcaactgtccaagaacattttatttgtaatacgaacatttataaaccagagaaattgaagcttgttgtatgggattggtcattgttaggaatagtctttggtgtataagatgttttctccattccattcaagactgctgctacgcttttgggtcaaaataacaagtgagattgatattatttggaggccatttgtctgcttggaaaactctggttatttaagtccatcctgctgcgcttttatggttgtcttgtcagaacatagacatggccatagttctccgagaatttgacgttaacttgtttacttccggaaaagctatatcagtcagttattaacttgctgtgagggtggttatgtagtaactaagaagacacatcctaaagtttctgtggtagacgattcatttggcagttctttcgaacaatattacaaggttgtgaaggtgattctgaaatcttttgactactttgggtgaaattaatttgaagatttatttcaagaacatttatggacctcaacattataaagccatctgtttgaagtttcttctgagtagaaacaattgctttatgaaccatggaggagttctcagtagcagtatttgatttctacttggtccagcttgcatctccagtagtatcctttacatatgggcttgtactgttccataactagctaggatatgggttcatttcaacatatgattggccctcttgtatgttggtttggtgtcatcttgtaatttgtgtgttcattaagcttccctctgatgttggaaattgtaattatcaaatgatatagacgtccatatactgatttagtctgtataatagttgtaacatggtaatttgttttgataatcctgagttgtaacatggtaattttgtccatatactgatttagtctgtatagaatgaaactctatggctcttgtggcattgttccc

SEQ ID NO: 16251 - DNA, 1802 bp, Oryza sativa
  ref <308>: DATABASE ACCESSION NUMBER: AK066752
  ref <309>: DATABASE ENTRY DATE: 2001-12-06
gaaactcctctcgtcctctcagccagaggcatcatcttgatatctctccccatcctctcacgactcccgacaccaagaaagcaagtataccatggattgaacatatacacggccgtcacacatctgtctccttccctcgtctcctcaccaatgattcggtccagaaacttgcagagatcctctgctagtacttgcacagagcctcagaccgagcactgaggaagcttaacatctgcctatcttctttctagttcttccctttctctctgttgttgcagtcttgcagctgcccgatttcgtgttctacgaggcaatggcatcctctgctcctgcttgggtcccctacgagccaacgagagattgctctcaagggctgtgcagcatgtactgcccccagtggtgctacttcatcttccctccgccgccgcccttcgacgtcgccggcaccagcgccgacgactcctccggccctgtcttctcccctctcgtcattgcaatcatcggcgttctggccagcgccttcctcctcgtcagctattacaccttcatctccaagtactgtggcaccgttagctccctcagggggagggtcttcggctcgagctccggtggcgctgcttatggcggcggtgccggtagcggcggccgccacggccacgggcagtcgaggagccacgagtcatggaacgtctcgccgccgagcgggctggacgagaccctgatcaacaagatcacggtgtgcaagtaccggcgcggtgatgggttcgtccacaccaccgactgctcggtctgcctcggcgagttcagtgacggggagagcctccggctgctacccaggtgcagccatgccttccaccagcaatgcatcgacacttggctcaagtcacactccaattgccccctctgccgcgccaacatcaccttcgtcaccgtcgggttggcgtcgccggagccggagggctgtgctccaggcgagactggaggtgacaatacacacgaggtggttgtggtgatggatggcttggaaaatctttgtgaagagcagcaggaggcagtgagcagggccagcactgccgatgatgatcacgatgcgaaggacgtcgcagaggggatggaggaggccaatggcgcagccgagatcagagaagaaggctcgccgccaaagaggggcgcgccgtcgtttgatcttcaccgtgacaaccgcatgtgcatcgccgacgttctgcaggaatccatggaagacgagctgacggcagccagggagagtggcctcctcgcaggcggcgctggcacgtcaagacggtgccatggcgagaacagcaagggaaggggaggccgcagccgacgtgcattgcagctgcaggacgccatggaggctctgccggggaagagattgccctccggtgggagatcctgcttcagcagcaagagcggcaggggaaaagattcagatcatccaatgtgaggcggtcagttctcattttcttactctaggatactggacaagcaacctttgtttgcatgatgagatgcgaatgggaaaaaattgcaaggacaatcatcataatctggagatgtcgtcttgtgataatgttgatctgctgcctcactccatgtgatgccactgccaaatcgatcctctgcagtgcttggttggtaatgtctcttttgttcatagttgagaaggacctgagagctgatctctctctctctctcttttgctctgccattttatacattacattgacttcccaccgttcaatttttctgtggagtttgttcttctgtgagttcactagttc

SEQ ID NO: 16252 - DNA, 762 bp, Oryza sativa
  ref <308>: DATABASE ACCESSION NUMBER: AK066753
  ref <309>: DATABASE ENTRY DATE: 2001-12-06
gagcctggcctatcttcctcgtcctcttcctcctcctcctcctgcctagcctattttgctttggtcgattgctgctgctgtggtggtggtggactggtggtggcggctagcgagataataagagtgactggataggatggcgacgacggtggcggcgatgtgcggggcggcggaggagcgggtggtggggacgcacaaggcgcccggggcgtgcccgcggtgcggcggcgcggtggtggccaccgacgtcgagagcgagcgccgcatcctctgcctcccgctctgcgtcaagagcaagcgcaagtactcctgctccaggtgcctccgccgcctcgtcaccctctacagctagacaaaacttcttgctactttcatcacagtggttaatttcttgattaggttcatttgcccttgattaattaaggataatccatccttccttccttcctagctctcgtctcggctagctagtgtgtgctcttcttgtctagcagtacaactagttgatagggactagctagctgatcatcggcagatggattaatgtttcgtctggtgcgatcaaccgtgtgtctaatcttgcgatcagcggacagcagatgtgcctacatgtgcatcacgtgacgctgtgcgtgcctgacgctttttgtgttggtatgtttgtaaaattgtaaaaaatgtaaatcaggtgtgtgtaactatgtgttcccagtgtcttgtatttactcctccagttagtgaaaactgagtgactaacgttct

SEQ ID NO: 16253 - DNA, 1797 bp, Oryza sativa
  ref <308>: DATABASE ACCESSION NUMBER: AK066754
  ref <309>: DATABASE ENTRY DATE: 2001-12-06
ggtgcgttccctccactcgcgcgggctgagcttagcttagctccccactcactcgccacttgctgcaattgcaatggctgctgctgctgctcgatgcgccggccatggcggcggcggcggcggcggcggtttcttactccggcgacggctgctcgccaccgcggcgttcctggcggcgtttgggctctgcactgctgctgctgatgacgctgccacggggagaggacaagggcatgatcatgtgatgctgagcgtggaggacatgttccctgactcgtcgtcgtcgtcgccgtcgtgcgacgcgccgccgcgagatcacagacatgacgccacgtcatcaaccactaggatgacgatcgtccaccggcacggcccgtgctcgccgctagccgccgcgcacggcgagccgccgtcccacggcgagatcctcgccgccgaccagagccgcgccgagtcgatccaacaccgggtgtccaccaccaccaccggccgggtgaatccaaagcgcagacgccaccggcagcagcagccgccgtcggcgccggcgccggcggcgtcgctgtcgtcgtccaccgcgtcgctcccggcgtcgccggggcgcgcgctgggcacaggcaactacgtggtgaccgtgggcctcggcacgccggcgtcgcggtacacggtggtgttcgacaccggcagcgacacgacgtgggtgcagtgccagccgtgcgtggtggcgtgctacgagcagcgggagaagctgttcgacccggcgagctcgtccacctacgccaacgtctcctgcgccgcgccggcctgctccgacctcgacgtcagcggctgctccggcggccactgcctctacggcgtccagtacggcgacggctcgtactccattggcttcttcgccatggacaccctcaccctctcctcctacgacgccgtcaaggggttccggttcggctgcggcgagaggaacgacggcttgttcggcgaggcggcggggctcctcggcctcggccgcggcaagacgtcgctgccggtgcagacgtacggcaagtacggcggcgtgttcgcgcactgcctcccggcgaggtcgaccggcacggggtacctcgacttcggcgcgggctcgccgccggcgacgacgacgacgccgatgctgacgggcaacgggccgacgttctactacgtcggcatgacgggcatccgcgtcggcgggcggctgctgcccatcgcgccgtcggtgttcgccgccgccggcacgatcgtcgactccggcacggtgatcacgcgcctcccgccggcggcgtactcgtcgctccgctccgcgttcgccgccgccatggcggcgcgcgggtacaggaaggcggcggcggtgtcgctgctggacacgtgctacgacttcaccgggatgagccaggcggcgatcccgacggtgtcgctgctgttccagggcggcgcggcgctggacgtcgacgcgtcggggatcatgtacacggtgagcgcgtcgcaggtgtgcctcgcgttcgccggcaacgaggacggcggcgacgtcggcatcgtcgggaacacgcagctcaagacgttcggcgtcgcctacgacatcgggaagaaggtggtcggcttctcccccggagcttgctgatgaaatgtgccacgcgtcacccccagcaaacgtacacgtcagcacgcagaatgaattaactgtctgcactctgcagtgtaatgctgcaatccaccaggtggtcagcgactggttttattaccatgatttctgaagatatataatcatatgattacaaatatgct

SEQ ID NO: 16254 - DNA, 976 bp, Oryza sativa
  ref <308>: DATABASE ACCESSION NUMBER: AK066755
  ref <309>: DATABASE ENTRY DATE: 2001-12-06
ggggggagagagagagagagctccatcttccacggcgacgacgacggcggcggcggcggcgaggggaggaggagatgaagctgaagcagctggagggtctcctcggagacctgcagcagttcaccgcacccaaggtggagctggagcagtatgcaacgggccctcacatcgcgtcgcgaatgctctacacggcggagaatagttttgatgacataactggcaaagtggtggctgactttggctgcgggtgtggcaccctgtctgtggcaagctctctgctggatgctgagcatgttgttggaattgatattgacccgcaatcccttgaacttgctcaagaaaatgctgcagatctagagctggatatcgacttaattcagtgtgatataaagaatttaaatttgagaggccttcttgttgacactgttgtcatgaatcctccctttgggacaagcagaaaaggagctgacatggaattcatttctatgggcatgaaggttgccactcgagctgtctattcgctacacaagacttctaccagagaacacatcaagaaggtagccttgcgcaactgcaatgccataagtgccgaggttctatgtgagctccgctacaacctaccacggacatacaagtttcacaaacaaaacgaggttgatatcgccgtcgatttttggcggttcgtgccacgagcccgagacgaaggtagcactgcatgctctgttaccaaccttaaacagagaagaatgcacagatgatcctaaaacattttcgtagcggttttttagcggttcagccgtgttgtgtcatctctcgcgcagttggccatgtgatgaacttggatcttttgattgcgaatttgtgattgcaacgaaggtatatgtgctcgtacaagtacaatgctcttttttttttcttttgaaagtggtcgtttaacattttgatgatgcgtaataatagtccatctctctgagcg

SEQ ID NO: 16255 - DNA, 1710 bp, Oryza sativa
  ref <308>: DATABASE ACCESSION NUMBER: AK066756
  ref <309>: DATABASE ENTRY DATE: 2001-12-06
gaatggaaacgcccattaatggcaagcttagccccccgcgctaatcgcctcctcctactaattccttgcgtctcgcttcggccaccgcccaccaccacctcctctcgcctctcgcccccgcatcgccgcttcctccctcccccacctcacgagaccgttttttttctttttttttgtgttaccgccatggccgccgcgttgacccgctcgtcgtccgtccgttccgccatccgacggctcggatcctcccgcggccgctggcggactccgggcaggcggggaatgaggtggcggcgttcggcgacgtcgcggaggaggaggagcgggaggagaagcgcaggttcctgttcggagactcgtatcgcagaagggtgttcttcaactacgagaagaggattcggacgcgcagccctcctgaaaagatctttgaatatttcgcgtccatccggaacccagagggtgaagtttacatgttacccgccgatttgatgagggcggttgtccccgtttttcctccatctgaatcgaaaattgtcagggaagggagtctcaggggagagcgcaaccctggcgagctacactgtgccccgtctgaatttttcatgctgtttgacacgaacggagatgggctcatctcctttgccgagtacatcttttttgtgacattgcttagcattcctgaatcaagtttcaacatagctttcaagatgtttgaccttgaccacagtggggaaatagacaaagaagagtttaagaaagtaatggcactgatgcggtcctatcataggcaaggagctgcccatagggatggtttacgttttggtcttaaggttggtcagtcagtggaaaatggtggactggttgagtacttcttcggcaaggatggcaatgaacagttacgctatgataagttctccaattttttgaagcaattgcatgatgagattgttcgcttggaattcagtcactatgatgtcaaatcatccaagacaatatctgtgaaggactttgcattatccatggttgcttctgcagatatgaatcacataaacaagctacttgacagagttgatgattttgatgattatcctgatctcaaggatttgcgcattacctttgaggagttcaaggcttttgctgatctgcggcgaaaattagaaccatttgcaatggcaatcttcagctatggcaaagtaaacggtttgctgaccaagcaggatctaaaacgtgcagcaactcatgtttgtgaagtggacttgactgataaagtggtggacgtcattttccttgtgttcgatgcaaaccgggatgggagccttagcgcagatgagttcttgagggcattgcaaagacgagaaagtgatattcgccagccagcttcttcaggtttaatgggagtatttacctgtttgttgaactgtacaaagtgttctcttcagcagactgtgatctagtgctggggagcgaaaacgaccacccactggagttctgcaaacacgattttgctgtaaatagtcttgcttatcaaagttaccgaaacatgtagcagctgcaaataacatgtttcgcactaagcccaaggcttcgctgacagaactctactccactaatgtaaaatgaacctatgacatggaacctcgttaactgtctacgccttgattcagttactatatccttacatgtctacgtttggatatcaatcttgttggt

SEQ ID NO: 16256 - DNA, 3542 bp, Oryza sativa
  ref <308>: DATABASE ACCESSION NUMBER: AK066757
  ref <309>: DATABASE ENTRY DATE: 2001-12-06
gggtttcctcgccccttctcccttcggctttttctgggcccagctaccgccgcccagctaccgccgctgtgctgccgtcggccggcgccccggccctctgccgaccaccgagcaggagccgcgcgcgcatcctcactccaccggtgaggcgcctctaccaggaagggcctatgccacctcggagccctgtcgacgcctcctcgccggagaccccgcctggccccctccgcctccccacgaaccgctgctgtctgatgatgctcgtcgccagcaagccacgccgcccacgaaatcaaggtcagattcgctcctgcttatgtgatttacatgagtcattacggtgtgcagatgccaattgaaagctgccacatgcacggcaagatgagcaaagcagtcaaggttcaggacgattgaccgtaagcttactgaaaaaaggaaattgacatctcatcgcaaacaaatcaggctcgcccccttcgccgtacgtactactagcctcacaagtcacaagtcacaaaccatcatcttcactagtagtagaacccagatcgagcagccatgtctgttcctgacgaaaacccgattgcggtggagaggaagatattctcagctgtggatcgcatcctggtgaacataaaagtcctaataggtgacatcgggagcaatctgaaaaagctccccaaacagagcgaccactcctgcaacaccggcgatgatgagtttgacgacgccgtggcgctgcggcacatcgaggtcaacatccatgccgaacagctcggcgccggagtcaaccgttttcaggacagcatcggcacgaagcaccatgccgaggaggagtcgatgccctcattggcggagcaagaagacgagcccgcgcgccccatgtctggattgcacgtcaggcgcctgcttgacaccctcgacgggcagctgatgcagtgcctcctctgccttgccatcttcccgccaggcgaggccatcaagaagaggcttctcatccactggtggctcggggaggggatagtccaatcggcagacgcagggaaggagcgcttcaacgagctgttcgatcgcggcctcgttcagcccgcgctacgccgaggccactgccgacgtacacactacttcagagtgcaccccgtggtgcacaaccagcttgtggagagcctaggtttcttcaggtttttgggtcatggcaaaggcaacgtcgtcgaataatgccttcctgtcagtattcaatctcgacatggagtacgtgaagattcatatcgcaaaatcgagaatcaccagagtcgtgcagcttgggcggtggaagaggtcaaggaagcaccacatcgagctggtgggagacaacgacctactcaaaaaagttttggcgtgcaagaacctgaggtacctcagcctcaggggcatctccctcatcgagtccatacccgaggccatcggcacgcttgccgaactcctcgtgctcgacctcagggcgtgccacaacttggagaagttaccggggtctatcggctcgttgctgaagctagagtacctggacttgtccgaatgcttcttacttgaagaaatgcccaaagagatcggcgagctgtccaagctgcaggtcctcaagggttttctcgttggcagttcaagaaagaagagcagcccatgccgtctcgccgacctggccacaaaggcgcagaatctacggaagctaaacattaccactggacggcaatctttggtgtgtgatgaagatgagctctgccaattggcgaaatgccagcatcttgagtccttgacaataacttggataggagaggcatctaccgagccatatcttcctcttccttccagcctcacaaagcttgatctccggcgtgcccctaccgcaagccttcttaatatcattcatccatcgacgtcggtgagcctgaaacggctgtatattaggggagggaagctccgtacactggggcaagacggcggctggaacgttgagacactgcgtgctagatgtctcaatgatttggagtgtgagtggagtgagctccatggtttgttccgagaactccgttttgtggagatgtggaggtgtgcccgccttagtttctggccttgcgatgggcggggcgtatgggacaaaggatctccttctctggctcgccgatccattggagtctgctacggagtgaaaggcaacaatctgccaccatggcatgaagtcgttcagctatatgcctcgaacaacattcctgccatgaggatattctatcctcaccacgatgttcttgaggctctgagaggcacaggcatcggtatcagcctcgacgttgagggccaattcctcccatccttcgcctctgaaccctccgttgcggctgcctgggtgaagaccaatgtgcaagccttttaccctgcagtctcattcaagttcatcacagtcggcaaccaggttgccctgagagagatgagatacatcctcccagcgatgcagaatatctatgcagcgttgtcagcagtagggctggatcacatcaaggtgtcaacgtcggtgagaagggacgtgctgggtttgtcctatcctccctctgctggtgctttctcctcagcgatggaacagtacatggcacctattgtgcagttcttggccaagattggggctccacttctggccagtgtgttcccttactttacttacgtgcacaatcaggaaggcattgatatcgattacgcccttttcacctccccgggaactgtggtgcaggacggtgaacatagctatcaaatctcttcgatgccattgtggatgctctgtattcggcgatggagaaggtgggtggctcaaccgtcagaatagttgtctcagatagcggctggccatcggctggggctcctgcagcgaccaaagataatgctagggcctacgtccagaacctgattaaccatgtgagcaaagggacacccaagaggcccgtacctatagagacatacatttttgccatgttcaatgagaacgagaaaaccggtgacgagatagagaggaactttgggctctttgaacctgacaagagccctgtgtacccaatcaccttctcttaaccgaaaggatagtacaaggaggcagctgctacaaaaactcaaccacttttcactgatccttccattttgttttggcattttattaggggttgctatataacggaatcccgtttagacggatactcgcgagacagacctagcccaaaaatcgagtgggggcatcttattagaattgatagtgtgctcaaaattttttacttaattacacattagtaatacactaaatattaaatttgagtggagtcctaggaccccactctacatactgtggatccgcccgtgctcgcaaggtgtcatcaccctgatacatagctgatatcatcctatccggacgagattctatcctgtagcatttccgttttattaatgcaccttgaaacttccattctctcatccagataaccgttaaacattgtgtaatgtaaccgtccataatgaataacgttatttct

SEQ ID NO: 16257 - DNA, 2403 bp, Oryza sativa
  ref <308>: DATABASE ACCESSION NUMBER: AK066758
  ref <309>: DATABASE ENTRY DATE: 2001-12-06
ggcttctgcacacttctttgcatgtgaacccaagctcacgcacgctgacagttcatacagctactgtaaaaaaaaagtttccacctggggccaatactttatacggactcacagtagtacttgtgagtagaacaaatggtctaaattgttcattgattctgttatagattgcttaagccagcagcaagaaagagtactgaggaaaatttcttgattaggagatagtacaaggttggtggctatggaggaggaatcccaatcccaatcccatttcccgctccggtgggagagcaccggcgaccaatggtggtacgcgacgcccatcgactgggcggcggcgagcggccactacgacgtcgtccgggagctcctccgcctcgacgccaacctcctcatcaagctcacctcgctccgccgcatccgccgcctcgagtccgtctgggacgacgacatgcgcttcgccgacgccgccaggaaccgcgccgccgtcgcccgccgcctgctccacgactgcgagccccccaggggcgccgccgctggcggcggaagccggcccaaccggctcatccgcgcgggctacggcggctggctcctctacacggcggccgccgccggggacgcggccttcgtgcgggagctgctcgggaggcagccgctgctggtgttcggcgagggggagtacggcgtcaccgacgtgctctacgccgcggccaggagcgacagctccgaggtgttccggctgctgctcagcgcggtgctgtccccgcccgagtgctccgccgggggagaaggcgacggcggcaccgccgccattgctgggggtttcatgttccggtgcgagatgatgaaccgcgcgatgcacgccgcggcaaggggaggcaacctggaggtcctcagggagctcctgcaggggtgctccgacgcgtcggcgttccgggacgctcagggatcgacgatcttgcacgccgcggccgcgagggggcagcttgaggttgtgaaggatcttattgcctctttcgatatagtcaactccacagacgagcaagggaatacggcattgcatctagccgcctttcgaggtcatttgcccgtggtcaaagccctcatcactgcatccccatcacttatatcagctacaaatgaagttggcgacacgttccttcatatggcgctgactggctttaggaccccaggattccgaaggcttgatcgtcagatggagcttatgaagcaattgattggtggagtgatcatggatttaagcagcattatcaatatgcaaaacgacgatggaaggacagttcttcacttggctgtgattggcaatctgcactctagccttgttgagctcttgatgactgcaccgttgattgaccttaatgtccgggacaatgatggcatgactcctctggatttacttaggaaacagccaccaacagcatcgtctgagatactcatcaagcagcttattttggctggtggaattgcaaattcaatggaccatgagaccagatcagccattgcttctcagctaaagatgcactgtatcgtaggcagcccgggaacatccttcaagatcccagatgccgagatcttcctccatgcaggtatcgatgcgtcagacatcagcgaaagaacgaactcattctctagcgttggacagagtgagccagaatttccggaatccagtcgtaagaagctgaactctatgcaaaatgcagcgaaacatctcaagatcctactcagatggcccctccgcaaggagaagaaatcatcatccggtgcccgaatcgccttcaggctcgggctcctggtcgtcgtcgtccttggtcgacaggattgaagccgtccatctggacaagaatggccaagcatctcctgataccagtgtggtgaccaggcgtacacccaagaagcacgggtctttgaacagcaggctcatgaaccaatacttctgcatcggagcgcaggggatagctgtcgaggactcaaccacggggcagcgatcaagtcggatgttcagaagttcacttctgtcagctgcctgaattcgtaatttagacatggtttgctttccttgacttcactgcttacaagttacagctgatctgttagtatgtgcgagtgcatgtgagaagactgtcatatgttgtgtttgtattactgatgcaaaatggtgagatctactaatgtaatgtagtgctgttggtagtgtgtaatgattttgttgggagagtgagtacaatggaaggcatggttttcaagttctatggtttttatatcttacaatatcatatgaggttagtgagtataatttgtagcagagtaaattacattggtggtacacgaacttgttaagtgggtgcaatttagtatataaatttgtaaaatgctcattttggc

SEQ ID NO: 16258 - DNA, 1123 bp, Oryza sativa
  ref <308>: DATABASE ACCESSION NUMBER: AK066759
  ref <309>: DATABASE ENTRY DATE: 2001-12-06
gaaacttacgaccatacggactttctcggatattgcccatgcagatactaatttgtgcaaatgcaccgccgcacttggcgttgctcgaccgccggcggtggtccccggcgtgggatcgccggcgaccagatcatcatacgcgtatgcacgctccgcgtccacgtgataaagagcaatcaaagggaatagtatattgcaaagccaaagaaacacaagaaacagttgacaggaggagcggtggaaaagacgaaccgcgggacatggaagaaatggtcaataccatcagagtaatgctaaggacaatgggcgatggggagataagtgcttctgcctatgacaccgcgtgggtcgcacttgtgaagaatcataacggcagcgacagcccacaattcccctcgaccattgattggatctctcacaatcagctgccagatggttcatggggtgatgacttgtgctttctagttcatgataggctcctcaacaccctagcttgtgtgattgcgctgatggagtggaaggttcatggtgacaagcgtgagaaaggtttgtcgtttattcgggaaaatatatggaggctggcccaagaggaagaggcatggatgccagttggttttgagatcaccttcccctcacttttagagatagccaaggacttggctcttgacatcccttatgatgaccctgctttgcacaagatatatgcccaaagggagctaaagcttaagaagatcccaagagaaatacttcactccctaccaacaagtttgcttcttagcatagagggactgcgaggcttggactggaagaggctcctcaagctccaactttcagatggatccttcctatcctcacccgctgcaacggcctatgttttgatgcaaacgggcgacaagaaatgtctcgagttccttgatggaattgttagcaaattccatgggggaggtaaataatgatctttcaattataaataaattctcattcgagacttcatttaatttctagttgaatagaacctatttgatgcaaagttcgtttctgtacagttccagaattgaaaaaaatggatatcatttttgatagccgtaacattattcaatcggatttgtccagatatgcatcc

SEQ ID NO: 16259 - DNA, 1867 bp, Oryza sativa
  ref <308>: DATABASE ACCESSION NUMBER: AK066760
  ref <309>: DATABASE ENTRY DATE: 2001-12-06
gagtgcaccagagtcacagaaacacatcacacattcgtgagctcagcttagccatggataacgcctacattattgccattctctctgtagctatcctcttcttgctccactactacctcctcggccgcggcaatggcggggcggcgcggctgccgccgggtccaccggccgtcccgatcctgggacacctccacctcgtcaagaagccgatgcacgccaccatgtcccgcctcgccgagcggtacgggccggtgttctcgctgcgcctcgggtcgcggcgcgccgtggtggtgtcgtcgccggggtgcgccagggagtgcttcaccgagcacgacgtgaccttcgcgaaccggcccaggttcgagtcgcagctgctggtctcgttcaacggcgccgcgctcgccacggcgagctacggcgcgcactggcgcaacctccgccggatcgtcgccgtgcagctgctctccgcgcaccgcgtcggcctcatgtcggggctcatcgccggcgaggtccgcgccatggtgcggaggatgtaccgcgccgcggccgcgtcccccgccggcgccgcgcgcatccagctgaagcggaggctgttcgaggtctccctcagcgtgctcatggagaccatcgcccacaccaaggcgacccgccccgagacggacccggacaccgacatgtccgtggaagcccaggagtttaagcaggtcgtcgacgagatcatcccgcacatcggcgcggccaacctgtgggactacttgccggcgctccggtggttcgacgtgttcggcgtcaggaggaagatcctcgccgctgtaagccggagggacgcgttccttcgccgcctgatcgacgcggagcggcggaggctggacgacggcgacgagggcgagaagaagagcatgatcgccgtgctgctcactctgcagaagacagagccggaggtgtacaccgataacatgatcacagctctaacggcgaacttgttcggagcaggaacagagacaacctcgacgacatcagaatgggcgatgtcgctactgctgaaccaccccgacacactcaagaaagcgcaagccgagatcgacgcatccgtcggcaactctcgcctgatcaccgccgacgacgtgactcgcctcggctacctccagtgcatcgtcagggagacgctccgcctgtaccccgccgcgccgatgctcctcccgcacgagtcctccgccgactgcaaggtcggcggctacaacatcccgcgcgggtcgatgttgctcatcaacgcgtacgccatccaccgtgacccggcggtgtgggaggagccggagaagttcatgccggagaggttcgaggacggcgggtgcgacggcaatctcttgatgccgttcgggatggggaggcggaggtgccccggcgagacgctggcgctgcgcacagtggggttggtgctgggcacgctgatccagtgcttcgactgggagagggtcgacggcgtggaggtcgacatgactgaaggtggcgggctcaccatccccaaggtcgtgccgttggaggccatgtgcaggccgcgcgacgccatgggtggtgttcttcgcgagctcgtctgaatattttttggcggcgtttgcatctccaggacgaactcatgtattgaaagcaccaaaagtaagtagcaaataagcttctcgtgagcatacacataacacatgtgagcttgtaatgtggaataaattacacgtagaggatttggaagagagtgactgcgctagcaatcgctctttgagagttgtgttttacagttttagtgaggaaccaatttgtatgaatgtgcaataatcatgtataaagtataattgtacacgccaggtatttcaatttc

SEQ ID NO: 16260 - DNA, 2843 bp, Oryza sativa
  ref <308>: DATABASE ACCESSION NUMBER: AK066761
  ref <309>: DATABASE ENTRY DATE: 2001-12-06
gtgaagagttaactcgtcgtccaatggatctatctgaagaagatgcttgtaagatactggagatctctcttgatgatcttgtccttggtgagaacggcagtagcaagcagtcatctgagttaagttcgggcaatttgacaaacaacattgaaaacattgacgaagagaagcttaagcgccaataccgtaagctggcaataaaataccatccagataagaatcctgagggaagagaaaagtttgttgctgtgcaaaaggcttacgaacgattgcaggcaagtatgcagggactgcagggaccacaagtttggaggctgctactcttactcagggcacagtgcatcttgtacaagagatatggacatgtcttggaaccattcaagtatgctggttatccaatgttgctaaatgcagtcactgtagataaggatgatagcaattttctttcatctgagagagcccctcttttgatagctgcttcagagctaatttggctgacatgcgcatcatcttcattaaatggcgaagagctcatacgggatggtggtatcccattgttggcaacacttctttctcgttgcatgtgcattgttcagcccacaaccccagcaaatgaaccggcagcaagaatagtcaccaacataatgcatacatttgcggttctcagccagtttgagtcaggaagggctgagattcttaagtttggtggccttgttgaggatattgtgcacagtacagaacttgaatttgttccatcggctgtggatgctgcactgcaaacagctgctaatatatcagtgtcatcagaattgcaaagttctctgctcgcggctggatttttatggtatgtgttgcctctattgcttcagtacgattcaacagcagaagagaatgcaacaagtgaagcacatggtgttggtgcaagggtgcagattgctaaaaatctgcatgctgtacatgcaactcaggctctgtcaaggctttgtggtcttggtggtgatggaataagcccatctaatcaatctgcttttgatgcactaagagcgcttcttactccgaagcttgctgatatgctgagaaaccacccacctaaagaactgttgtcaaatctgaatgcaaatttggagtcaccagagatcatatggaattcttccaccagaggcgagctcctcaaatttgtagaccagcagcgtgctagccaaggacctgatggttcatatgatttgacggaatcacattgtttcacataccaagctttatcaaaagaactgaatgttggtaatgtgtacttgagagtttacaacaaccaaccagattatgaaataagtgaccaggaaggtttttgcatcgcgctgcttaaatttatagcagagctagtacagaagtggaattcattaagtttggatgaaaatatgatgcatcaatgtggtacagctattgagacatcagtcactgaaaatggtgatatcagtggttcaacgaatgaaggaaaagaagaagattcattggaaaaacacaatagaggagtaacagatggagattctgaagtgattatgaacctccgaagtgggctaacatcactacagaatcttctaaccagtaatccaggattggctgctgtttttgcttccaaggaacggttgacacctctttttgaatgtcttgcgctacctgttcctcctgaaagcaacatcccacaaatttgcctaagcgttctttctctcctgacgaagcatgcgccttgtttggaagccatggttgcagaaagaacaagtctcattttgcttttccagatactgcactgcaatcgttcttgcagggatggagcccttactgtcctctattctttagccagcacaccggagctggcctgggctgctgccaagcatggtggtgtagtgtacattctagaacttatgttaccacttgaagaggaaatccctatgcagcaaagagctgcagctgcatcattattgggcaaacttgttgggcagccaatgcatggtcccagggtggcaatcacacttgctagattcttacctgatggtttggtttctgcaattagagatgggcctggtgaagctgttgtttcatgtcttgaacagaccacagaaacccctgaacttgtatggacacccgcaatggcagcttctctttctgcgcagttgtcaaccatggccacagacctctaccaagagcagatgaaagggcgtgttgttgattgggatgtgcctgaacaagcatctggccagcatgtaatgaaggatgagccacaggttggaggtatttatgtgagactcttcctaaaggatcccaagtttccattgagaaaccctaaaaggttcctagaagggctgctagatcagtatgtctcatcagttgctgccacacactatgaggcgaatgctgttgatccagagcttccgttgctgctttctgctgcattggtttcattgttgcgtgttcatccagcccttgcagaccatgttggttacctaggttatgttccaaagctggtttcagctatggcatatgagggtagacgggacactatggcatccggacaaaccacaagtaggttgcaagcggaacctagcaatcaagagaactcggcggactctaccgtgcagactccacaagaacgtgtccggcttagttgtttgcgagtgctgcatcagctggcttccagcactacttgtgcagaagctatggcagccacaagtgcaggaactcctcaggttgttccattgcttatgaaagcaattggatggcaaggtggaagtatactggcactagagacactaaagcgtgttgttggtgctggcaatcgggctagagatgcg

SEQ ID NO: 16261 - DNA, 1107 bp, Oryza sativa
  ref <308>: DATABASE ACCESSION NUMBER: AK066762
  ref <309>: DATABASE ENTRY DATE: 2001-12-06
gacaccacaatataccaacgcaacctccgccgcatcgccctcgttagaacgatggccgcgtcggcgctgcaccagaccaccagcttcctcggcaccgcccctcgccgggatgagctcgtccgccgcgtcggcgactccggtggccgcatcaccatgcgccgcaccgtcaagagcgcgccccagagcatctggtatggacctgaccgtcccaagtacctgggcccgttctcggagcagacgccatcgtacctgaccggagagttcccgggagactacaggtgggacacggcggggctatcggccgacccggagacgttcgcgaggaacagggagctggaggtgatccactcgcggtgggcgatgctgggggcgctgggctgcgtcttcccggagatcctgtccaagaacggggtgaagttcggggaggcggtgtggttcaaggccggcgcgcagatcttctccgagggggggctcgactacctggggaaccccaacctggtgcacgcgcagagcatcctcgccatctgggcggtccaggtggtgctcatgggattcgtcgagggctaccgcgtcggcggcggcccgctcggcgagggcctcgacaaggtgtacccaggcggcgccttcgacccgctcggcctcgccgacgaccctgacaccttcgccgagctcaaggtgaaggagctcaagaacggccgcctcgccatgttctccatgttcggcttcttcgtccaggccatcgtcaccggcaagggccccatcgagaacctcttcgaccacgtcgccgaccccgtcgccaacaacgcctgggcatacgccacacaacttcgtccccggcaagtgagcacaacgacacgatcgagatggtgccaaccaacgtaccatgtgtacacttgtagtagccacgcaccgaccctgcagttgcagttgcagcagtgcatgtatgtatgtaccttaattgtgtgtgtgtgtgtgatcgatcgaggagatttctagcttaattaatttctgtctgtcgtcatctttgcttctttggatcgagatttaatgtaagccgcaggccgcatccaagggatgatcgaattaatgatgtatcgttattatagg

SEQ ID NO: 16262 - DNA, 2081 bp, Oryza sativa
  ref <308>: DATABASE ACCESSION NUMBER: AK066763
  ref <309>: DATABASE ENTRY DATE: 2001-12-06
ggctctccggcgagtcctcttcctgccctgccctgccctgccctgcattctttctttctccaccaggggaatccagttcacccccagtgctgcttctgctgctgcttctgcatcatcttgccctgttaaaaagacacagtgcccttgttctttcgcagttgcaactagcatctcctcctctacttgtactcacttcacacctcagctcagctcagctcatctcctgtcatctcagctcaaagagaaagagctgaaggtgtaagctgatcaccaggaagcagaggctttttttcagattacagttatctgaaacaaccaacttcagaatcaatcagcaaaggtagaaacaagacagagctgctgtgcttctgtgattaattagggttgttaatgccatgaaccagttcgtccctgattggaacaccaccagcatgggcgacggctttgcgccattaggcgaagacgacgggctcgtcgagctgctatggtgcaatggccacgtcgtcatgcagagccaggcgccgcggaagccgccgaggccggagaagacgacggcggcggcggcggcggcgatggcggaggatgagtcggcgtcgtggtttcagtacccggtcgacgacgtgcttgagaaggacctgttcaccgagctgttcggcgaaatgacggcggccggcggcggcggcggcgacgtccgcagggcggcgtgcaaggaggagcgcggcgcggtcgccgcgttccagagcaggatgatgccgccgccgtggccggcgagggggaaggcggagttcggtgacgtcgacgacgtgtgcggcgtctcggaggtcgtcatggcgaagatggacggggcggcggcggcggagacggtcggcgagtcatcgatgctgacaatcgggtcgagcatctgcgggagcaaccacgtccagacgccgccggtggggaacgggaaggccggcgccggcaccgccggcgccgccagaagggcgcacgacacggcgacggtggcgtcgtcgtcgatgaggtcgaggtcctgcaccgccaaggccgagccgcgcgacgtcgcagccgccggcgtcggcggcaagcggaagcagcgcggcggcgccgccatggagtccgggagccccagcgaggacgtggagttcgagtccgccgccgcaacgtgctcgccggcgcagaagacgacgacggcgaagcggcggcgcgccgccgaggtgcacaacctctccgagaggaggagaagagataggatcaatgagaagatgaaagcattacaggagctcatacctcactgcaacaaaacggacaaagcatcgatgctggatgaagcgatcgagtatctcaagtcactgcagctccagctacagatgatgtggatgggcggcggaatggcgccgccggcggtgatgttcccggcggccggcgtgcaccagtacatgcagcggatgggcgccgtcgggatgggcccaccacacatggcgtccctgccgaggatgccgccgttcatggcgccgccgcccgccgccgtgcagagctcgccggtggtcagcatggccgacccctacgcccgctgcctcgccgtcgaccacctccagccaccgcctccgatgcattacctgcaggggatgagcttctaccagctcgccgcggccaagaaccttcagcagcagcagaacacggcggaggcgccgccaccgccaccggccggaggcaaccgcgcagccgctgactcctgacgacattctgcacaaaaaatacgacaactgtagtaagtctgagagcaagggtggcaccagttgattgccgtcaatctgaagatatgtatataaggctctgatgcaattgagttgagaggctggatcatgatggctacctaatcattaaggggaatttaagatcatcccttttactgacgtctaaattcggtaggcagtgtagatcgatcagcggttaagagttaacaagtcgtgaattcttttttgctatgtatgtagtactattttttcccctttggggagacattggttatgtatcagttgttgatgtacctgttcaaatttatgccaaccagagcaaattgtatt

SEQ ID NO: 16263 - DNA, 707 bp, Oryza sativa
  ref <308>: DATABASE ACCESSION NUMBER: AK066764
  ref <309>: DATABASE ENTRY DATE: 2001-12-06
gaggcacgccaccaccaccgctgctgacttcatcgcatcagaaccactgcaataaccactgggtgcgcgcgcgcgtgcagcggccagcggctggattagctctacgaggcacaggcgcgcgccaatgggcaacgccgccgcgcggggcatgcgccacgacgactacgcgacggcggcggcggcgacgggcgggaggaggaggaagagatgctccaagaacacggaggccgggagcgtgccagcatccgtgcccgggcgtcgtggggcggagcactcggccgccgccgccgccacgggagtgacggtgaaggtggtgctgaggaggaaggacgcggagaggctgatcgcgaggctgaacgagcagagcgcgatggggcggaaggccaggatggcggagatcaagagcgagatcatggcgggagacggcggccgtggcgcagccgccgcctcggcgagccccgggcggtgccgggacgcatggacgcataggctggccccgattcaggagaattagctaagcaaccagtatgtctactaagtagaagtagtttatagttagtagtacgtacacgattttgtttggtcaccctgcagccatgtgctacgtaggagtatattagcggaaagaggtggcaacggacgtagttgcgtacacttgttgttactgtactggtttcaatcgatgtcctagtatacttgaatcagtc

SEQ ID NO: 16264 - DNA, 3180 bp, Oryza sativa
  ref <308>: DATABASE ACCESSION NUMBER: AK066765
  ref <309>: DATABASE ENTRY DATE: 2001-12-06
gagtctgacagcaaaaggccacactcctcacaaatctcgtgcgcgccaccgtcatctccggcgaccacctcaccgccggccatgccattctcctacgccgccgcggcctctggctccgcgtcctcttctcgcaagccggttcccgtcgccgcggccgccgcccgccgacccgcgccctcgccggcagcggcggcggcacccgcgccctcgccgtcaaaccctagcgcggtctccgattccgacccctcctcgtactcctcctccggggaggagaccgacctcaccgcctccgatccggcggccgcctccgtcatctcctcctacctctccgttgcgggggatggcgccgacctctccaaggtcgggatcttcctcagctccgcggcgcgccgccgatcgccgccgtgcctgatatgcttcgatcccatccgcccctccgaccccgtctggtcctgctccgcctcctgcttcgccctcctccacctccactgcatccagtcatgggcacatcagtcatcctctgccgcgccttctcccacctggggttgccccaaatgccgcttcccctatcccaaatcccagactcccacctcctacctctgcttctgctccaagacggtagacccagctccggacccctggatcctcccccactcctgcggcgacgtctgtggccgacgtctcaatgcagaccgtgactctggctgtgagcacaactgcctcctgctttgccaccctgggccatgtccaccgtgcccggcaattgttccaaatgctatgtgcttttgcggctcacatcgtgagacgcgtcgatgctcacatcagcgttattcttgctcggggaaatgcaataaacgcctcggctgtggaatccaccggtgtcctgtggattgccatgatgggccttgcccgccttgtgcggtgcgaggaaagcacaaatgtgagtgtggagaaacaatggaggagaggctatgctctgaaagggtgttccagtgcaagagggagtgtggtgggatgttgcagtgtgggaagcatagttgtgagaggggttgccatgctggaaagtgtggaggatgcccactccaagggcgacgaacttgcccatgtgggaagaaagattatccaagtttggactgtgatgcagaggctgccacatgtggatcaacttgcgagaaggtgcttgggtgcgggcggcacaaatgcccagagcggtgtcatcgtggttcatgcgttgagacatgtcggcttgtgatcacaaaatcgtgccgctgtgggggtctcaagaaggaggtgccttgctaccaagaattgacatgcgaaaggaagtgtcagcgtttgcgaaactgtggccgccatgcttgtagacgacgttgctgcgagggtgattgtgcaccctgcccagaggtttgtgacaagaggctcagatgtggcaaccataaatgcctatctccatgccacagaggtgcttgtgcaccttgtcctttgatgaagaccatttcatgcaactgtgggcaaacattttttgaggtgccctgtgggactgagaagaatcagaagccacccaaatgctcaaaaaaatgcaatatagctcgcctttgcaggcacaaacttgaatgccggccccacaagtgccactatggagcttgcccaccttgcaaactaatctgcggagaagaactttcttgtggccacaggtgtaagctgaggtgtcatggccccattgctcctccaaatcctgagttcacactgaaaccaataaaaaggaaaaagggaaagcatatagactctacacctggaacaccatgcccgccatgccaagaagttgttttggtgccatgctttggacatcatcttggccaagaacgtgcaatactttgctccaaaaggaggcagtttccatgtcagaatttatgtggtaaccctctcaactgtggcaatcattattgtacgaaggcttgccatgtgttacagattccattgagtcagcctgaaggagatcaatcggctatactgtctcttgctagtgcaagtgcattcgctgagccttgcgaagaatgtaacctgccttgtcaaagggtcagggagcctccatgttcacatccctgccctttgccatgccatcttaacgattgtccaccttgcaaagcccttgttaaaagaccatgtcattgtggtgctatggtacacgcttttgagtgcatgtattataacaacttaaatgctacaaaacagcagaaagtaaggtcctgtggtggcccatgtcatagaaaattaccgaattgtccccatctgtgctcagaaatatgtcaccctggtcagtgcccatcagttgatcagtgcatgaaaaaggtcaatgtccgttgtgcatgcaacaaccttaaaaaagagtggatatgtcaagatgttctgaaggaataccgtcagtctggtcgtgacccaaaacaaatacctaaaaatcaatatgcagttggcctacttgcctgtggtgaagattgtgttaaaaaggttaaagctgcagattctgagttgcatctccggaaaattcaggagatcaagacccctgctgtggaagttgaaaatgtgcccaagcgcaggaagaggcgtaaccgtggccaagaaagtgttgaaagctcaaaattccaggaaatcaaagctgttgcgttgaaatttctcctggttatttttctgtgcataatcgttgtagctggattgtaccttttgtggaaaggtgtttaccggctttctgattggatgaatgacatggaggagcagagggccaggcagaggcatttgaagcctggaagattgtaaattaaagactacggagggtgtttgtggaatattcacaactgagatgtgcatcggttcaccgtcagggattggtttcggatatatggtagtgaaagatgtcatcattttgttattggagccaagccccggagtttgtaactagtttggtctcttgtccgaagctactggttaatggaaactaaagttatccgtgtcaaaagaaagatatcattttgttctttgtttgccaaacaaaatgtaggaactcaacaaccttgtactgtagtttacatgcatactgtgttcgagtgaattaagggtgtgtttagttcacgtcaaaattagaagtttcattgaaattgaaacgatgtgatggaaaagttagaagtt

SEQ ID NO: 16265 - DNA, 2014 bp, Oryza sativa
  ref <308>: DATABASE ACCESSION NUMBER: AK066766
  ref <309>: DATABASE ENTRY DATE: 2001-12-06
ggggtgcagtagtgtaagcagaagcagacgcaccaaaagagacgaacactactactagtatagtattccccattggattccatccgccggccggcctgctgcctgcctgccattgatagattccatcgtcgtcgtaggatagagagtactagtttgcaattcaattcaatcccccatacccataggccataggataggagtatgggaggcggcgatggcgatgaggtgctgctgctgccggagccgcgccctcgcaggggcctcgcctcctgggcgctcgatctgctggagcgcgccgccgtccgcctcggccacgacgcctccaagccgctctactggctctccggcaacttcgcccccgtccaccacgagaccccgccggccccggccctccccgtccgcggccacctccccgagtgcttgaatggagaatttgtcagggtaggacccaatccaaagtttgtccctgtcgctggctatcattggtttgatggagatggaatgatccatgcgatgcgtatcaaagatgggaaagctacctatgtgtcgagatatgtgaagacttctcgtctcaagcaagaagagtattttggtggagcaaagtttatgaagattggagacctgaagggattttatggattgtttatggtccaaatgcaacaactccggaaaaaactcaaagtattggattttacatatggacatgggacagctaatactgcacttatctatcaccatggtaaacttatggccctgtcagaggcagataagccctatgttgttaaggtccttgaagatggagacttgcaaactcttggattgttggattacgacaaacggttgaaacactctttcactgctcatccaaaggtcgatccatttacagacgaaatgttcgcttttggatattcgtatgaacctccttactgtacataccgggtcattaccaaggatggagccatgcttgatcctgtgccaataacaattccagaatctgtaatgatgcacgactttgccattacagagaattattctattttcatggaccttcctctgttgttccgaccaaaggaaatggtgaagaatggtgagtttatctacaagtttgatcctacaaagaaagctcgttttggtatactccaacgttatgaaaaggatgacacaaacatcagatggtttgaacttcccaactgcttcatattccacaatgctaatgcttgggaagagggtgacgaagttatcctaattacctgccgcttggagaatcctgacttggacaaggtgaacggttaccaaagcgacaatctcgagaactttgggaatgagctgtatgagatgagattcaacatgaaaaccggtgctgcttcacaaaagcaactatctgtttctgctgtagattttcctcgaattaatgagagctacactggcagaaagcagcggtatgtgtattgcgctattctaaacagcatagcgaaggtagcaggcattataaaatttgatctacatgctgaaccggagatcagtggcaagaaacaacttgaagtggggggaaatgtgagaggaatatttgacttgggacctggtagattcgggtccgaggcaatttttgtgcctagggaacccggtgtatctggagaagaagatgatggttatttgatattctttgtccacgacgagaatacagggaaatctgaagtcaatgtgattgatgcaaagacaatgtctgctgatccggtggcagttgttgagctaccaagccgagttccctacggattccatgctttctttataaacgaggaacaactggcaaaacaatcagcgtgacaagtgacagcggactgcatacatcctacagtaacttgttatattttagtcggagggaaatgatatatacatatgaatgtacatgtgtatcctcttactcggggaaataattggcttaaggtacatatatgtttaactcgaattgaacaattactcctatattaattacttattaagggagggttattat

SEQ ID NO: 16266 - DNA, 2791 bp, Oryza sativa
  ref <308>: DATABASE ACCESSION NUMBER: AK066767
  ref <309>: DATABASE ENTRY DATE: 2001-12-06
gtctcgccgccttcttcccccttgtcgccgtcgccgagccgcctccgcctcaccgtgccgaccaccacctctcccaacctcgccgtcgaatcctctctctctctctcgtctccccgcttcgcttccacctcgcactcacactcccatggacccctccatgcctccgcctccacctcgaaaccctaacccctcctccgcctccatgccgccccccccgccaccgcccaagttggagccggcgtccaagcccgaatccactaaccctaactcctccatgccgccgcctccgcctccactcccggtggagggtgcgagcactagctcctctatgcctccgcctccgccgccacggcccgcggcgccgccgcagccggaggtggagggggcggacgcgtcggccgaagggggcactagcgctagcgattccgaggcggatgaggcggcggggaacttaggtaggggctccagggatattgagatggcggaggcggcggcgccgccgccatcacagcagcagcagccgaggccgcgtgccccgtacgccatacccgagtggagcgccgcaccgggccaccccttcttcctcgaggttctcaaggacggcaccatcgttgacaagcttgacgtgtccaggaaaggagcttacatgtttggtcgaattgatctttgcgattttgtattggagcatcccactatttctcgctttcatgctgttttgcagtttagaaatgatggggaggttttcctttatgatcttggaagcacacatgggtccttcatcaataaaactcaggtcaagaagaagatatatgtggaaattcatgttggagatgtaattcgatttgggcaatcatcacgtttgtacatattccaaggaccatctgagctgatgccccctgaaaaagatatgcagaagcttcgggatgctagagttcagcaagatatgcttgatcgtgaagcttcccttttacgtgcaaaaaatcaagcagctttagcagagggtatctcatggggtatgtctgaggatgcagtcgaagattctgcagaggatgaagctgatgagatcacatggcaaacctacaaaggtcaactcactgatagacaggagaaaacacgaagcaaaataataaagcgattggaaaagattaccaacatgaagaaagaaattgatgcaataagagctaaggacatttctcaaggtgggttaacccaaggtcaacaaacacagattgcacggaatgagcaaaggacatctcagcttatggaggagctggaaaatttagaagaaactttgaatgacagtatacgggaaagtcttggtgctcgcactggaaactcaaatcgtggtagtcataaagcaagtcttgaggaagaagatgacattcttagtgacgaagatgacttctatgatcggacgaagaagaaatcttctagtcataaatccagtgagcagcaagtggagactgctgatagtcttcttgataaaaaagataccataaccagcgatattgaaagtaaaaagaaattggttgaagaagagaagaataagttggcaaaaagtgagaatgcggatgttggggacgaccttgatgcttacatgagtggattatcatctcaattagtacatgacaagattgcccaaatccagaaggagctttctgatcttcaaactgagctgggcagggtggtttacctactgaaaatagctgatcctatgggagaagcagctcgcaagagggatctcaagccacgagaaacaaaatctccagcatctaatgatagtctaagaccagagtccagaaagcaaaacaaagttgcacaaaacaaagcctcaacagaggagaagcttaaggaatcttgtgctgaaaaaacacaagtggataaaccagccgaggaagagaagggtatctccacaaaccaagaaaatggcagcaaacctgcattctccattccaaaacctcagtggcttggtgacaagaggaccgtggaatctgaagagaactgtataaaagaagaaagtgccaatgaagaggagactgataattttgtggactacaaagatcgaaaaactattctttcaggttccgccaatggaaaagaccttgaagaagctgctcctgggcttattttacggaagagaaagtctgatcaatcagcagccaatgaggtggaatcttcagttgaatccgaagcatctgctgctgatgctgtggccctcttgctgaagcacaaacgtggtttacaaacttctgaagatatggaggatgagaatgaaccacaagctagcaagagaaaaagtaaaaagtcgaaacaaaaacgcgtactgggtccagcaagaccagattttctggacgcaggtccagatcatgaaacatgggtgccacctgaaggtcaaactggtgatggccgcacttcattgaacgatcgtctgggctactgaagttttcacattcaagactcgactcgatgcgtcatgaagaagaattcagtagcgacgatcgcggtattactgcagctagtccttgagcatgcgtttcatataacttcaaatggaaactggcccctttttattagttgctcgccatttcctgagactgtagtagaggctgtgtaagattgcgaatttgtagaaaatgagagttgaaatgacaggtggtggatctgtatgggaatggtgtcacctgtccaggggtcacaaaggatgcaaatgtcattttcagttcgctacgagaatggggtgggattttgtaatgtacatcatcgtcccatagtataacggttgtttggtgcc

SEQ ID NO: 16267 - DNA, 1870 bp, Oryza sativa
  ref <308>: DATABASE ACCESSION NUMBER: AK066768
  ref <309>: DATABASE ENTRY DATE: 2001-12-06
ggtccacctcctcttcccagactcccatggcagccacgcccaccacgtccgcctccgcggcggccaccactcgcctcttcctacctactcgccgccacctccatgaaaccgcttccgtgcctgccccttcgcgcaccatcgcccgccgctactccggcggcgtccgctctctcgggccaccgcgcgccgccgcgggcgagcttggcggcggggccggcggaaccatcaccgggaagggcgccgtccgcatagtctccatagtaggcgacgggagcatcagcccgctgaaggacacgccatgggaggaggttatgcgccacacggctaataggatgaagtgggttgacgaaggatttgaaatgcttgtcttcacagacaagtcaattggccatgatgaacttaggaaagagctggcacagtgtgatatgctagtcaatgttgcaataacgagtcaggagactgttcagtggcttataaataacagtgaggacattcccaatataatctgctttcaatcatctccaaccttagaaaacaagttaggtggcaggtatgttcaatacactggacgtcaggacatgttttgcaagctaacaaatattggagaaacaggtggcatgaaggaatctgctgaagtccttaaggctgtatctaatgcctgggaaaggcataattcagatgacattagattttgcttacttgttgtggttaatgcgtacataagacctgttgatatgctgcaaaaccttagggcaaaaggtctgtctaccctaagctgtatgataagaaattgtggtcctcagatactgaattgtctgttcgatcccaactgtaggaaagcccttcagtgtttaaattcatgttctccaactgatcaagtttgcaactatcgctgcattgcgtcgtatgagagtccgcatctggaggccttttctttatgtgttttgcagaagaacaattgtcttgatctcaatgccgagatccccagtaagccctctgtacccccactaaccatgttcagagaacaaatgctaagccatgaacttgcagaagacatgtttgttggatggttggacaacttggaatggagttggagagttgtagctggacaaaatccagcatatgatcaattcccatgtcagtatcaattattttacaggggaaaagctaaaggttcattttggtatgagccaatttttcaagtcagaaccctggaaggggaactggtttggaggcgcagaaagtaccgagtaagaagagctctcatccctggtacattttacttcagtgtgctggataatggtgtggtttcaaaggagttttggacaatcgttgatgtttcagatgatttcagctggggtctgttccattatcacggagccgctcaggccgctggactagcatacactggagcagtgctcgttagcccagatggctcttgtccagatttggatgacccaagactggcatctgctttagataagtgtgggatcaagaagtgggagctttatatggttgataactgttcctgcactggtgcacctttgggaactcctggagatgcaaagctgcattatcagattgctcctggaaaagaatcaggtattttgcagacagggtgatgtgttctaacggcacagaaggttcccagatgacttgcacggttgcacctctaagtcaggcagtgtggactgtggtctgtggatactgcggacttgatccagtgcaggaattgcttgcactgttgcacccactagactacaaatatgtaagaataacattcaggtatcgctgaaaagagtaattatgtaaaatgagcggttctttatcttatatagttatcatctaatgtcatgccttttttactgtc

SEQ ID NO: 16268 - DNA, 831 bp, Oryza sativa
  ref <308>: DATABASE ACCESSION NUMBER: AK066769
  ref <309>: DATABASE ENTRY DATE: 2001-12-06
gctattcctcctcctcgccaagccagcggaattttcccccaaatccaccgcgtcgccatggccgccgccgccgcccgcctcctcctcctcgccgtcgtcgccgcggtgttcctcctctcccccgcggcagccgggcgcccctgcggccacgcccagacgctcctcatctccttctcctccgtctccaggcccaaccccgaccccaacaaccccactcccctcaccaccaccgtcgtcaccgtcctccgcgtccgccgcctcggcccccaccaccccctccagatcccccgccccgatcccctccccgccgcctccgacgccgcctcgtccgtccaggagcgcgccaaggacatcctcgtcgtcgtctccggcctcctcttcggcttcggctgcggcgccctcaccgccgcgaccatgtacctcgtctggtccctcctcgcctccacctgcgctccttcctacgacgaggtctacggcgaagacgacgacgacgagctgtccgactccgagagccccaagaaggccggatacgtcatcatccacgacgccgaacagtacgtcggcggtaagaactaggggtggggaattgggctatctcgccgatggccaatttaagaatttgtgataaatgatcgcgtggatttgcggggtatatatactactattagcacctatatatgtgttgcgtctgtctgactcagtatgtgtgtgtgatttcgaaaagaaacaaattatgaatacggtcttgatgttttcttacataatttaaagtgaaactgaagtgtccttatttattgatcatgaaacatggaacatatttggttcttctgc

SEQ ID NO: 16269 - DNA, 3135 bp, Oryza sativa
  ref <308>: DATABASE ACCESSION NUMBER: AK066770
  ref <309>: DATABASE ENTRY DATE: 2001-12-06
gacactgcatggcattcgcacgccattgacacatatctcatcataccatcaccataccacatctcatctcacgcgtcccaaagaaagtgatagtgtacgtacctctgcttgctccttggctttctgagctgagctgctctgcagttggatgtgcgtgagctggtgatctgggaggagtcggagtcggaggaggagatgcctccggcgagggtgctcagcggcggtggtggaggaggggggttgggggacgaggcgccggagctggagaggcagatggggtgcatggccggcatcttccagatcttcgaccgccgccagcgcctgctcaccgcgcgccgccgccgcccgccgcccaagatgctgcccccgggcccaggccatactcttccaagaagcagcagcaatgttgcagcgcagagctcaagtacctccaagatcgttctggagaaaacattcagcaagagcatgaccgagaacagtagcctttcaatagagtcatcaagggcttcctgttcttcctcctcatgctcatccttttcatcacttgatggcaacaaatcgatccaacaagagctgccatacatcaacgagcagctctttgtacagaggccactgaagagctcaccaagtctgaaggacccagtcatggacaccaggtctggacagtcaaacattggcttcagagacattgtgaaggactccattaaccgggacaccggaggccttactgtcaagacctcggtgaaggatgcaaggaggaatgggcagtacaaagactcaccaaggcccttgctgctctccaaatcaatggatgggacctacgtcatcgggatcgataggagcaccaaggtccctgctaatgctgttgaatccagcaggcgattcccagagcagtcgcgcttctcatgcgatgatcggcggctcctgaggccagttgaagctcaagagaacaagaagccttccacaaggctcaaagagcttcccagactgtccttggacagtaggaaagaaaccctgagctcgagttctcgccagaagaccttcagttacaggagaaccgacgacagtctcatggacgctcttaggcctcaagattccccaggccataggcgtgccagcagtgtcattgccaagctgatggggttggaagaagcacccaatgctacaggggtgctaactgttgatagctacgagcctgaaagatcaccaagaccagcagaagacacacagaaggagcatccagtaccttcccctagaagattttgtcaggatccacgcgagtcgctgccaaaagatgagtctccggcaatgaaaaccaagccttctccaagaattcttactgaatctgctccttggaggcagcaggagaagattgccaccagtagcaaggcttcacaatgccgagatgctgaagttcgaccaaggactgcatctctctatgcctacattgagagaaggggcggggggcttgagttcttggagtgcaacaaggacttcagggctctcaggatactggaagcgctgcacgcaaaggatgccaagcgccagaacgatggcaatggcgcattaacagtggctgctcagcaggcaggggatgcactgaacaccagttccagacacttccagcctcccattgtagtcatgaagccagcaagaagcactgagaagcagccaggggtttcacttgcttcagttgatccccttgcagggttcagaaacctcaggaagctgcaggccagagatgcgccttgcattggcgagcatgagaccagcacaaatgagaaggtccattctcgcatttcaagggcacaatccaagtccgatgaacctgctagccgtgcaagctctccaaggcctacaggatcatcaagccccaggacagtgcagcggaaggcagagtcagaaaggaggtctcgtccacctgtctcaccgaagtccccaagcaagaagtccagtgaagcagcctctcctggaggaagaacaagaacaaagccttctcaagggaagaaccaccgtgacaatgaggtctcgaagagtccaagaagcagaatcagcatggtgaaggagatcgacataagcatcatggattttcaaaagcccctagcatcgacaccaagtcacaagggaactccttcagttcttgcttcagatcagaagattaattcactggagaatgccccaagtcccatctctgtcctcgacacgtcatattaccatacaagactgtcatattcattcaaagatggggagacacattcttcagaggagtgctggaacccgaacagcctgcctgacacgccacagtccaagacgagcagtgaagtcagccagatcaaaccagaaaattttgaggccctcatccagaagcttgagcaattgcagtcaatgaatgatgaagttgcaaacaagaaagatcatcagtacatttacgagatactcttagcatctggcctcctgcacaaagaacttagcttcgtagccatgcctggtcaagcatggccatcaagctgcctgatcaatccagagctcttcctcattcttgaacaaacaaagccagattttgcttcagcagaccaaactgttaccaagagctccaaagctaacacagaaaagcttcatcgaagaattgtattcgatctggtaaacgaaattacagctcagaagatgaacattcattgctcggcaagtcagtcagccaagtcgcttcaattaaggaagtacaacggatggcgacttttttaaggacctgtgcacagaggttgacaggcttcaatctgagagttcagcgataaaatgctctgaagaggatggggatgaaagaatgctattggttgaggatccactgaatggaatagaagattggagcttcgatagtgaatcgccaagcacggttttggagatcgaaagattaatctacaaggacctcattgacgaggtcatatgggatgaggccacagggaagatgcaaggtggacagtggaacctaaagaggcagctgtcatttagtagtacaagctgaatatgcttggcaatacatgtttcccctgggaagcttagcaactacactacactagtgaatgtaacatcttgtattttgctgaagattaaactatagaagaaatataaatattcccc

SEQ ID NO: 16270 - DNA, 640 bp, Oryza sativa
  ref <308>: DATABASE ACCESSION NUMBER: AK066771
  ref <309>: DATABASE ENTRY DATE: 2001-12-06
tggaggcagaaagcaagcaaaaggataggaaggagccaagaacaccaagaacttgttggagctgagacagcagcaccaagcaagaaaccggatccaatccatccatccatccatagtttccaatggctggcaagtacatcgccgctggtcttgttggttcctttgccatctcatatgtttgtgatcattttatcgctgagaagaagatatttggaggcaccacaccacataccgtgtccgacaaggaatggtggcaagcaactgacaagaagtttcaagcctggcctcgcactgctgggccaccggttgtcatgaaccccatcagtcgccagaacttcatcgtcaaggatctcgagtcctaaggtaattgtagtgggagcatatatgctgaaggttgcgccgtgactaagatggcgatggctgtggctacaaactacctacctatgccgtactcccgaaccagtacgtgagtacttggtctcaataaaacagaactattttgcctagtgcagcctgaacagaacctgaagcatatctgctttagacattgtcatcttggtgattgttcttatgcagtaacaacctctactttgtgcttgtgctattgtgagtgaatggaactatctgtctgtcacactgg

SEQ ID NO: 16271 - DNA, 1264 bp, Oryza sativa
  ref <308>: DATABASE ACCESSION NUMBER: AK098967
  ref <309>: DATABASE ENTRY DATE: 2002-08-28
gtgaagccagcgtcgggccaagccaacgccgaccaccgaggcgaccggagaagcgcggcgaggtaggccccgatggcggcggcggcggcagccggagcgggcgcggacgaggaggtggacttcgagttcttccccatcatccgccgctacaagggcggccgcgtcgagcggttcatgaacatccccccgctccccgccggcaccgaccccgccaccggcgtcacgtccaaggacgtcgtcgtcgacccggccgtcggcctctgggcgcgcctcttcctcccgcctggcggcggtgctccccagggtaagctccccgtcgtcgtgtactaccacggcggggcctacgtcgtcggctcggccgccgacccgttcacgcactcctacctcaacggcctcgtcgccgaggctggaattctcgccgtcgcgctggagtaccgcctcgcgccggagcaccacctccccgcggcgtacgacgactcgtgggaggggctcaggtgggtggcctcccacgcgaacggcggcggcggcgtcgagccgtggctgctcgagcacggcgacttctcccgcgtgttcctggcgggcgccagcgccggcggcaacatcgcgcactacgtcgccgcgcgcgccggcgagcacggcggcctcgggctcagcatcaggggcctgctcgtcgtgcacccctacttcagcggcgcggcggacatctgcgcggaggggacgacggggaaggcggagaaggccaaggccgacgagttctggcggttcatctacccgggctcgccggggctggacgacccgctgtccaaccccttctcggacgccgccggcggcatcagcgcggcgcgcgtcgccgccgaccgcgtgctggtctgcgtcgccgagaaggactcgctccgggacaggggcgtctggtactacgagagcctcaaggccagcggctacgccggcgaggtggacctcctcgagtccatgggcgagggccacgtcttctactgcatggatccgcgctgcgagagagcgtgggagatgcaggcgcgcatcctcagcttcctccgcaagtgaagctcctccacgacgcgaaggcttcgccatgatggaataattctggcgctttgtgatgccgccattgttgagctcgagggctcctgtagcttgtcgctcgtcagttcaggcatcttttgtgccaattgacgatcttattcttcaagagttggaaatcatcgaacaaattggaaatttctattcgaatcatcaatcagttatc

SEQ ID NO: 16272 - DNA, 2413 bp, Oryza sativa
  ref <308>: DATABASE ACCESSION NUMBER: AK066772
  ref <309>: DATABASE ENTRY DATE: 2001-12-06
tggggaaagttggaaagcattagggagacgaagagactatccactccgtccgatgcgcacccctccgacctccttctggagcacgcttccttcccctgcaagttcccgccatttctctccccaaccccactctgtcaccccgctcgattccccactattaatttactaattaaatcatcacaaacaatcctctcccaaaccccttccatttacaccaaaccgcccccttcgcgccgccgccgccgccgccgccgacatgcctcgccgcggcgcgtcctccgcttccaccgtcatacagtgggcgcaggagatcgagcggcacacggccaaagacagcgtgcgcgtgctggtgtaccacggcggccggcggggtgctcagaagtatgatttcaacaagtacgacttcgtgatcaccacctactccaccatcgaggcggactaccggaagcacatcatgccacccaagactcggtgctgctactgtgataaattgttttaccccaacaagctgaaggtgcatttgaggtattactgtggtcctgatgctcagcgaaccgagaagcaggccaaacaggagagccggaaatggggtagcaaaaaggggacatcgaagaggagggtccaaaagaagaaaaatgatagtgatggtgaggattttgaggaacgtgatgggggatcggggagccaatcaaggggtcagtcacctctacactcagtgcggtgggagcgtattattttggatgaggctcacttcataaaagacagacgttgcaatacagccaaggctatttttgcattagaatcggaatacaagtgggctctgagtgggacacctttgcagaatcgtgttggagaactctactcgctgatccgttttttgcaaatatttccttactcggactatttctgcaaggactgcaactgcgagatactagatacccttctaaagaaacaatgtgattgtggtcactcatctgtcaggcatttttgctggtggaacaagtatatatcaaaaccaatacaatttggatcagcaagttttgaaggcaaaagagccatggttcttctaaaggaaaaggttctgaagggcatagtgttaaggcgcacgaaaaaaggaagagctgcagatcttgccctcccgccaaagattgtgaccttaaggagggactctttcgataaaaatgaaatggaattctacgaagctttatatactcagagtcgcacgcaatttgattcatatgttgatgctgggacgctgatgaacaactatgcacatatctttgacctcctaacaaggttgagacaggctgttgatcatccatatcttgtggcattttctaagacagcagaactcagtgacagaagtaaaaatgaaggaaatgagaacatggaaagccagtgtggtatatgccatgatatgacagaagatgctgtggttacctcttgtgaacatgtattctgcaagaattgtttgatagactactctgcaactttggggaatgtttcatgtccatcttgttcagtgccccttactgtcgacctaacaacacgaagttctggagaaaaggtcactccaaatttgaagggtggcaaacgctcaggaatattaagcagactacaaaaccttgcagattctaagacaagcacaaaaatcgatgccttgagagaagagataagaaacatggttgagcatgatggttccgccaaagggattgtgttcagccagttcacatcattcttggatttgattgaattctccctgcagaagtctggtatcaagtgcgtgcaacttaatggcaaaatgaacattgttgagaaggggaaagctatagataccttcaccaatgatccagactgcaggatttttctgatgagcttgaaagctggaggagtagctctcaatctcactgtggcatcacatgttttcttgatggacccttggtggaatcctgcagtcgagagtcaggcccaggatcgaatccaccgaattgggcagttcaagccaatcagaagcatgaggtttgtgatcaaggacaccgttgaggagcgtatactgcagctgcaagagaagaagcgactggtgtttgaaggcaccgttggcgactcacctgaggccatgtccaagcttacagaggctgatctcaagttcttgttccagaactgattctcccccaataggtgattactccctgtgtaggcgtagcctaggattagttactgacatgttaggggggccatgaccatgacagattgacagtgcgcgccagttgtaaaggtgctcgcatagtcgcactgcgggttcgcatgtcctcttgggtctgtggctacagaggggtgaaaccagggcgtcgcgttcttgttgaatctttgcaagaacaaaatacggagtagctgatagtttgccttttttgat

SEQ ID NO: 16273 - DNA, 2519 bp, Oryza sativa
  ref <308>: DATABASE ACCESSION NUMBER: AK066773
  ref <309>: DATABASE ENTRY DATE: 2001-12-06
ttaagtcaactggcaatttttgcacccagtgtgaagcagaagggttccggaagattacatactttcaggatcgtccagatgttatggcaacatatacttgccgtatcgaagctgataagacgttgtatccagtactgttgtccaatgggaatcttatagagcagggggatcttgagggtggcaagcattatgcattgtgggaagaccccttcaagaaaccaagctacttatttgctttagttgctggtcagttggattgcagggaggactcatttactacatgttctggccgaaaagtaacacttagaatttggactcctggtcaagatttagcaaagacagcgcatgctatgtattctcttaaagcagctatgaagtgggatgaggaggtttttggccttgaatatgatcttgatttgttcaatattgttgttgttccagatttcaatatgggagcaatggagaacaagagcttaaacatatttcaatctagacttgtgctggcatcaccagagacagctactgatggggattatgctgcaattttaggtgtcgttggacatgagtatttccacaactggactggtaatagagtgacttgtcgtgattggttccagctcactctgaaagaaggattgactgtattccgggatcaggaattctcatcagatcttggttgtcgcacagtaaaacgtatagccgatgtttctaaactcaggacctatcaatttccacaggatgctggccctatggcgcatcctattcgtccgcattcgtatatcaagatggacaatttttataccgtaacggtttatgaaaagggtgctgaagttgttagaatgtacaagaccatgtttggagcttcagggtttcgaaagggcatggatctttacttccaaaggcacgacgggcaagctgtgacttgtgaagacttttatgctgcaatgtgtgatgcaaataacacccagctgccaaactttttacaatggtactctcaggcaggtactccaactgttaaagtgagctcttcatacgatgcaagttctcagacattttctctgaaatttagtcaagaagtgccacctacccctggccaaccagttaaagagccgatgttcattcctattgctgtcggacttgttgattctaccggaaaggatatgcccctaacttccatttacagtgatgggatgctccaatcactcactagtgatggccagccagtcttcactactgttcttcaatttaataagaaggaggaagaattcatatttaacaacatacctgagaaaccagtgccttccttgttgaggggatacagtgctcctgttcgtcttgattctgatctgactgagagtgacttgtttttcctacttgccaatgattcggatgaatttaacaggtgggaagctggtcaggtgctgtcacgtaaactgatgctcagtcttgtagctgacttccagcaacagaaaacactggccctgaaccctaaatttgttgatggacttagatcaatcctgcggaacacaagcttggataaagaattcattgcgaaagcgataactttgcagggtcaaggggagattatggatatgatgccagttgcagatcctgatgcagttcatgctgtccgtacctttattaagaaggagcttgcccttcaactcaaagatgaccttctttcaacagtgacaaataacagaagttctgaagcttatacatttaaccatgatagcatggcccgccgtgcattgaaaaacacatgccttgcttatcttgcatctctgaatgaaccggacaccactgaacttgcatttgttgaatacaagtctgctactaacatgacggagcagtttgctgcactagcagcattgtctcaaaatccaggccaagttcgtgatgacacccttctggacttctataacaaatggcagcatgattatttggttgtaagcaagtggtttgctcttcaagctacatcagacatccctggaaatgttgctaacgttcaaaagttacttggtcaccctgcttttgacatgaggaatccgaacaaggtgtattcgctaattggaggattttgtgggtcccctgtgaatttccatgcaaaagatggctctggttacaagttcttgggtgaagttgttttacagctagacaagataaatcctcaggtggcctcccgcatggtgtcagctttctctcggtggaggcgatatgatgagagcagacaagctcttgctaaggctcagctggagatgatcgtgtcagccaatgggctatcagagaatgtgtacgagatagcttcaaagagcctggcagcttgaataatcccgtgagtgaacaagtcagtcggtcctgcctctcatcacatgacatccacacagggtgctaaaagtgtagttaaactgaatatgtttatgtggcaagagtaaaagaaggctgcttttagactggtacaaaactctgttgcttatagtatcgcagaccccaaaagtaatgcaattctttcttacgcg

SEQ ID NO: 16274 - DNA, 978 bp, Oryza sativa
  ref <308>: DATABASE ACCESSION NUMBER: AK066774
  ref <309>: DATABASE ENTRY DATE: 2001-12-06
gaatggcggtgtccgcctcgttgccggcggcgacgccggcggggaggcacgccgccgccgtgtacgtcgcggcggtgcccctgcgagggccgaagggcccggcccaggccctgatgtcggcgggctactcgctgggcctctgggacctgcagcacttcatggtgctcctccggcccgacccggcccgagcccaggcgctggtgttcgatttccagccacgggacccggaggacgcgctcgccgccttcgccgtgctctcgcggagcgaaatccccggagtggtccggaggaggacgctgcggagggtcccggacacgaggtgctggctcgtcggccaccaccgcagcggcggcggcgccggcgccgccgcggcggtgctcgccgccgacgcgttcaccgcgcggtggccgaccgacctggtcgtcgggcggcacgactgccgagacttcaccaacggttggtctgccacctcgtgatggagttgatgcgtctcgatcgcttcttaaaaaaaaaagaaaagaaaaagaaaaatctcatttagttatctgaaaatcgtcgatgactcaatcgcttctaaaatctcttctctatttttttttggttctgattattgcaagggctcgtggaagaactgacaggtgagaaacgtgtcttggacgccctcagatcgtcagctgccaatggtgattggtgagagtgatcaatcagtctagagctgtgaaatgtgaactgctcggatggagattgaagcaaaattggtgatacttatcggtataatcgggtgaagtttttttactgaagcgtgtaggttcagtttgttactactagtttcttttccatgcccgacaacaattttaccatgtgtaatcatttactggcaaagtggagagaaaaatgatgacacccacagaagtatgtgtagagtggtgaccatgtagaacggtttagcatacaaatttatcctgaatctcgtttacc

SEQ ID NO: 16275 - DNA, 1841 bp, Oryza sativa
  ref <308>: DATABASE ACCESSION NUMBER: AK066775
  ref <309>: DATABASE ENTRY DATE: 2001-12-06
gattcctcctctctctctctctctccttttaccctttcccatagtctccttctctcttccaaatcaatcaataaactagcaaaagtcagcgcctccctcttatctcctctctagagcccaagaaaccaccaccaccacctcctcctcttgaggattttcttgatttcttctcgacggccatggaggaggagctctgcggcaacaactgggacctcgacgccgtcgtccgcctcggctgctgccgacggaggatctctccggcggcggtggcgcagcaggtggatccgttcgcgtcgttcttgcagcagggggtggcgatggaggttgcggcggagaaggaggtcggggtggaggctgcgtggagcttcccggagctgacggtcagggacggcggcggcggcgggctcggccgcgacgccgacgagctcctcaaggcgttctgcgccgcctttccttcttcttcctcgtcgaagtcgtcgcctctgccgacgcctcctcctcctcctccgacgcagccgcagccagagcagcagaaaccggtgacggtgcaggagaatctaccggctccgacgacggctccggcgagggcgtcgcagccggcggcggcgaggcaggtgccagctggcggcgtgcctagatccaagaggaggaagaaccagcagaagaaggtggtgcggcacgtgccggcggacggcgtgtcggccgacgtgtgggcgtggcggaagtacggacagaagcccatcaagggctcaccctacccaagggggtactaccggtgcagtagctcgaaggggtgcccggcgaggaagcaggtggagaggagccgctccgaccccaacaccttcatcctcacctacaccggcgagcacaaccactcggcgcccacccaccgcaactcgctcgccggcaccacccgcaacaagctcccttcctcctccgccgcctccgccgcctccgcgcagccccagccgccgccgccgtcggtggtggtggtcggcgccgggggtggtggagccgaggcggcggggctctccccgaccacaccgctgcggacgccgtccatggaggaggacgaggaggaggaggaggaggaagagctgctcgtggaggacatggagatggccggcgaggacgagctcctcttcctcaacggcggcgacgacaacgccgcattggatggcacccccatgtcctccctcttcgacatcgccgacgagcccttcttgccctcgccatggacggagcccaccgccgccggcagctagctcgcacagatcgccgcgccgttcttagctttttttagctcatcagctcgcaagaaaaaggaaagggaaaggaagagggaggaagagattagagcatccaattaatccgccattaatcatcgtcatcatcaccatcagcagcagcatactaaaaattagttgtttagcaatggtagcagtaggagagcatcaaatccttccagttcttggctgatcaaaacaaccctttttttctctctctttttatatttcctaggcaagcttgagagagactttgcatctcttcttttctttcttttttttttcttttcttcaccttaggtgtctggttttttttttttacatttgtaaatagaaagtggtagatgatgaaccaacaaaaggagatgaaacaaaaggggaaaaaaagatgatggtgtgtatcatgtagtactatctctctgcatggatgcagcaggggtgctttgctcttcttggctcttcctttctctgttcaacaacctaacctttctgcatgtagctcccttgggatgtttgtaagcttgaagaagagagaaagaagctccctctaatggc

SEQ ID NO: 16276 - DNA, 1571 bp, Oryza sativa
  ref <308>: DATABASE ACCESSION NUMBER: AK066776
  ref <309>: DATABASE ENTRY DATE: 2001-12-06
ggcttaaacccaagctctggctctctcggtaggttgccctcgacctcccaccccttccatggccgcgccgggcgcgtgcctggcgtcgcgctcgccacccgccttcctcgccggcgggttcctcgctgcccgccctgccgccgtctctcccatcccctcccgctccgggaaatcaatcgcaccgagccgacgctttatcgtgtctaataaacttgcttgggttgaagatgagttagtggagataacagagtcacaagagccaagctccgcaagttcaaagaaaaggccacctttgaggcgtgggaaaatctctccacaacttccggtgccagaacacattccgagaccatcttatgtaggttcgaatagaccgcaagaactatctagtgtgcgccaaatacacagtgctgaaggtatcgctggaatgagagctgcttgcaaacttgctgcccgtgctctggactttgctggaacattgattaagccatcagttactacaaatgaaattgacagggaagtgcataacatgataattgaggccggtgcttatccttctcaacttggctatggtggatttcctaaaagtatctgcacgtcactaaatgagtgtgtctgtcacggagtacctgactcaacacaactgcagaccggagacatcatgaatgttgatgtaaatgtgttcctgaacggataccatgggggtgcttctagaacatttgtatgtggagaagtggatgactctatcaggcattttctgaaggcagctgaagaatgcttggagaagggtattacagtctgcagggatggtgtcaactacaaaaagattggcaagaaaataagcaagcttgcttatttttacggctattatgtggtggatcgttttgttggacatgggattggacctatttggcattctgagccactaatcctacatcatgccaatgacaactctgggcgaatggttgaaggtcagacatttacaattgaacctattcttacaatggaaaaggctgagacagttacatgggaagatggatggactactgtcactgccgatggcagctgggctgcgcagtttaagcatactgtactagtcactcggacaggggctgaaatactgacaaaactttgacatcttctttattatgataagaagttgttgggccatttaccttgagcatgtttatgttcatataacagccccagccccccgctagcagccgtatcctaccgaaatgtctctttggtccacatgtggcaggattacagatcacaggctgaagagctgatcgatgagatctgtgatgaaagttctgtaccaggcgagtggcttgtgcgaagggtttgcggatccttagaattttgtgtgtggcatactggcatatgatcagttactgacgtattgctaggcatgtaatgtgtaaatagtccttaatttgttttgtttcctccttaatacaacgccgaatgctgcagtcgcttgcattgctgttggtttgcttgacctgctgcagcctgtatacaaattgccaatgccaagcagaatccccatcacgaattcacgatgggcc

SEQ ID NO: 16277 - DNA, 2082 bp, Oryza sativa
  ref <308>: DATABASE ACCESSION NUMBER: AK066777
  ref <309>: DATABASE ENTRY DATE: 2001-12-06
gtttctgagctcgcagttctactagtttagtttttgcgaagtgttcttctccaaatcacctgagaaataggtgtcgattttcagaactagcgtgctagccactagtgtggccatggaagtggtttcttccagccactcctgcttggcatttaaccgaacacctagcagtgcttggaggtttccggggaatggtcttggtccagggcatgcaaagctcactcggccaagaagtgcaattctttgtgtgcggtcagggacagcttcgaatcctgctgattctgggaaagttcatgcgagccatgggttctatgtaagtgatgtcgatgcagctctccaagggatcccgaagaaagtcggtgagatcgagaagatgatcattccgagcttgccagaaggacctgaaagctctctaattagtactggtttctgggaatggaagccgaagctgagtgtatattatgaaaagtctggcatagacaatagcaaggcaccgtctgtgctctttctaccaggttttggagtgggaacgttccattttgagaagcaattgaaggatcttggccgtgattacaaagtatggacaatggattttctagggcagggcatgtcgttgccatgtgaagatcctgctcctaagagcacatcaggagagctagatgaggacacatattggggttttggacaagaattacaaccatgggcggaggagttggtgtattcgatagatttgtggcgtgaccaagttcagcattttattgaagaggttattggtgaaccagtatatattgtggggaactctctgggaggttttgtttctctatatcttgctgcatcctgtccacaccttgtaaagggtgtcacattacttaatgcaaccccattttggggattccttcccaaccctgctacatctcctcgcttgtcgaagatttttccatgggctgggacatttccacttccatcgtttgtgaggaaacttactgaaacagtgtggcagaaaataagtgatccaagaagtatacagggcatactcaagcaagtatatgctgaccactcaacgaatgtggacatggtgttctcgcgtattatagagacaacacaacatccagcagctgctgcatcatttgcatccattatgtgtgctccaaagggacaaatatccttcgaagaagctctatctaggtgccaaaggcagggtattcccatatctcttatgtatgggagagaagatccttgggttagacctatttggggtattaaagtgaaacagcaggtgccagaatcaccgtattacgaaatcagtcctgctggtcactgccctcatgatgaggttcctgaggttataaactacttactcagaggatggctaaagaatgtcgaatctgagggttcagttgcagttccatttcttgaagaacccagctatgctgaaaatggtgtatcaagggagctggaatttgttaggggaggatcaaaaaaatctgtccatgtgcgactctttggttctaaaatttccttatggagccaacttcgttcgcttttgaagtccaacacatgggtaatatctagataagatagattgtccatacaagtatgatgttagaagcttcagtcaaatattgtattcattattctttatttaaagtagtcagtttgatgtctagaactctagatatacccagtagacaggattttgaacatttctagtggatgtaaaaatagcaagcttcaaaattcttgtgccagaacaaagggagtagccaagtttagtccttgtttgtataggctatcaatctttatcaagttcaaattgtgatttctgtataagcagaaaaattggtatcatatgccattgttataggatccacacttcactgtccttagaactttcagttctatatcaactcaggtgctttttttcaaaaaggtagaatggaccatgtggaattgtggattatgttgcggcttaatggataactcgtcattttgacaggtttaagttatgttagattgttaggtgcaattttgtcggaattgtagatccgccattgtgttaatatgtgaaagaaacagcgaaagtgg

SEQ ID NO: 16278 - DNA, 2177 bp, Oryza sativa
  ref <308>: DATABASE ACCESSION NUMBER: AK066778
  ref <309>: DATABASE ENTRY DATE: 2001-12-06
gcttccaacgccggccactcgtctcctcctcctcccacctcccgtttcccccgcgccatcctcctccgcctcgccgccatggccgcgaccccgccgtcgtcgcagcaccggcggccgctgtcctcctccgcctccgccgcctccctcgctggcaagccgcgggggggcgggctcctgctcgggcggtacgagctcggccgcctcctcggccacggcaccttcgccaaggtgtaccaggcgcggagcgcggattccggggagccggtcgcgatcaaggtgctcgacaaggagaaggcgatgcggcacggcctcgtcccgcacatcaagcgggagatcgccatcctccgccgcgtccgccaccccaacatcgtgaggctgttcgaggtgatggccaccaagtccaagatctacttcgtgatggagctcgtccgcggcggggagctgttcggccgcgtcgccaaggggcggctcaaggaggacaccgcgcggcgctacttccagcagctcgtctccgccgtcgggttctgccacgcgcgcggcgtgttccaccgcgacctcaagcccgagaacctcctcgtcgacgagcacggcgacctcaaggtctccgacttcggcctctccgccgtcgccgaccagttccaccccgacggcctcctccacaccttctgcggcacgccctcctacgtcgcgcccgaggtgctcgcgcgccgcggctacgacggcgccaaggcggacatatggtcctgcggcatcatcctcttcgtgctcatggctggctaccttccgttccatgaccagaatctcatggccatgtaccgaaagatttacaggggggaattccggtgcccgagatggttctccaaggatctttccagtctactgaatcgcatccttgacacgaacccagagacaaggatcactgtcaaagaggtcatggagagcaggtggttccagaagggattccggccggtcagattctatgttgaggatgatcaggttcacagcttggcagatggtgataatgatatgccggagttggaacctagtgagcctcctcctcctcctccgtttccgccgccgccgccgcagcaaggtgatgacggtgaggagtcgggatgggagtcggactcatccgtggcatcatgtcctgccacattgtcatctgaggagcgtcggcaaagacctctcgggtctctcacacggccagcaagtcttaatgcgttcgatatcatatcgttctcaaagggatttgatttgtcggggttgtttgaggagcgagggagtgaagtgaggttcatatcggcagagcctatgcaaacaatcatcacaaaattggaggagatcgcaaaggtgaagagcttcttcgttcggcgaaaagactggcgagtgagcatagaaggcacgagggaaggtttgaagggtccattgacaatcggcgctgagatatttgagctcacaccaagcctggtggtagtggaggtgaagaagaaggcaggggataaggaagaatatgatgacttctgtaacagggagttgaaacctgggatgcagcatctcgtacaccatatgggatcagttccaaatataccttctgatacggagtagtttgaactaagaaaggtagttctctttcttggaggggtataaggaaattttggattaaaagtatatgtctatgcaagcatgaacacctgagaggcaaaatgatacccaattcctttagaccagtgtccatgttttggtgctgttcgtttcttcaatcgaaatgatgtatgctagtgtttgcatgctaatatcagctatcaaatgtctgtttttagctgttacagtttaaagagagtgacaaatctgagtatatggcatcagtatcaatgaagtggactagacttttatgtatgccgcagcagtgcagccatttgtatttctatgctgccagttagttctctgaatacatatgacatcaacactgaagaaattagctcgaagtgctctaaagaagttctgttttgggattaaaattgtaaatatagggtgaatgaataaattagacaaagcgttagcattctaagtatctagttgtttattacttctgtgcatcaatttgaatgcacacttctgtataccattgttgtgctaccttttgtttaagtaactcaaatactgtatactggtgttgt

SEQ ID NO: 16279 - DNA, 3384 bp, Oryza sativa
  ref <308>: DATABASE ACCESSION NUMBER: AK066779
  ref <309>: DATABASE ENTRY DATE: 2001-12-06
gatttccagcctccgccgacacaacgctaccgcagacccatccccaattccccatttcccatccaggagagaaaaccgagcgatctcgctctgacctccgagaggcaccattgaggagatggcggaagtgagcgcggcaatggggtcaaatcgttccgtccgcaagaagcttgcggcgttgctgtccgacgagcgcaaggatttcatacgggtgcgtagcaaggtaaagcctctgattgatgctcttgaatctgtccatgcctgctttgagaaattgtcgctcgaagatgagaagaatcttgatgcgttacaagaagcctggatgatggatttacgggagctgtcctatgacatggaggatagtcttgacaggtttcttgtcaaatctgctgctgaaccgggtagctgtaagaagctcttcaagatcttgttaacgaagatcaagggtagcaccaatgggattgttaaggtgatccaagatatcaagatgccagtcgaggagctcaacgaaaggatgaacagattcaagctcagtgatgaccgtcatgtaacatacgacccgatcaagatcgactcaaggatgaacctgaaccatcaaagaagctggtggtggtctctattgttggtcttggaggattgggcaagacaactctagcaaaccaagtctatcatcatctcaagccggagttcgactgctctgctttcgtatcagtgggacaaaatcctgatgttctaaagatcttggataatatccttagtggactcacccatcaaccttatgccaccaccgggtcaacagtgcaagtactcgttgagaaaaccagaagattcatcgcggacaaaaggtaccttgttcttcttgatgacatctggaatgcaagagattgggatatattgaggtgttctctgcctaacaatcacttaggcagcagaataataacaacaacacgcattgtcgatgttgctagatcatgttgcagccacaaagaggatcacatctacaaaatgggtcctctgagtgatttggattcgcagagactattttttagaagaatattcggctcagatgatggttgtccgactcaacttaaaaggatttccatggacatattgaaaaggtgtcgaggtttgccattggctacacttactttagctagtattctagccgacgtacccatgttagcagaaaaatggaagcaagtgcataattctattggtttggcaactccaggggagaatatgaatcgtatattatctttgagtttccatgacctccctaatcatttaaagacatgtttattgtatttaagcatatttccagaagattatgtaattgagagagaacagttagtatggagatggatagctgaaggtttcattcctgaaacacgtggcattcctttagagggagtcggaagtgcatactttaatgagcttatcaatcgaagtatgattcagcctgctgatgttcaatatgatggaacagtgcaaagttgcagagttcatgacatgatacttgagcttattgtgtcaatatcaaccaagattaactttgttgccgtactacataaagatcaagatgaaacgagatttacagattacaagaccaaggttcgccggttagcccaccagtccaactgtattgagaaattattggaacggatgagcagggatgacttgtctcatattcgctctatcatctccttcgattatgtcaaaggaatacctcatcttggtgatttccaagcactgcgggtgttggatttaggatcttgtagatcaattgaaaaccaccatattgagaatctagagatgttgtaccaactcaagtatttggatctaagccgtacaagcatcagtgagcttccaatgcagatagataatctcaggtatttggaaacactagatcttcgagggtgtgccatagaaaaattgccagccagtactgttagattacaaaacatgcaacgcctgcttgttaacagaagtgtaaaatttcctgatgaaattggacacatgcaggccttacagacgttgttgtttgtctcaatgtcctgtaactccatcaaatttgtggaagagctcagcaagctgatcaaaatgagggtactcaacataactttctctaaacctgttgacatggttgatgaagtaaggaagtacacagattctttggtctcatcactcaacgagttgttcaaccttgaatctctaaagattgatcctgaagaaggttgttccctggactcactaatgggagtgtacctaacttttggctgtctcaaaaaacttgtcattggctacatttctaggatcccaaaatggatcaacccatctatgtacaatctagtccacctggaactgaaagttgacattgtgcgagaggaagatctccattctcttgaactcttgccctgcctgctatatcttcagctggaaatgacagatggctccagcaaaatgctcactgttggcagcgagggattccgatgcttaagagagtcgcaattcatatggaagaatgatgggatgggactagtgtttctagaaggtgccatgccagagcttcaaacattgcatctttacttcagaactcacgaaacaatagccaattattctggtgttgatggcaatggcatcgagaatctttcgcgcctcaaaaaactctgcgttgatgttgattgtagtggttcaactagggaggaggttgaggctgcggaggattccatcaggaaagcagcagataggcatagaaccaaactcactcttgaaatccgaagatggtgtgaagcatgcatgatagaggaagaagcacatgatggtaatgcggaatttccaagcagatccgtgaataggagagcaaatccagtcagagttgccttcagggtgagggcagatcggagaaacaggaataggactaggagaaatagaatcactgcaccatccgcatcaacttagggttcattcttatgagtgttctgagtctgaattctgaaaagaccatcaaatacagaggaaaaaagatgctgtaatcttgtatcgattggttccgtttatatatcgatttgtcagtgatgcattttttgacctgtacactcaagatcaagaaggaagtcacgaagcattagaattcagaactcagaagtgaaccaaatgaagataagccttcagtgcataggtgtccttgcaaatggatgcagattgagcattttcatcagaccgattacaatcagaaggatattatatgttcgtgttataagaaggcacggtctgtgccagaaataccagtacatagatattcttttggtgtgatttgcttttctattggagaatgcacttatttgaatttgtgataataaatatatgacattgcaattcaaatat

SEQ ID NO: 16280 - DNA, 1019 bp, Oryza sativa
  ref <308>: DATABASE ACCESSION NUMBER: AK066780
  ref <309>: DATABASE ENTRY DATE: 2001-12-06
gacttgtaagagtcatacacgattgcgcatggagctggacaagaaatttaaggtgctttgcctgcacggcttccggacaagtgggagttttctgaagaagcaaatcagcaaatggaatccttccatcttccaacaatttgacatggtcttccctgatggcatattcccagctggagggaaatcagagatagaaggcatatttcccccaccctactttgagtggtttcagttcaacaaggacttcactgaatacacaaatctggatgagtgcatttcatacctgtgtgattacatggtgaaaaatggaccttttgatggcctgcttggattctcccagggtgcaactctttctgctcttttgataggttaccaagcacagggcaaagtactgaatgatcatccaccaatcaagttcatggtctcaatagctgggagcaagttcagggacccaagcatatgcaatgtagcctataaggatccgatcaaggtgaaatcagtgcatttcattggagagaaggattggctcaaagtgccttccgaggagctggccgctgcctttgaggaccctgtcatcataagacatccccagggccacactgtccctaggcttgatgaggcaagtgtgaagcagctttctgagtggagctcaagcatcctggaagacatcaagaatgcagatgatgttgccaaggcttcaattgtggagaagccatctgagggtaataccgtggcagagtccggtgaaaacctggtggagcaaattgcagcttgagtatggtaactgacagtcttgacactgtctggaggctggagctgattgctgcttcaaattaaaccggattagtccgtcatgaaactcgatctatccaaatgtttaagtctttaagagctttcttttttagcgaagatgtttaaaaactttgttaccacaaatatatttgcctgggtactgcttgtattctctgggggaactaattgaatcgactcataaccggaccaaatggattcagggattcatc

SEQ ID NO: 16281 - DNA, 2171 bp, Oryza sativa
  ref <308>: DATABASE ACCESSION NUMBER: AK066781
  ref <309>: DATABASE ENTRY DATE: 2001-12-06
gaatgatgcatttatttcatatttgcagagatttttcatacaaccagctcactggaagctttccctcctgggctacccagaacaacttgcaattgaatttggtggcaaacaactttgatcttggcagcaccaacaacggtattctacctccagggctaaactgcctccagaaagacactccatgtttacgaggttctccagaatattattcctttgcggtagactgtggtagtaacagatctatcagaggctcagataatactatgtatgaattggatttcacagaccttggcagctcatcatattacgttaccagtgaaacaagatggggtgttagcaatgtaggaaaatatttccagtctccaaatgacagtaagatcatatatagcaatgagaagattcagaatgcagtggtttcagaactactccaaactgcaaggatgtcaccatcgtctctgagatactttggccttggacttgagaatggaaattacactgttctgcttcaatttgcagagttaggttatccagactcaccaacttggaaaagcttaggaaggagagtttttgacatatatatccagggtgacctaaaagaaaaggacttcgatataaggaagatggctggtggaaaatctttcactgctgtttacaagagttacacggcaactgtgtcgaaaaacttcctcgaaatccatctgttctgggctggaaagggcacttgttgcattcctattcaaggttactacgggccattgatctcagcattaagcatcactccaaattttactcctactgtgcgaaacggtgtacccaaaaggaaaagtaaagtaggtgcaattgctggaatatcgattggtgcctcagttgtaggattagcagccctatttggaatatttatgttcataaagaagagaagaagacttgcacaacagcaaggagaactgtacaacctagttggacggcctgatgtcttcagtaatgctgaactcaagttagctacaaataattacagttcccaaaacattcttggggaaggtggatatggaccagtctataagtgtatgctacctgatggaagagttatagctgtaaaacaactttctcaatcatcccatcaggggaaaaaccagtttgtgacagaggttgcaacaatttcttctgtgcaacaccggaatcttgtcaaattgcatggttgttgcattgacagtaatacacctttgttagtttatgagtaccttgaaaatggaagcctagatcaagcactcttcaggaagaatagcttaaaactggactgggcaactcgcttcgagatcattttaggaatcgcaagaggactaacttatcttcatgaggagtcaagtgtgcgcattgtgcatagggacatcaaggccagcaatgtcctacttgacaccgacctcaccccaaagatatcagactttggactcgctaggctctatgatgagaagaagactcatgtcagcacggggattgcgggcacatttggttatctggctcctgagtatgcaatgagacgtcatttgactgaaaaggttgatgtttatgcattcggggtggtcgcattagagactgtcgctggtcgatcgaacactaataactccatcgaggaaagcaagatctatcttttagagtgggcctgggacctgtacgaaaaggagcaagcacaaagaatcgttgatccaagacttgaggatttcaataaagatgaagttctcagagtcattcatgttgcgctcctctgcacacagggctcaccaaatcagcgaccgccaatgtcgagggtcatggcagtgctcactggagatgctgaggtagttgagatggtgacgaaaccgagctacatcactgagtggcaatatagagatggaaacagcaccaactcagaatctaccacctcagagttcagcaggcagaaggagatcgaccctctcaccatgtcgccaacaatcaccggatctagtcatgatggaaggtgaatgctgcaacctgcaggtgatcttggtttgaaatgattgtatgtaaatgtaagacggagctaatagtggaacttaattattctgaagtatgtatgatgataaaagtatttactccttgtaatttgtaacaggtcaaatagagtagtatcctagtatatatcttagaaattaatc

SEQ ID NO: 16282 - DNA, 2514 bp, Oryza sativa
  ref <308>: DATABASE ACCESSION NUMBER: AK066782
  ref <309>: DATABASE ENTRY DATE: 2001-12-06
gtggtgtctgggaggacccctgggcttcatggcacagtatggtctgggacctaacctgttgttggtccgggacccctctcgttggcatatggcaaccctgtgttggctttggaaatgccttgtcgtgaaagccccaagtcaccagacgtgtttgatccgcacgggctaggtgaccaaggctagtaacgtcatgtaggtaaagtgtaccccctctgcagaggttaacaaactgttcgaacagccatgcccacggtcatgggcggatgtgaggtgattccttagcgtagtttttgttttacccagctttgtgaaaagatgttgaggtttgggaaacctgatgtttggataaagcaagcggatgtcagggagacagcgggacagggagtccctgagaatgactggttgtttggagacaaccaaaactctgaaagattggaaaattggtttggtttgggaaaccaactttgaggccaactctgggagttgtgtaaatcttgcaaatcaaatttggttacgtctcgcccccaaccaagctgagacttgtctcgctctgtttgtggaaagcacacacttagattgttgaaaacttgaaaacaaatttgattgctaaaataacagcctttccttgaagcttgaattaaccacctaagtccccctggcttgctgagtacataagtactcacccttgctctatatatatatagttctgccagctctgaaggtgaagttgaagtgaagtgaagattaaggtttcgtcctagttccctagtattgcctgtggtgttgggtgttagaccgttggttccactgctgctgctgttgttggtgtttgcctcgtccgtgtcgtcggttgtattctcgggttgtcccgagctgcaacctaagtcaaggtaaataaatcctctatttattttaaggattgcaatgattcatatttgtcaccgtgggtaccagcgctatgtcctgggactggtactgtgatcgcggtttcgtaggaagcggttcgcgccgtttttcctacgacacgctcctgtcaggtgccgttgtacggcggtgccggatcagggtgtgacacgttcccgtccaacccagccccgaccctccccgttgccacccctagttgtaatgatggtttgtgggttggttaagctcagaaaccacacataaccgcaattaggactccagtatcttgctccacgtgttggcagatggcgaggggatgcaaaggcagttcgaccgaacttctggctcacctaccggccactcattcggttgggaggctgcctggtgggcccccaacatgttgtactttggctggactcaattttaggtggttttgattgacacgtggggcctccaaaccgtgtaatcgtgtccgattgtccggaggtgtatttggtcacatggcggatgatttttgtccatatatttacctatatataaatattcaccaagactactacctctaagtttggtattctattttatattctttcaattgttattatgcatgaattgataaatcgaatttggtacttaaggaccatcaacaccatccaagcaacaaatggagacaccgacaatagcatccatccaagcaaaaagaagttgtgataacaactaccttaattcaatctttgaatttttttttttgcttaacccgactactaccacccatccaagaacgaacaatcaagggagacatctccgacgaccaccaaaccagccaatcacccgtcactatcggttggtagcgcgccggagaagaagttctggagcatgatgaggttcacaagaatgggggcaatggtcctgttcttttctccaataaaagttggatgaagattaagattttcgtggcacgcttttcaaattgctaacggtacgtttcatgcgaaaaatttatatatgaaagttgctctaaaatatcatattaatctatttttcaagtttgtaataattaaaactcaatcaatcatacgttaataccaccttgttttatgtaaaaaacgtattcttcatcttcatctttattttcagaagaaaagaacatcaccaatgtaattacagacagtgctccagagtcctcagccatcggcgtatcctggatctaagtgaaggatagcgtaatcaacatgacaacgagaagcgaggaaaatggtgacgccgtctcttcttgccacttgcgacggcgatggctgagggtgctctccgaccagatcggtgtctccattgcccgctgacccacatgtgcacggtggagagagatggggagacagaggaatgaggaagaagaaaaggagaaaggatgggaggtagattcaacgaaattctttcaattttcatggtacgatttaccattgtcacgtgggacaaaaccacctaactaaaccgctgggagactcgatttgcactagtatatctatatatctatctatcgattatattattaaaacagttttgaaaggaggcaccacgttcgctgtgggggctagaaattcccacattaatcgg

SEQ ID NO: 16283 - DNA, 2726 bp, Oryza sativa
  ref <308>: DATABASE ACCESSION NUMBER: AK066783
  ref <309>: DATABASE ENTRY DATE: 2001-12-06
ttggctcatcagtctaatcccacccatttcggctgcgctggctgccaccatgtggagcctcgccgtcgcgagcccgcaccccgccgccgccttcgccgcggcccgtccccgccgcggccctcgccccgccgccgccccctcccacagaggtgtgaatccgcagcggtggcgatgtgagaagactcaggcatggtcgttttggagctctctgtgggccagcgaccttccaggaggactttatggggatgtttcgaagaatatactcaagccagctgctgctgtttcagttgagcaagctgaagctagtgctcaccttccaaaaggtgacatgtggtctgtgcataaatttggtgggacctgcatgggaacctcccagaggattcagaatgtggctgacataatccttcgcgacccttctgagaggaaactggtagttgtgtctgcaatgtctaaagtcactgacatgatgtacaaccttgtaaataaggctcaatcaagggatgattcttatatcactgcacttgatgaagttttcgagaagcatatggcagcagcaaaggatctgcttggaggagaggaccttgcaagattcttatctcagttgcacgcggatgtcagtaacctaaaagcaatgcttcgtgcaatttgcatagctgggcatgccacggagtctttctcagattttgttgttggacatggagagatatggtcagctcaattgttgtcatttgccataaagaagtctggaaccccttgcagttggatggacacacgagaagttttagttgtaaatcctacaggttccaaccaagtagatcctgactatttggaatctgagaaacgacttgagaaatggttcgctcgacagccagctgagacaataattgctactgggtttattgcgagtacacctgaaaacattcctacaaccttgaaaagagatggaagtgatttctctgcagccataattggttcacttgttaaggctggtcaggtcactatctggactgatgttgatggggtctttagtgcagatcccagaaaagttagcgaggctgtcatattaagcactttatcatatcaggaggcgtgggaaatgtcgtattttggggcaaatgtattacatccgcgtaccatcatacctgtgatgaaatacaatatcccaattgttataagaaatatgttcaatatttctgcccctggtaccatgatctgccagcagcctgcgaatgaaagtggtgatttggaggcttgcgtcaaagcatttgcaactatagataaattgtctcttgttaacgttgaaggaactggaatggctggtgttcctggtactgcaagtgccatatttggtgctgtgaaggatgttggagctaatgttatcatgatatcgcaggctagtagtgaacactccgtatgctttgctgtaccagaaaaggaagttgctgcagtttctgcagctttgcatgtcaggttccgtgaagcattatctgcaggcaggctatctaaggtcgaagtcattcataattgtagcatccttgctgctgtcggcctgaagatggcaagtactcctggggtcagtgcaaccctttttgatgcacttgcaaaggcaaatattaatgtaagggcaatagctcaaggttgtagtgagtacaacatcactgttgtattgaagcaagaggactgcgtaagggctcttagagctgctcactcaaggttcttcctctccaaaaccacacttgctgtcggaattattggacctgggttgattggtcgtactctccttaaccagctgaaggatcaggctgcagttcttaaggaaaatatgaacattgatctgcgtgtcatgggaatcactggttcgaggacaatggttttgagtgatacaggaatagatttggcccattggaaagagcagctacaaactgaagcagaaccagccaaccttgacaagtttgttgatcatttgtccgagaatcaattattccctaacagggttttggtggactgcacagcagacacaagtgttgcatcccactattatgactggttaaagaagggaatccatgtcatcacgccaaataagaaagcaaattcagggccactggacaagtatttgaaacttaggactctacaacgtgcatcatatacccattacttctatgaagcaactgttggtgctggccttcctatcattagcactctgcgcggtctcctggaaacaggtgacaagatattgcgtattgaggggatcttcagtggaacattgagttacattttcaacaattttgaaggaacaagagctttcagtgatgttgtttctgaagcaaaagaggctggatacactgaacctgatccaagagatgatctgtctggaactgatgtagccagaaaggtacttcttccatcataggcttatcaacctacataactatacttcctattgactactctgcataacctgcttctattggtggttttgagtaacacgtcataagagatggaaaataattttatgtgccttcatgcttcaggctactctaccaggctcctcagtctttacactcttcagttgtatatctgtcttttcttttttttcttttttttttgcggggcagtacatatctgtttgaatggcacttaggttacactgttgaaaataaataaaagggaaccacagtgtaggtactgaactggaacaaattatatttttgtttcctcttgagcct

SEQ ID NO: 16284 - DNA, 1032 bp, Oryza sativa
  ref <308>: DATABASE ACCESSION NUMBER: AK066784
  ref <309>: DATABASE ENTRY DATE: 2001-12-06
gaaggagaggaaggtgttgatcgaatcctcctccaatcgcgcgcgattcgatccccgttgctggccgctcgctcgctcgatccctcatccgatctgaatcccccgatctgatggcggccaaccccggcaacaagatccgcaacgccaagctggttcttcttggagatgtgggcacgggcaagtcgagcctcgttctccggtttgtgaagggccagtttgttgagttccaggagtccaccatcggcgcggccttcttctcgcaaaccttggcggttaacgatgagacggtgaagttcgaaatctgggatactgcagggcaggagaggtatcatagcttggctccgatgtactatcggggtgcggctgccgcgatagttgtctacgacatcacaaatgcggcctctttcacacgtgcaaaaaaatgggttcaagaacttcaagcgcaaggaaacccaaacacgataatggctcttgctggtaacaaggctgatatggtagaggcgaggcaggtgccagcagaagaggcaaagacctacgcacaagagaatggccttttcttcatggaaacatctgcgaaaacggcgatcaatgtgaacgatgtattccacgagatcgcaaagagattgcttcaaggacagcaggctcaagacacaccggctggaatggttctcaaccagagaccagctgagagggtggtgagcagttcttcatgctgctcataattcaagtgtggagtatgtgacaactacataatgccatggcctgaaatccaggagaagtgtgtatgcatcagagatgcacacaaagcttgtaaagtggctgctgccatcccagctgctgtttcttattttgtcatgttcgttctgtaaatgtgaatactagggtgtcgctgcagaaattcagatgtattactacagtgtatgctcttgcttaagtatttctcgacactgaaacagagtaaagcaaagtctagtcagattcgttttgtttgcttcaattcagatcatgcagtgagcttgctttttacattct

SEQ ID NO: 16285 - DNA, 1180 bp, Oryza sativa
  ref <308>: DATABASE ACCESSION NUMBER: AK066785
  ref <309>: DATABASE ENTRY DATE: 2001-12-06
gctgttcttcttcagccaatcggccatcggcggcggcgggctgaagagggctggagcggcggcggcgttgggcggcgagcgagggacggagcggcggcggtggcgggccgaggaggtcgtccgccgccggcgatggaggggacgccgcccaagccaccggccgcccgtcgcacgtcgccgctgagctccccccttttccactgccccgagatccgcctccgccaccgcagccctcctcgctgaggtccggaaggcatcgaggaagcactctccccaagtccccagaagaggtggatacgaacctcttgcgtaagttgtactagctcatccatccctctccacccttataagcaccacaagttcgttgttaatttggagggatttggtcttataatcaatcaaatctgccgcagcgcgtccgtaccaccgcctctacttccctcctccgctcacatcaacatgctgatcccctcggagacccaacacggattggatctcaatcctccacttcctgatgatgacaaaccacagcttatggaggtcgaggtggagttgccaacagctcattctgtaaatctatcttcaagtccgagctcgagatcaaatatgagttagtcaggacgatcactagctgtggaaatctggacgaaggttttcatggtcatgtaaattttattgcaaagggcgattgcaagaactcggaggagttatttttcgcggaagtacgctgggaaaacaatggatatatacccacttgcatggtctctcttgaagggaaagaaaaaattggtggttactatggcgccagagttcattatccaagaggtgttccaggtcttcccattgacaaacaacactgctatttctgtggagatgagcttaagcatccagaagatggaacactgtatgagagtggccatgttgcttcgagtgattattatgagtagtatgcattatctattatgtttattattttcaagttgaactaagttagtatttgtgttagttatcacactttttcaccgttgtaatgtttataaaccacgtttatatttgggttgaacttcgagttgtatgccatacagccgagcaaaagtttgagagaatcatcgttgtatgtcagcaattcgctcttgggaggagctatatttgtttaaccagatcttatcctgtttttacc

SEQ ID NO: 16286 - DNA, 2480 bp, Oryza sativa
  ref <308>: DATABASE ACCESSION NUMBER: AK066786
  ref <309>: DATABASE ENTRY DATE: 2001-12-06
gagccgagccgaccaccattcgccggaaccctaacccgccaaaacccaaaatcaaaatcgccatctcggcgaagaaatccccaaatccaccggcgaagccccaccaaaccgatggcgtcccacgccgccgtcgtcgagatcatcgacgacgacgacgacgacgacgacgacgtcgccgccgcctccacccctcccgccctccacaagcgctcccatgcggtcgccgccgccgcccccgattcccccgacgccttctccccttcccctccagacccgaagcggcggcagctcgcggcgtcaaccatcgtgctcgacgacacccccacccctccgaagcggcggccgccgccggtagctgccgaccggtccgcctccgtggtggcagatacgccccggtcgttcgtgccgtgctcgctccgcaaccgcgccattgctggtgatacgcccgattctgttctcccgagcccgtcgttccacctcgacgctcccgattccgcgacccctggctcggatgtcccgtgctccgtcgggcttgacgacattgttcctgagaccccgggcttcaactccccacgcttggctcgtcccccggccgtgcctggcttgacgtctcctatgaccgcgaggaaattttctggagtatcttgtccaatatctctggatagtgatgacgaattggatgacactgtatacagggagtctttaaccaggacgccaagcaatatggcgaagccagaacacgcaattcagccttgtactacttcctgtactgataaagttgagaatacaaaaagtacggataagaaggattattcaaaatcaaatgttggatatcaaacaaacaattctgcatgcaaaaataatggaacaaccagctacaatcaaccccctcgtgctaattctccttgtgaagattctaccttgaaggaggctgatccttttatcaataaccattgtccgcaggaagaaaatgccctaccgattgaagaaaggaagaagaaacaacaggaagagaagagactaaagaaggaaaagaaagccagagaaatcgaagaaaaaaaacaaaaacgactggaaaccaaaaagcaaaaggaagctatgaaagctgaactagcagaattgaagaagctggagaaagaaaaaaagaagtgggaatcagggaagttagctacaaaatgtattgttgctgagattgactcaagtgttattgaaagtggctcagttggaggtcatcttgtgcaaggatttcatgagaagggcctttgttttcgagtaacatctaattcaatcaaggggtcaattttatggaagatgcaaattcctaatgagtttacccaggaccaagcttcaacatcacaagtgccatatattctctttgtgcttcaagctgaggaattctgcgatcttgtaagtggtggtacattactggatcatgttcagaaagttcgaagacagtatccagaattcacaatttgctacgttactaataaactgatgagcttcataaaaagacgtgagcagaatcagtacaacaagaccacatcaaattctaatagttggaagcgtccaccagtggaagaggccttatgcaaattagcgacacactatgctagagtgcgctcaaggcactgcacagatgaagctgaagtgacagagcatattgttggcttgacatatagtcttgcgaattgcaagttcaggaaaccattgacatggttatctgtgcatgctaatggttcaaatatttctaaaggttgcgttgataaagatcggattaagaaaagtgcctggctgaagtctttagttgctattcccggagtcagtccaggacaagctattgcaattgagaagaagtacccgtccatgagatcactactgaatgtgtatatggatgacagtaaatctgttcatgaaaaagaacatttgcttgaagacttgaggttggaaggtcctctgggtgattttaagagaaggctcggaccagcatgctctaaaaaagtgtacacaattctcatggcacaaaatggagcggcagaagtggaagttgataggcgtggagcttagcttagccttccatgctcacatcgtcctaaatcatgaaaggtcgattttgtatttatggcccttttgtccatattgtttagatgaagcttcaaggtagttaatgtgatgttcttggtgctgaagccattacttgttatggctggcactttaatgtgctctctacccatcgataaaaatgaaattatcgtaaactgaagacatgacacaacttctgctagatatctggatgataggctgtgataccctattctgtgtgatagcaacacgataggtcccagcaattttgcaacttttgtaaagttcgtgactattgagaaaggttcaagtaaataggttggtactggaacctaaaaaacatattgaacggcactgcatttgtgcgtgtcggcagtgtaatgtatggtaccttaaggcgc

SEQ ID NO: 16287 - DNA, 2482 bp, Oryza sativa
  ref <308>: DATABASE ACCESSION NUMBER: AK066787
  ref <309>: DATABASE ENTRY DATE: 2001-12-06
aagtgggttccaactatatagaaagaaaggattactgcccaagctatgcttgtactgggataggcatgtcacatatcgctcagaattttaagttttagcaatgctttgttatattgtttgtgttcgatagctatccaactattcagataccctttttcatattgtagaagctgaatttgtagctcttaggcttccgcctaaatggataaatcgacatatctgaagtacacatatggttaaattttaaacatctgtgccaaagtggtattataatcactgtttatacagttaatctagatcaaacctctgcctagtataagctatccattttttccatgtgcttgcttctgattctactatgttttgtcaggtggcaatatgtgcttgaatacagtaaaaccatcggtagtctccttgggaacccagattctctttctgcttacatgattgatgacccaaagatgatccttaaggtcaaggagaagcctactagtttaaaggctgcgtgggagttgctagagatattctttgttgataaacagttgcaaacttggcttccagagcgtcttgttgattggttagccgactatgacagcctcttgaccaagacagagaacacgatatatcgcacgctgatcaatttccagaaaaagctcatcaacctgcaggttgttgaagatgatcctgattattggagtggattatcagcagctctatcggttggatggcttgatattgtggtgaatatgctacgttttcatggatcataccaattggatcagatggacagccgtgagacagaaaatgggttggttgaagctgttgctgttcttgtgtcaacaatgccacgcatgcgaccagatttgccatcgggtaaattaggccagtgttgtaaaacaagaccagattttataaaggcattggaaaaatggcgaggtcaagtaagtaaactggagtgcagtgcattctggattcagtgcggtcaccaaaaaactcgtgatggtctgaagagtttgcttcatattatgttggggaacataaagaacctcactgcttctacttcacattggctggagctctttgcttctcatttactttatataaggccattcacagtgggttttgaagggatgcatcagttagcacaaaagtgcatacagcttaaaccgtctgctgacaatagcggattgacaggcctccttactggtatcctttcagaaaatagagaggttgtcttggctgaatgcacaaaaaattttggtccttggatggtcacacatgctatggagctgctgactgctgacaatgactatgcggatatgatgttgcatgaagagaggcctaacttcggtggtataagcatagaggagctgcacaggcttgtttatgctcaagttttgtgctctcatgctttaacatggcagattgcaccaacttatctgtcctcatgtctaaaccaaggcctagggctgttggagattctgcttctgaagcaacccatacaagataatcgtgttgtattgaagactttggaaatttgccgcttgtatgagctggagaatgttagtacaaatatcatgaagattgctggcatttatcattggaaacatggtaggaaaggaactggagtttactggttccagcaagctaatgataaagttcgtcttgacagaattgctcaacaattattcgaacatattggcaagtcggtcacagatgatagttttaagcaatgggaggggctgcttgagttactaggttctgacatcggtagtgcaggtggtcttgagttccttcacaggtaccgagatttcaaaaggtcccttcagatggcacaagaaggaaggactggcgagtctgttcggcaaaccgtggagtttcttatacagctgatgagaaatccttctacacctcaacgtttctggctaccacttttacatgactcggtgaggcttctcaattgcaaaccctgcccattgttaaatgttgctgaaacgactttgttgctcaacaagctacaagaactgtcattggccaaacttcggcctgacctttccaacattcacctaccaagccatgcattgaactccgtcagattagctctagcatcaaaccttgcgcgtgcaattcttgaagaaccttaagtaatagttctatttggggtatgagtgccacatccactttgctggaagtttgacggcgttaatcgtcagttgattaccagtaactgtatgttccttgggaagaggttgaacttgtgttcactctgaatgagcaaaggttgaacttgtgttccttcatgaatgagcaattgtgtcatgcatgtatatgtaccggacattgtatttttagctttagtgataccttagatgttacttatgtacaaagaaatgctagtaaatgtattttagaatgggcacaatattgtattccttgtttcttcctctatttcttttggggtgaataactctttatggtgacc

SEQ ID NO: 16288 - DNA, 3210 bp, Oryza sativa
  ref <308>: DATABASE ACCESSION NUMBER: AK066788
  ref <309>: DATABASE ENTRY DATE: 2001-12-06
gatagtaataattacacaggttgaagatcttgcattaacatgttgctgttatgacaccgaatatatttttgagatgaaacccatggatgatgagcactcaacaacgttgtttcttcagagattttttggttttgtaagtgattgccctcaacaattcaaagaagtttcaaacaaaattgttcaaatatgtggtggtttgcctttagcaacaatcagcctagctagccttttagcaagtcagcctgtcatcttaatggatctatgtttatacatacgtaattctttaagctctgcttttaggacaaattcttctatagaaggaacgcggcaagtattaaacctcagctacaataatcttcctcattacttgaagacatgcttgctatatcttaatatgtatccagagggttataaaatatgcaaggatgatgttgtggaaaaatgggtggctgaaggttttattgatcaaatagagggccgagacttggagaaagttgcagggagctatttcgatgaacttattgacagaagattcctccaacctagcagactcaactacaacaatgaggtgtcaacttgtacaattcatgatgaggtacgagatcttattgcatacaagtctgtagaggagaactttgttctggtattagatttttaccggaaggatgtggaactttctgataaagttcgtcgactttctgtccactttggtgacataaagtatgcaaaaataccaacaaacatcagaacatcagaagttcgatcacttacattttttggattatgtaagtgtatgccttctcttacagagtttaagcttcttcgtgttctaaaccttcaattatctggtcatgttggtgatgaactcttagacctcagtgggatttctgaactatttcaactgagatatttgaagattgcatgcgatattcgcacagaactaccaagccaaatgcgagggctaaaatatttagaaacgttgcagatggatacaacactcactgctgttccttgggatattatctttctcccgtgcttgttacacctccatcttcgttttgatatgaatctgattgatttgatgggccacatgacacctcccagcgaactaggatcaagcagtagtaactcatcacccagtgggggcatcattagcaatctgaacaacgtacgggatattcatctcaccttctgtgcactgccttccaaacatctagagagaaacatggaaattttgggctctttgcttggaagacttggtaatctgaaaaatctaactctagtttcttcttcctctcaaaagaaaattgcggcttcaggagcctcagaagtaactattttgtgggataatttggcacctccacctcttctccagagatttgagtggttgctgcacagctgcatcttttacagagttcctaagtggattggagaacttggcaacctatgcattttaaagattgcagtaagggagcttgtaaagaacagtgttgatattctcaggggattgcctgccctcatggctctatctttgaatgtgcacagagcatctgtagaaaacattttctttgataaggtaggattctcagttctcaagtacttcaagtataattgtagtgtaccttggctgaaatttgaggcaggggcaatgcctaatctcaggaagctcaagttaggtttcagtgcccttggggatctatatggtactgcacctatcaggattggacacttgttaggcctcaaagaaatctcagtaaaaattcatggtgcaagtgtcgacgcagagtctgcattgacatctgctgttagcaatcacccaagcaatcctagaatcaacgtacagttggtggataagattttttatggtgatagagtgacaaaagagaaagatcatgggtctgaggaagaacaaaatgctatcatgagcgccaacttcgatgaatatcatcaaactcaagataaagagtcaagtgatgcgaacaaacaagttggaagtattgtgcctctgccacgggagcaagaacatgggattttagaacatgatgagtatgcaccaaaagacccagataagtacaaacaatctgatatcaggtctgtatcatcaatgtatccgtggcatctgaagtttctaggtgccttatcaatccatggaggcacaagacttgcaacagcaccaagaaaggcagaagatgcatacatctcatatgccatgaaggggaatatgcaagactcggtgcacatgcctgattctagctgctacctctcaatgcttgtcctacccatggcgttggacatgaagtcacatctatacgagtccttcgaggtcaccttggctcgtgccaacacatggctctatgcctcgcaggcctctggtgtccccatcaagttgatgagtgtgcagagtgatgatcttctcaccaagatatcgagagttggagacgccacatctgcaactgtcaattcagggttgttgcctgatctgtcaaatgcaaccttggaggattaccaaggctataacactgaggtggtgaaggcagcccgactttggtacagctccataggaggagaaatgccactggagatcactcctaaagtaggtgacacaaaactaggatttgcaatcagccgtactgaggagggttttatctacatatcttcagtgttgcaagatgacaatgacagcgagacaccgtcaacacggtcagggatgcacaatctgttcaaccgggcaagagaggcatcgaaattgctggtcatctcaagggtgtccaatgagaaggtcctgccctggatgatctctagttcaggggcaatccgctgctttgacactctctcgatcagccaaaagctttccttgagccgatacccattgtgctccttccagctgcatctactcatgtgggagaagcctattcatcctgccgagagaagcattcatcgcccaaaaatgcctttttttttttgaaagaagaaatgccttattcattgatactcgatccagaacctcatcaaattatacctagagtagatgctgaagagggcagagtggcgcacctgaaacacaggatgtcatcatcacttgttacaacttctccagaaatgaaagaaacataaaacaagatgctgcagaagtagatgtatttcaaaatttcagtttgcgtctgttgtttgtttttaagagtctaattaagttagatgcttcgctgatct

SEQ ID NO: 16289 - DNA, 2962 bp, Oryza sativa
  ref <308>: DATABASE ACCESSION NUMBER: AK066789
  ref <309>: DATABASE ENTRY DATE: 2001-12-06
gtctgctttgctacggccggagcggcagagcacactccggcgaggggggccatggcgatgcggctcttcccgtcctcgtctccgcttccgccgccgccgcctctgctcccgagccccagcgcgaaggcaccgccgtccgcgcccttctcactctccctccgcctccgccgcgcgcgggtggcagcctccgcggccgctgcggcggggggccccgagaggggggcgggcgggtacgagggggatgcggaaggcgagggcagcagcggggcgttcgacaggggaatgtcggagatcgcgaggaaggtgcctctcttcgagccggcgaggggcgacgccgcggcggtcgccggcgagcggccgctgcccatcaacctcgagctctggctctaccgcgcaaaggtgcacacgcggaagtacgagttcgccgacgcggagaagctcctaaaccagtgcatcatgtattggccggaagacgggcgtccatatgtggcgcttgggaagctatacagtaagcagtcgaggtttgacaaggctagagcggcttatgaaaggggttgccaagcggcacaaggtgaaaacccgtatatttggcagtgttgggcagtcctagaacgcaaaggtgggaatattcgaagagcacgggagttatttgatgctgctactgtagctgatgcaaagcatattgcagcttggcatgggtgggctattttagaaatcaagcaaggaaacattaaaaaggctcgaaatctacttgcaaaaggtctaaaatattgtggaggaaatgagtacatttaccagactcttgctctgcttgaggctagagcagagcgctttgaacaagcacgaactttattccaacaagctacccaatgcaatcccaaaagctgtgcaagttggctataggcatgggctcaggtagaaattcgtgcagaaaacaatgccatggcaagaaaactctttgagaaagcagtccaggcaagtcctaagaacagattttcatggcatgtctgggcactatttgaagcagaacaaggtagcatcgacaaagcaaggaagttacttaagattggtcatgctgtgaaccctagggaccctgtgattcttcagtctcttgcactactggaatacaactactcatctccaaataccgcccgtgttttatttagaaaggcatctcaaattgatcctaggcaccaaccagtttggatagtatggattttctgtgcttatctctcttttttttataagtaatatattactcatttgagccgcctttgtttttttacacctctggttaaattaacttgtaggctttgttttagtattatttacctgacatttcgcaaatagctatgattaattagtttatggcacttcttgatgtaccttgcacacttgagctgcatcttgcaacttgcaagtgctctggctgttcaccttcctgtcacaaatcacaactgaatatgcacacgatacaaataatttgggatttgatggatgtaaaggttcagttgagtgcagttgtctgaattattttgttttagttactttcaagatgctatatatctcatcgttacatttgtccatatttgtgctcatttaggctgttacttgggatctcccgttcaacactacctttagaatttcgtttttctatttgcacttatttagacttgtgcaaagcactatatatcttacaatcaaggaagcatcgcatgttcctggcaagagtaaagtaaaaatatttgttatgaactgttagttggtagaggtggtattaagtgagcaaatctattacaccaattttaaatccctagatggatctgtcttgttttatcttgcaaactgtcacgtttgcatttgtttatggaatctcttttatttggactatctttgaagcttagctctgacttatggatcatgttataggcttgggggtggatggaatggaaagaaggaaacgccagaacagcaaggacactgtatcaaagagctttgtcagttaattcaactaatgaatgtgctgctcgatgtcttcaggcttggggagtcctagaacagcgggccggtaactacaccgctgccagaagattgctgagatcttcactgaacataaattctcagagtgaggtaacatggatgacatgggctgcactagaggacgaacagggtgatccagttcgagctgaagaaatacggaacatctattttcagcagcgtaccgaggttgtggatgatgcctcctgggtcatgggcttcctcgacatcattgatcctgccttagacagcgtgaagaagctcctaaacatagaccagccttcggggcctgcaacacgagacaatccgaaaagcactggagagccaagcaatacagctaccgtccggacttctgccgatgcagagttttctggcggttcaagagcagaaggatcggacgcttcggaccttgctaacgccgatgacaaggagagcgatgacgctgcagagacaccagagagcgatttcgacgtggatggattcatcaggaggcggctagccctggacccggccgagctggacgcggtgcttgagggttctgatcccaggggagttgtttccaggaggaggacgcagaggttgcccaggaagccccttcctcttctccctgttccgtaaatatttccacttcagttcaacaatgcacatttgccatctacgccgtgcgaagcatcgaccactaacagtaacaggtaccgtgactcgcgagatagttgaacatacatatctgtgtatatctctcagaagaagagcgcggcggctgccattagcagccacatgtttgttactagagttgttattggtccacccaggtgtatgtaattctatcattcttcaggagcagtgtatctgtgtacataagcgcaatctatcaatttgtatgtgctagtgaagaattcaaaatctgcggatatcacttcaatcc

SEQ ID NO: 16290 - DNA, 1118 bp, Oryza sativa
  ref <308>: DATABASE ACCESSION NUMBER: AK066790
  ref <309>: DATABASE ENTRY DATE: 2001-12-06
ttcttggtcacccacctatatcaatgccgcctcatgaatacacatctcagctgactcagggacaccatggggatggcaccattagtaatcactttgatggctatgctcgtggacattctggttacccacaaagtgcactccctaatcctggtcatttcagttggagaccacatacatgcgctggcagtggtttatcaacagacacttcgaaccatgggtcctttccaccatctcgatacggtggttttcctcctacgcactcatccaatgtgtcagcagatacactggcttccacctcatcaataccggatccagctgattgggatccaaactatagcgaagagtcacttctgcaagaggacacttcactatcagatgcgttgagcgatctccacctgaaggatgcaagtggtcaaacaaaccaatccagcagattggcccatatccaaagccatgctattgcaaactcaaactctttatccatgaatcaaagaggtgaccgcctgttccatgcatcaactcttacagagagtagtgcctctacaggccatgtgacctatgatggttaccataatgcaaactattctcagctgaattttcaaagtcgccatggacaaccatttcagcggtataaccatatgactgcgagctacctacgtccaatggggaatcatcacaatggtcagcctgtatggcctaattatggcatggcagaacctccacctgctactatggctgacggaatgccttggggaggaaggcctggtcactcttttacagcaggcggactgccgtcttcctttgcaggaaaggattttggaaggattttctagtatggatctggaggaatgccattcaattggttgcattagtagtttgtatttgcaactcttggttgcattgcttacgggctgttgattttgcagtttgttgcattcctctaattgatcccttcgcaatgctccggctcatagaactgtatggtatgggtctgtaattgtagcattctctgttggtttcttcttttcgtttttggtttatttgttatacatcgagcggaggcttctgcctgctgcaaaaacccagcgggaaaaagaagttgagcagcccctactttc

SEQ ID NO: 16291 - DNA, 605 bp, Oryza sativa
  ref <308>: DATABASE ACCESSION NUMBER: AK066791
  ref <309>: DATABASE ENTRY DATE: 2001-12-06
gagggaaaacctgattgggtgaaggatctggatgctgtgggtgagaacggcgaggaaatcgagaacccccttattttgttgaatgatccatcctccgttgagccattggggaactgtgggaagaagatcctcttgtggtggctccgtgttgaagcgcgagctgacagcaaatttcctcaggggtgggtaattgagccacctttggacatagttgttcccgccaagcgcaccccatggcctgaaactaccgctgagctttcggctgaattagtagattccaaacaagatcaggagggtaggcggttgtcaagaaccgacagatcatctcggtcccgaagcaccacaaagcggaaggagaactgaagcaaaataaacacatcttgtaatgtatatcttacatctgcacaaactacaataggaaccatgtctggttaatctggtgggtattatgtttattttttttcctgatgttttgctaatgtggcagcgcttcatactcgtatgtcttctgtagaagactgtttttttattggtagctgtattatctatgttgtaatatacagtgcaatctgaatcaaggaaatggaagctggatcctggatatc

SEQ ID NO: 16292 - DNA, 2264 bp, Oryza sativa
  ref <308>: DATABASE ACCESSION NUMBER: AK066792
  ref <309>: DATABASE ENTRY DATE: 2001-12-06
ggagaaaccccaacctcgtcggcggcgatgtcgtcgtcgtcgcggcggccggcgaggagggcggcgttgacggcgaggtcgtcgtacgacgagtagctggtggacgccgagctggagtcctacctcgggaacgccaggtcgcggcggatcagccggctgcgccgcctctccgccgacgagcggcagcgggagacggagacggaggcgctaatagcgctctcgctgggcttccccattgacgagctgctccccgccgagcggcccctcctgccggcccccgtcgccgccgcccccaacgactacatcgtcgtccgcaaccacatcctcgccggcctcgccgccgcgcgccagctgctccgattcggcctccgcgtgctcgtcctcgagggccgcgcccgccccggcggccgcgtctacaccactcatctcggcggggaccaggccgccgttgagctcggcggcagcgtcatcaccggcatccacaccaacccgctcggcgtgctcgccaggcagctcgggattccactccacaaggtgcgagacagttgcccgctctaccaccacgacggccgcaccgtggacatgaagctggacaggagcatggatctggtgttcaacacgcttctagaacacgccacccggctgcgagagtatctcaagaaggcagccgaggggatctcgctaggggaaggtatagagaggctgagacgcttttacaaggtggcgaaaagcgtcgaggagagggaggttctggactggcatttggctaacctggaattctccaatgccggctgcctatcggagctctcgctcgcgcactgggaccaggatgaccagtatgagatggggggagaccattgcttcctagccggagggaatgcgaggctggtacacgcattgtgcgatggtgtgccggtgttgtatgagaagacggtgaagcggattgagcatggggaggatggggtgagcatcaccgtggaaggaggccaggttttcaaggctgacatggcactctgcactgctccacttggagtgctcaagagcaggagcatcatttttgaaccggagttgccagagaggaagcttgaagcaatccagaggttggggtttgggttgttgaacaaagtcgccatggtgtttccccatgtattttgggatgaggagattgacacatttgggtgtttgaataaggagaggagcaagcgtggcgagttctttctcttctacagctaccacactgtctctggtggtgcggtacttatcgcacttgttgcgggagaagctgctttggagtttgaaaaggttgatcctgctgtagcacttcatagggtccttggtattcttaaaggtatctatggccccaaaggtgttacagtgcctgatcccattcaatcatgttgcacaagatggggtagtgatcctctttgctcaggttcatactctcacatcagagttgggtcttctggcactgactatgatattctcgctgagagcgtcaatgaccggttattctttgctggagaagcaacaaatcgtgcataccctgcaacaatgcatggagctttattgagtggactaagggaagcttccaagattctccatgcttcggaaagtagattgaattctgattataagaagtatgccctgcagaaaagcatcagacttataaataatgtactggacgaccttttcatggagccagatctagaatgtggaagattctcgttcgtgttctcctatattacacctgaggaggaacaggctccgggattggctaggattacacttgagaagcctttgcttctgccttccaagaaacgcaaagtaaagggtaatcagaaggatcaggaccctgtggctgagaagatagaccaagaggtgttttatttatacgccaccgtctcgcaagagcaagcaactgaactattggaatgcgacaatgataaaagtaggatagcagttctatgcaaagatcttggtgttaaactaatgggttacgacagtacatacgatgtatgtagtcatctgatttctagcatctcgagagctcagaaagccaggaaaaggttgcagggaccgaagagcttgaaaaccggactttgatctgtaccgctactttattcttgtttgtagaaaagaaccccatattttctcttttggtttgggccaaaaactggctcatagattgttctctagtgtgcaaactttagacgtggggcaggaaaaccaagatcctccctgccatttgtaacatggcagtcatc

SEQ ID NO: 16293 - DNA, 2201 bp, Oryza sativa
  ref <308>: DATABASE ACCESSION NUMBER: AK066793
  ref <309>: DATABASE ENTRY DATE: 2001-12-06
ggccgatgaaaagaaaacagaagcttctcttcccctctcccccaaaacaaaagcatcaaaatattcctcctaaatcaaaagaaaaacaatcaatttcaaacgagccatctctctccattctcgtgcccctcctgtctccgcgcattcctccgccggaaaccctggttcatcggcgagcggcgaggctcggggactcgattaccctgcgaggaatcgaggtcggaccgcgggtggggaaggcgaagatggcggggtccatcgatcggccctcaggtgcaggttttgaaggcattgtgcatgatgatgataagaaagagtggaaatccgatgaggacaactcagaaggtgacaaaaaggccaaggcagtctccttcaagaaccgagctatcagtgctggaaataaatttaggcgttccttgagaaggaagagaagaaggagggtcggcgaccatgtagcctctatagaggacataagggatgtcaaggagctggaagctgtccaaagatttcaccagtgcttacatgatgagggcttgttgccagaacgtcatgatgattatcacgtgatgttgaggttcctgaaagcgcgaaaatttgatattgataaagcaaaacatatgtggtcggaaatgcttagatggaggaaggagttcggggctgacaacatagaggaatttgactatagcgaattagatgatgttctggagtgctatccacaattttaccatggtgtggataaagagggaaggcctgtctacatagaactaattggaaaagttgatcccaacaaattagtacaagtcacaactattgacagatatgtaaagtatcatgtcaaggagtccgagaagtgcttgcagatgaggtttccagcttgctccattgctgcaaaaaggcacatagattcgtgcagtactatcttggatgtgcaaggagtgggtttgaagaacttctcaaaagatgcaagagagctaatcatgcgacttcagaagatcaacaatgacaactatccagagaccttgcaccgattgtacattataaatgctggccaaggcttcaagatgttatggggtacaataaaatcatttcttgatccacaaactgcttcgaagattcatgtccttggaagcaaataccaaaataagctacttgaaactattgatgagagtgaacttccagattttctgggtggcaaatgcaggtgtgaagaacatggaggttgcataagatcagataaaggtccttggaaggatcctgacataataaagagggtccttaatggtgaagcaaactatggacggaaaattcttgctatatcaagcgttgatgggaagaaaatatgttatattaaccctagacacttaactaaaaaatgcagcgatgcctctgctgagtctagttctgaaatggaagatgtttcatctcctatagcttcagttaaccccatcataaaccctcatttgacacccgttgacgagtccaaattgccgggaaatacttccacatctggtgcccctcccagagtagaggacatccctgttgttgacaaggctgtggacacatgcgccggtccatcaaccagctcaatggtttttaattcagattcgttctcgttgagaaacataacgatggaactgggaggacttcgaaatcgaattactgcgtggttgatagtcttaatcgtgagctttgttgccgtgcttcgttctgtcccaagcagagtgactgcaagtctatcaagccaggccatttcccgtgaaaacagtacacattcgtctgtattgagacgtcttggtgaattggaggagaaattacaggagcttgaagcaaagcaatctcaaatgccaccggatagagaggaattgctcaatggagccattcaccgtgttgatgcattggaagccgagctaatatctacaaagaagatgctttatgatgcattgatgaggctggacgaactgcttgcatacgccgaccagcaaaagaatattcaatttcggaaaaagaggttctgcttctaagtaccagagtggcttgcttgcttttctcctcgaaggtttcgtgttcttctgtcaactgaatacttgtaagttggactctttgtccaattttaaaactgtgaatattttgttcagccgtgtatctctgaatattaaagaaagaaagaaaggtgggtggtcactttgccacctatttgactt

SEQ ID NO: 16294 - DNA, 2027 bp, Oryza sativa
  ref <308>: DATABASE ACCESSION NUMBER: AK066794
  ref <309>: DATABASE ENTRY DATE: 2001-12-06
tgtttctggcagaattgattggtgcagtatgaagttctcatcctcaccaatatatgaagctaacaacaaacatatgacacattgccattcttgtaaagatattgatttactgcagacaaaagatggtcctttctgcaggtgcatccttaaaaattccattgtgtgtacccctcataataacatcttttatgttattagtgggtttcttgacttagatgcaaattcctgtttgcctcaacatgatgggactgctgttacctacaaagattattttaagacttggcatggtcttactttgacttttgaaaatcagccgctcttggctggcagtaaacatgtgaaagtgcggaacttcctccacaactgctactctaaaaaagaaaaagatcctggaagcattaacaacaaagaaatgccaagaagaattttcacaggaatcattagaaacacttggggattctttcctcaaatatgttacaactcggcacctttttagtgaatacaggcttcaacatgaaggcatattaacaaaaatgaagaaaaacttgatctccaatgcagctctgtgccagctggcctgcagcagtaatcttgtgggttacattcatgctgaggagtttaatccaagagattggatcatcccttgcttggactatgatgagcgtgataacaaaaaaatttcctttctggcacccaatggtatgtacagccaaaggaaaatgtctattaaaagtaagaggattgcggattcagttgaggccttaattggggcttacctcagtactgctggggaaaaggcagcatttcttttgatgaaatcattagggatgaatatagaatttcacactgaaattccagttgaaaggaaaatttcaatgaaagctgaagagttcattaatgtgaggagcttagagggaatgcttggttacaagttcaatgattctttattattgctcgaagcattgacacatggctcatatcagacttctggccctacttcatgctatcagaggctcgagtttcttggagatgctattttggatcatcttttcactgaatattactacagcaaataccctgactgtactccagaattgttgacagatcttagatctgcctctgtgaacaacaattgttacgcgcatgcagctgttaaatcaggattaaacaagcatatccttcactcatcatcagaactgcataggaagatgagctactaccttgaggaatttgggcagtcatttacaggtccatcttatggctgggaagcgggcattggtctaccaaaggttctcggggatgtgattgaatcaatagctggtgccatttatctcgacagcaagtgtgacaaggaggttgtttggagaagcatgaagcggctattggaacctcttgccacccccgaaaccatcgagcctgacccggtgaaagggctgcaagaattttgtgatcgtagatcattcaaaataacctacgaaaaaaaccatgttgatggagtctcatcggtcattgctcgggtgaaggctggagagactacatactccgcaacaaaatcaggtccctgcaagttggtggcgaaaaagttggcatcaaaggctgtgcttaaagatctgattgctggtcacaaagatacagaggctgctgcagtatagtgatacttaactatttaagcgtgcaacagtagctaacaattgatatagatagttgcgcacaatagaaaagttttggttggattcatacatgtaatttggaaatgctcctttttgtgtgctcgcaaacgatgcgtgtgaacggcctcatgaattctggtaggttttcatgcttcaaacttacaagtatcgcaattttgtaaattacaaatacgggcatagcacacctgcccatgccatgcagtagttttttttttcctcgaaatagtagcattagttgtatattactcatagcatcagattgtacagaaagcatgccagcaaaaacgaaaaaatgtacagacagcattttgttcgcatcaagggaaaacttgtttt

SEQ ID NO: 16295 - DNA, 2255 bp, Oryza sativa
  ref <308>: DATABASE ACCESSION NUMBER: AK066795
  ref <309>: DATABASE ENTRY DATE: 2001-12-06
gttcccttctccgatccaagtctgaggttgatttcggggggtgggggatctaagtgcggcctcgttgttgcagcggcgcagttcctatccagggtcacccccttcctctacaacagctggttcgtgcgccagctcagcgccgacgactgcgcggcatacgcgttacagcttcctctcttcatcaactgcgtcctatttttaagccgggaggggtttcggcgtgcatgcttgcgtaatgattctgacagcatttgcttgcgtactggagctactggcagaacctctgtatattctctcccagaggaagaaatactatcaaataagagtgtatactgaacctgtggctactctgctgcgttgtttaacaacttttatcttcataacaaaaggacattctaaaatggaaaagttggttgtatttgctttgtcacaggttgtctatgcagcttgcattttctttggatattggacctattttcttatatttacaaataccaaaatttccgatctccttccattcaggttgtcagccatgatggactgcgataaacagttgttgcacatgtgcatgttgtttacaggacagactttcaggaaactgatgctccaagaaggcgaaaagtttgttcttgtttggtttgatactccatataaccaggctgcctatggtcttgtggataaattagggagtctggttgttagaatagttttcctgccattcgaggagagttcttatgctacatttgcacagttggcatcaggttcttctgcatttacttcatttagatatgagaatcacattccttatccctttggtgtctgaacttgaaagtttctctgtgaagttttgtctaacatctctttgattggttattcaatgaaaattaacctatgttggctgggcaggcattgcaccaaacatggcagttcatccttttttttttttttaaaaaaaagagtttatttttttatactcctttcagaaattgtaactttggtatgtttcttgattatttgatccttacaatttagacttgatcattttccatatttcttactgcctgaaaatatatcttttggtattattgttgtttcatattgcagctttaagatacgataacttttccttgaaatgttgatttgaccaacaccagaattcatagcaatattgtttatttcaaaacaatatgttccacgcatatgtttagatgtatatttctgtaaaagctctaataatgggccttttatccacaggacaaaatccccagaatatatccaatttggaaggttctttgctcggagctcttaagcttattatgctgataggcttggtggtcatctcatttggtccaagttattcatatacccttcttagactactttatggggcaagatacagtgatggagatgctacagttattcttcgttactattgtttctacgtcatatgcttagcaatgaatggcacatctgaagctttccttcatgctgttgcaaatgaagacaagcttaagcagtcaaatgatatgttgctcctgttctcggcaatttacattgtgctaaatgttgtcctgattaaatctgctggtgcagttgggttgattgctgcaaattccatcaatatgctgctgcgaatcacatattcagcggcattcattaaagactatttcaagggctcattctctttccgccactgcttgccggcaggctggggtgtgttgctcatttctggcctgaccacagctttctctgaaaggatgtttctgaatagaaacaggttcaagcagacccttcccattcacatggcgataggcataatgtgcctgggtttctcatcactcgagatataccgtggtgaaaagcagttcttgacgagtataatcagatcattgaagagccgcgacaaacttgcatgagtctaacaacattcagggttttgcgagtgtttttagcattcgcctgataaccgcattttcagaaagaaaacatatacgatgccgtaaatataattgtacattgcatgggttgacgacagaagataattatgccaagcggctggaggacttcactgaacatggatcaaactggtcgcgttctctactggagtcgggttaatggtgtgtgcagcagaacaactgttcactaaacggcaacagaaagcatagatcagtggcttatataggcaatttattatcttattctgtagtaactgctgactacaccaaaatctaagggtgttaagagaaaaattgatt

SEQ ID NO: 16296 - DNA, 2765 bp, Oryza sativa
  ref <308>: DATABASE ACCESSION NUMBER: AK066796
  ref <309>: DATABASE ENTRY DATE: 2001-12-06
gcccccgcccgctccccgctcccgctcttccgccacttcctccgatgccgcggcgtccgccccaaccgcttcaccttccctctcctgctcacctccctgtcctccctcgccgacctgagggccgtgcattgccaggtggtcaagtccgggttcgggcccgacctccacgtccgcaacgccctcctcgcgcgctacgcggactgcgaccctgacctggcgcacgccgagcagatgttcgacgaaatgccccgaccggaggttgtcgcgtggaccactatgatcacctcatacaggaaccgaggccgcacctttcacgctctggcgaccttccggcggatgcttgctgctcatgttgcacccaaccgcgttaccatggttgctgctcttggcgcttgcgcggcccattgtgcggtcgacactggcatctggattcacgagtacgtgcagaagcagggatgggagatggatgttgtactgggcacagcgctggtagacatgtatgggaagtgtggaaaagtctcagatggaatgcatgtgttctcaaagatggccaagaggaatgtctatacttggaactctatcattggagcacttgctcttgcacaggatggcaagacggcattgcagtggttctctcggatgcagaatgatggtgtccagccagatgaagtcacacttatttgtgttctttgtgcctgtgcacatgccgggtttgttgacattgggaggaaaatatttaacctggccatacaaggtgagtatgggtttcaacctgggatcaagcactttgggtgcatggttgaccttcttagtcgctctggacacctcgatgatgcctttagggttgttgagacaatgccatcacagccaaatgcagtgatatggggcttgctattaagaggctgcagggcccgtggcgactcatggttgagtgagcatgtgacaatgaggctggtggagttggaacctgagaatgcatcgcattatgttctgttatcgaatttgtatgctgagacagggaggtggcaggaagctcaggggatcttgcattggatgaagaagaagggactgaggaaagatgcaggctggagccttcgaatgttagaggacaagtcaaagaagtatactactgatggatgtttgttggagtatgttgagtgaggaacaacattggaagaacatggctcttccaacaccaagattggtagttcctatagatgtgagcaagaagccatgggagcaaaaagtccctctccataaccgctggcatccagatatccctcctgttgcagatgtaactgaaggggaattgttccgtgttgagatggtcgattggactggaggaagagtcagtgatgataactccgcagatgacatcaaattcctggatctcacaattactcattatcttagtgggcccttaagaatagttgatgctgaaggggttccagctgcacctggtgatcttcttgctgtagagatctgcaaccttggtccacttcccggtgacgaatggggatatactgccatatttgaaagggagaatggtggtggattcttaaccgaccacttccctagtgcaagaaaggcgatttggtattttgaaggaatttatgcatactcccctcaaataccaggtgtccgatttccaggattaactcatcctggtatagtggggactgcaccatctgctgagcttctcaatatatggaatgagagggaaaaaatattggctgagacaaatcatgagtcaatcaaaatctgtgaagttctacatcagaggcctcttgccaacttaccaacccctgagaactgtttacttggaaagattcaagaagggactgctgattggcagagaatcgcaaatgaagcagcaagaactattcctggaagggagaatggagggaattgtgacatcaagaatctaagtagaggttccaaggtttatctcccggtatttgttgatggagcaaatctgagtactggtgacatgcatttttcccagggtgacggcgaagtctcattctgtggagcaatagaaatgagtggatttcttgagctcaagtgtgagatcataagaggtgggatgaaggaatacttgactccaataggtccaacaccacttcatgtgaatcctatctttgatataggtccagtggaaccacgtttctcagactggttagtctttgagggcatcagtgtagacgagtctgggaagcagcattttcttgatgcatcagttgcctacaagcgtgctgtcctcaatgccattgagtacctttccagatttgggtaatccaaggagcaggtataccttttgctatcatgctgcccatgtgagggtaggatatctggaatagtagactcccctaatgcagtggcaactcttgccatccctacagcaatatttgaccaggatgtaaaaccaaaacgcctgagtgggaaacaaggaccaaagttgagaaggcttccagatgttttgagatgctcgtccgatggacaccttcctgttacacaggacccaagcggtacaaaggcaccttaactactgcaaaatgcgtggtcatattcacaatccactatatgattagtaattataaatctaaataatcatatttattattccaacatctatctagtgtaatccataatgtgggtcacatgttgtattttctgtattgtacgtgccgtattttctgtattgctaccaagcaccaactcgtgttatctgagttgtgcaagcaactaaatttccttattgtccc

SEQ ID NO: 16297 - DNA, 3272 bp, Oryza sativa
  ref <308>: DATABASE ACCESSION NUMBER: AK066797
  ref <309>: DATABASE ENTRY DATE: 2001-12-06
ggctgcgcctcctcctcgccgccggttccgcccctctctcgcctcgcctcggccctccatccccccgcctcctccgcgggtcgcagggtgtcgcgcttggacgaagggcagcttttcacagcatgacttaaaagtggaaatgagtgcacatcccaaaaacgattgcttgatttgcagttcttggagctgtgcactactattttgtccaatttcactacatctgcctcttgtttgagaggtattgctgcttccacttatgcctttgttataagttacaacctgtgatgtgaaaaacagcatatacttcaacattttttttagataatggaaatggattacatctccggcctttgccaatgggtacacaaccaaaaggtcttagaagtaaaaaggagaaataaaatgaaagaggtgatgggacaaatcccaattcctgccgatgaaaagatgaattgaaatactgtttccaaaatcacatatattctaggcttctagcacgaaattttataggtgctacgccatccaaacttcaacatatttgcatatacttcaacatatatatttgtgcaattaaattcaaggattcacttatacagatgctcgtggagtcaatctaaactattctacttcacccttgaccttctactgtcatgttaaattttatgagttacatttcaatattctcttaggtggttctgccaatagttttctgtatataattattcatatttacatttttttaagataaatggctttcggctagcttttactgaaagcatacgagtttgatacaaaagaaagaaaaaacaaaagctggggttgccagcttttaacatattaaattgttggcataatcatatttacatcacaactaaattgttgtgttgataatcttgtcctcttgtgtgcgtcctatccccacaccacgacgccgtggaccatcagcggctgctcgccatgcggacgaggctgacggagagtgaagaggagtgcccttggagcctagaagggtagtattagtagaagcctaggtagggtgaggactggaatgaggaggaagaagaggaggcgaggcaaattaggggttctccaaatcgagtcattagtaagccttttctgccgctcaaattttattttatttttttcaatcgcatgatagtgtactaggtgctgctgcatgtgagccccactgtgctggcgcagccaagtgccatggtacgggtcaacacaacgctcttctcatcacacgcgggcccctcgggaggaggctcccattctctccttgtgctcggtgcacgcgacgctactgaacttatgaggggggtgcgcccaattcacctgccctgggcgaccgcggcctcatcgtttgtctgtcctcggtctcatttcgtggtgcgtatgtgaggcgctgggtgtgtgggtggatctgggtccagttttagctgtctcattgctccgatgccagtggggtgtttgatgaaatgccgatcgcgtcgcggcgacccctgagcgggagttctcgtcggggatggggatggatttgcctgtttgtgtttagtcggtatgcagtcgcagcgagcgcggttttccgtgaatctgcgcggccatgaattttagggcgtgattgggtagtctgctagttcataggtttaagaggaccttactggctttaccctatgcagacatccctttaaactgtgaatgcggaccttttttgagatggctcgaaatttagtcattccgttggatcttgatgtctaactgattacacatcaatgtggtatactcattatcgtcatccgaatttaatacgagttcagcatttgctatactacatttttctagatatgatgatttttcttcaccgcatatcgattaagcgatctaaatcttgtaaaatatgttttgttaccccaagttctcctatacttttcacacaattctttttgtttttaggggtctattcatgtctaatgtcataagatactttgttgcctgtgtaggtgctaaaattgacagcctgtgctttatcgccacaactgtggggatccgttgagcaattatcacgttccaaattcactcagtcttttgaaggtttgacaattccgatattctcaatagcacatcgaagtgcaagatgccaaaaataaagagcctgtctaatgcttgtaaagtatcattttctccggatgggcccatatccgatgaagcacttgagagagttcgtgcattgttagatgagataagacctatagatgttggcctagacaatgaagcacagattgctcgtaattggaataattcaacgcgtcaaccaaatggaagaagaggacgtaatggggctaaccagttcacatctccaatcaaatatttacacattcatgaaagtgaaagtttctctatgggtatattttgtatgccgccgtcatcagttattccacttcacaatcacccaggaatgacagttctgagcaagcttctctatggcacactgcatgctgaatcttatgattggattgatgtaactgatccaaccgatcaattacaggaactttcagtgagaccagcaaggcttgtcagagaccgtgaaatgtctgctccagagaccaccattctttatcccaatagaggtggtaacatccacactttcagagcgatcacaccttgtgctctctttgatgtcctttctcctccttattctgctgagaaggggagggactgttcatacttccggaagtcttcagtaagggaaacaccacctgttgttttgcctggtgaaataaatagcgcagaagtaatttggttggaggaattggaggaccatcaacctccagagggctttgttgtcgcgagaggtttgtataaaggccctgtaataaggagatagttaggttcgaagcacgtctgtccacgaatcacgaaccagttgacgatgcagctaggttcctagctagtatctgtgtcatgtgggttagtatagagcaatgcatcgttgagtcactcatctgcaacctgcgatttactctgtacatgtcaatgcaaagtgatctggtgaagatttaactgccaggttacaaaacaagaacgaaaaacttttatggttgacagccagatgttgttctataacatagttgagtggccccccctatcagctggaggttgttacttttttttgtgtcgacttgcagagcgccttgtcatgctgtattaggtaacctcaacggcagaaccttttcacctattgatgatttcagaaattgagttggtgtgcg

SEQ ID NO: 16298 - DNA, 3265 bp, Oryza sativa
  ref <308>: DATABASE ACCESSION NUMBER: AK066798
  ref <309>: DATABASE ENTRY DATE: 2001-12-06
gggaaaaaaaaaaagaagacacgagacgccaacaggaaagcacttcgcctcgccgcgccgcgccgcccgttgctgccggcgatgagctcgccctcgccggagccaccccccaaccctacacctgtccctcctcctcctcctcccgctccctcaggtaacacagctgttgaggacagcgaagcaggtccttgcattcccagactccaagcagcgactggagattatacacaatggttagggcaagagtttgcgtctgaacatgaagcatatgaattctatcgctattacgcatggaagttggggttcagtgtccgaagagaatatgcaaacaaaagtaggaaaactggtgaaataacctcaagaaagtttgtttgttcgagggaaggattcaaagccccagacaaacgaaccaaccatacgaggactccacagcctgatacaagaacaggatgccacgctaatttagtcatcaggcgcaaaaatgatacttcaaagtatgaggtatatgctttcgaggcacagcataatcatcccttgttcattccatcctgtgcaaatccactgcaaaaaaagttaagtgatgttcagtcttctgatgctgataactctgctagtgtaacacatgctagcgaacctgatagcagaaattccattcttgccgagaaaactattaagtccccagaaatctctcagcgctctctgcatactaggcggcagcgggaaattaagtgtggggaagccagtgctctgttaaactacctccaggatcaatgtcgagcagatcctttattttatcatgctgtacagctggatgctgaagataaagttacaaacattttctgggccgatgcaaagatggtaattgattttggtcaatttggtgatgttgtttcctttgatattgtccccagaaacaacatgaatctccgaccttttgcttcttttgttggatttaacaattatggggagactgttttgcttggaatggcacttatgtatgatgatagccttgaatcattccagtggttgtttgagaccttcttgcatgcgatgtctggacaagcaccgcggactgtcttttcacgccaagacgcaattgtatcaaaggccatctcactggtgatgcctgacacatgccatgccatatgtacatggaacctgaagcagtctgcaaaaagtaacctcaatcaccttattagaggggattgtggtttcataaaggaattcaaggcatgcatcaatgattatgaggaggaggtggagttttttactgcttgggaagctatgatcagtaaatataaccttcacaacaacgtgtggttgcagaaggtatttgaagaaaaagagaagtgggctaggccatacacaaagtggatattttcagctgggatgaagaacacacaattaaatgaacgtctacattctgacgttcgggattatttgaaatctgatgtagatattatttcgttcttgaagcatcttaagaaattggtcaatgatagacggtacatagaattggaggttgaatttagttcgaggctcaagttgccagacttcaagattagagctcctattctgagacaagcttctgaggcctatactggtatgatatttcagcttttccaagaagaatacgaagagtttcagtcagcttacattgtgactcgtgatgaaagtggtcccagccgtgaatatattgttgccattcttgagaaagaaagacggtataaagttcatggaaacccttgtgagcagacagttacatgctcatgtaggaagtttgagacacttggtttcctgtgtagccatgctttgaaagttttagatacaatggacataaagtatatgcctgataggtacatcctgaagcgatggaccaaatatggaaggtgtttgactgcaccgcaggttgaaggtcgaaaggttcaggcagataccacattagaattttctagccgctgtgaatacttgtgcccagtatatgttaggcttgttgctcgagcatcagaatgcgaggagtcgtacagagtattagatcaatgttcagtagaactgggtaagaaaattgaagaaatcctgcagaaacaaacaagcattgatgcgtcagctcctcagtctgatattgaggatgtaacaatatccttgtctgcgaatggtactgacaatgaatcagaaagagcactggattattcaagcagcacaagaccgaagcgacgaaaaaagaaaggtcgtaatgctaaaagccaacgaaaaagttgtattgagaaaggtttacaaaaaaccaagaaagtgcaaccagaacaatccccaatacaatataccatgttggatgctgctcaacctggaaatgttctatttcagggtcttgacatttctaatccatttccaatggggcaactgaattatggaggagtgcagtcacaaccaggcctatgcccaagcttacctactgtatcaagagaacttggttttgctgcatacctttctcagccatcaagtaacaatcaacataatcagcagggtttgtagaaatcaacagctctgttgaaaatcatagtgcacatttgtttcaatcttcaatataactcttgggacagaactggccctctgttgaagatcaaatcaacttctcaaattcatatcagtcagtaattgaggctaccaagaacagccatttacctgggtacatccatcagcagcatgttcaagccatgctacgcagcatgactagctgacgattagcagtgatagcgctcaccaagttccagagtgacagccacttggtgttgtgttgattagcaatttgaatgttaaattctcccgcatatcgctcatcaattgtgacataccaagccaccaaggacattcagagcacatccatgatctatcgtcagtagccaacgaagtgttagctctcttgcaatcgtcggatggtggatggtgcagaactgtagactattttgtagcctgtatgtgaacatgattacatgaaccatgtaggactagtctgtagaacagagtagagaactagagatgatatctttggaaggattagatttcatgccactcttagagttgcaggtttagaaatatgccattatgatggggatatgtcaatagcataagctcatttgtacaagcttgtcacacttgtgctttgattgtataaatgctaggagatgtgtctattttgtcaaattagtatctcttgctgactttcctaaatgttcgcaatttgatgaaatgcaagtaaaacgaattcatg

SEQ ID NO: 16299 - DNA, 813 bp, Oryza sativa
  ref <308>: DATABASE ACCESSION NUMBER: AK066799
  ref <309>: DATABASE ENTRY DATE: 2001-12-06
gtccggcttctccttgtctctgctctccacacgcggagtggaggagggattaatcggaagcatatcaatcggcggccatgacgagcgtggcgagaagggcatcggcgacggcaccgtcagctacggcatggacgacgacggcgacgacatcttcatgcgctcctggaccggcacaatcattggaccactcaactctgtgcacgaggggcgcatctaccagctgaagctcttctgcgacaaggactaccccgacaagccgcccaccgtgcgcttccactccaggatcaacatgccctgcgtcaaccctgacaccgggctggtcgaaagcaagaagttccatatgctggcaaactggcagagggagtacaccatggagaatatcctgacgcagctgaagaaggagatggccgcgccgcacagccgcaagctggttcagcctccagaagggaccttcttctagtcataccgtgagatgttcgagggcatgttcctgttgctgctgctgctgctatatactcatataggattggattgctatctctgtccatggcacgcaccgttcgtaactatcacctgcccccaaatctgtcacctgaaaggtagtagtactagatgtgtatgtagtgcagtgttgttggtaattactgaatcgccttgctaatgcctaatggctgccctgcttgctatcatatgcatgccaatgtgaaggacaggtttggcttggtttgaacgctgagagagattgaataacacgagacctcctgtatctggcaccgtatagactcctatgatttatgcatgtgtgttaagact

SEQ ID NO: 16300 - DNA, 2083 bp, Oryza sativa
  ref <308>: DATABASE ACCESSION NUMBER: AK066800
  ref <309>: DATABASE ENTRY DATE: 2001-12-06
gagacgggtgggcaactggggcgacgatgctgaccgtggcggcttccgcactcggcaacaacaaaaaatccaccgccgcggcctgcttctcccttgctatgcccttcctcctctcctcccccacccctcctcccccacctcactcctcctctctcccccggagccctagccctcgccctcgcctcccgctcccgccaccccgccgcgccgccctcgtcaccgccgcgcaggaccctcggtggcggcgggccatggcgtcgctggccgtctcggcgtccgcgtcggcgtcgggggaggaggtgacgcacctcgcgcagcgggaggcggcggagatcgacgagcagctcatgggcccgctcggcttcagcgtcgaccagctcatggagcttgcggggcttagcgttgcggcggcggttgcggaggtttacaagttgggtgaacatacaagggtgctagtaatctgtggtccaggaaataatggtggtgatggtctggtagctgctcgtcatcttcatcactttgggtacaagccttctgtatgttatccaaaacgcacgcccaagcctctgtattctggcctttgtactcagcttgaatcactaacaatccctttcgttcctgttgaagacctacctgcaaatttatcggaggagtttgacatcattattgatgcaatgtttggtttttcgtttcatggaacaccaagaccaccatttgatgatcttatcaacaggcttgtttcactgagtgctattgataattctgctaaaagaccagcaattgtttctgttgatatcccttcggggtggcacgttgaagagggagatatcaatggaggagggtttaaacctgatatgctggtatcattgactgcaccaaagctctgtgcaaaaaaatttaccggtccacaccattttcttgggggtagatttgttcccccacctattgtgagcaaatataagcttcatcttcctccatatcccggtacctcaatgtgtgtgagaattggaaaagctccatctgttgacatttcatctctaagagaaaattacatctcccctgaacttctcgagaatcaggtgatgcctgatccatttgatcagttcgttagatggtttgatgaagctgttactgctggtctacgtgaaccaaatgctatggctttaacaactgccgataaggagggaaaaccttcgtcaagaatggttcttttaaagggtgttgataagcagggatttgtttggtatacaaattatggtagccagaaggcacatgatttatctgagaatccaaatgccgctctgcttttctactggaatgagatgaaccggcaggtaagagtagaaggttctgttcagaaggttccagaagaagaatctgagaagtatttccacagccgcccacgagggagtcaacttggtgcaatagtcagcaagcagagcactatcattcctggaagggaagttcttcagcaggcgtacaaggaattggaacaaaagtattctgatggcagcgtgatcccaaaacctgattactggggtgggtacagattaacaccaaaactttttgagttctggcaaggccaacagtctcgactgcatgaccggcttcagtattcactgcgagaagtagataggagcacagtatggcacatcgagaggttgtccccttgactagtaaccccatcccagctctttggtaataaaaaggatctcatcttattatcaagaatcaaatcttatcccagctgcaaggagtcccaattgctcgatgatgttagtgccatgattaggtcgcgtgtttgagactgtgagtgcctgaagctctgctttttgacatgcccttcacacatctgatgttctctgaagcacagagtggatgaatccatgaaggcccttctcttggtcataagatttttctgtaaatgccattaaattttaaccgtcctgtagaaagaattatgatgagaatctcattatctcagcctggagaagactgttggacataggtcgacatcgtagtatatcgaagaaataatgttctgggaggaaataagtatttatcagcatcaagcatataagcc

SEQ ID NO: 16301 - DNA, 2675 bp, Oryza sativa
  ref <308>: DATABASE ACCESSION NUMBER: AK066801
  ref <309>: DATABASE ENTRY DATE: 2001-12-06
ttcctctctatccacagccagcggtattttggtcttaaaatccctcaaagtggcaaaatatcctgaaagtaatatattgagtggcattttatcatttgcaatgtattgggtggcattttatctaaacccaccgaatggagtggcatattgtcctttttctcagctctgtactgcctaaatccaggatggttactttggttagaaacattttgggttaggaattgttcacagttgaatctaggatggttcatttgatttaggatttaggattagtttatttgaatccaggaatcaggaatggttcatggttgaacattttttttatttaggatttgaatccagccatccagggatggttcatggttcatggttgaacaattgaactttgaaacttgtgattcactgatttctgaagctttgtagcagagttagtatttatcagtgcacatatttagcagagttagcatggtcagtacttaaattggaagaccatattgtagtatttatcagtgcacatattttcaaaatatcaagaagcggaatgttcttttctgaattgtaagatttcttatcatttttccattttctatgctctataaatttgatatgttctgtcaattaatagtttagtactgtactttaatatgcttaacacattcaatttttggtcgattctatgaacactttataccgttataaatatacaactattagactttgtgggttggaaaaaaatattttatcccttctaatttcgaatacccaagttgaaaatcctgggcccgcccctggaggccagcagccgcccaacgccctcactgactctgtctgtttgtctatctatcttagcgtttgactgtttcaagtcctcactatcttgtctcaggtttgttccacggctccaattctgtatgtgctgcgactttacattttgtaagtttgcatgcatcaatagaactagagtcattaagggattttcttcaatgaactatataaaaacaatttaagaagcaagggcaaaaaaacttgaatggttgcttggttacatttattgaaagggatttcttctcaagttaaggatgaggacagcatcattcatttttttttttaaaaaaaaagcattggcaaattgtcctctaaattgtaagatttatttattatcatttgccatgttctagatattgatatgttgaaaaattgtaaattaaatgttgtaattctatatgtggaggattttatatgaaaattctatgaatatacaaaattatgctcaagtttgtgttatatccgctatagaatatacacaactaatagtttagaattgtgtgatattatacatgccaaacattagtcttttgctctaaaaaaaaattcctacccttttacgttttgaatacacaactttaaaatcctgggcctgctcatctatgatgagtcagcgatatgctgctgatttgctgccattgtagtttgtaggatttgtagattctgatgaagagtaatgtggatattgcatcgtttgaacttgcacattttgaacgtgctttttaaaattagtcgattattgatgttaaaagatattattgatttatttttatcacattttaattaaatttgtacttgtatatgggatttgcggtgttcggaaattttttatatgtgatgtgaacctttgaagtaggactacccaaccaaaaaatcctggctactccccgctccggcacatgcctccacatccgaggctcctactcaacgcagtgttaccgggacacggacacaggtgtcggagtccgactcggactcgagtgtccgacttggcaagctgaaaaaaaaaaaggattcggggactcgccccatatatatatatatatatttttagtgaaaatattatatatatcatcaaatataacatactcttatagtcagtaaaacactaaaaacatatggtgtcacacattattctgcacaaaagatcttatcttcttattagttcccacatagaacaaaaactgccagccaaaataagtgaatttcatgtgtagaggatcccttgttcacaaaaaatcccactgctatcctgccgcccacaggccacatgccaatactagatttgtgaatgactggatgcaagtaagtcgctgctgtcattgtatgttttggtattggcctattgggcaagacatgaataggaatggggaagtagtaattttgttaagggtggtcggagaaattggaacagagctgatgcacttgataaacatgcagggggcagttgattctttgatctacgatttagcattactgaggcaaaattttaccttgcgaattggtcttcatggcatgggaactcactgaggtcccaggcaacccaactccctccctccgtggctctacagttgaagtgattgctgccaagattgagcccaagttagccaacagtctcattcggcaattgagtcaagcatgcccattggagaatcttcggcatgtaaaacgggtgcgtcggtgctgtgaatatggtgaaaaatctgagttatcaatcatcttatgccttgcaactgggcctgaacattgtagcgaaatgtttcctcaagatgtaaaaaagattgtaggtacctacgaattgaatactttcattgcaaaagtaagtacttttgttaaccttgggagttcgg

SEQ ID NO: 16302 - DNA, 2635 bp, Oryza sativa
  ref <308>: DATABASE ACCESSION NUMBER: AK066802
  ref <309>: DATABASE ENTRY DATE: 2001-12-06
gatgttttctgccttcctatctttcattcaatcctgtgtttaggctggagctatctcattcccaccacggcaccacctctccaacaactcatctgcgtttcatcccattttcgagaagttattttgcgttcatttctatgttcgacacaaatttatacgcttatatttaacacccaaattcccaaatctcgtccttttcaattttcgacacaattttacgtttatatttggcacccaaaatttcaaatcgtgcatttgttcattttcaaacagtgccaaaattagaccagacaaatcacggccgcccccaacctcagtacagtacataacctcagaaaagggaatcaatcaacccacccatcgataaaagccgccccaaaacgggcaacacctcgacggcgccatcgccaccatcacccacctcctctcctccccttcccttccccgcgagctccaacgcccacaaaccctcaccctcccgcaaaaaccctaatcccacctcctcctcctccccccatggcggccaaggcggcggcgctctcctcctccccgttcgtctcctcccgccgcctctcctcccccgcggcgtctctccgcgcccgcacgccgaggtgcgtgatggggagcgagcaggtgagggtggtggtggaggaggaagggaagacgaagaagaggatgggggtggcggagccgaggagcgcgccccccgcggtgtggacgccgcgggcgcccgcgcaggaggcgaggctcgccgcgctgcgcaccgatgggcgggattccaggttgaagatcttctccggcacggccaatcgccccctcgcgcaggaaattgcttcttacttgggtgtagacctgggtaaggtcctcatcaagcgttttgccgatggggaaatctacgtgcagctgcaggagagtgtgaggggttgcgatgtgttcttggtgcagcccacctgctcccctgttaatgaaaaccttatggagctttttgtcatgatcgacgcatgtcggcgggcgtcggcgaggtctattactgttgtcattccatactttgggtatgccagagctggcagaaaggctcaaggacgtgaggccattactgccaaactttctgctaatttacttacagaagctgggagtgatcgtgtaattgtatgtgatattcattccactcaagcattgggatacttcgatattcctgtggatcatatacatggacagcctgtgattctggattaccttgccagtaagacaatatctaaggatcttgtggtggtttctcctgatgtgggtggtgttgtcagagcacgtgcatttgctaagaaattatctgatgcccctttagctatcgttgataagagaagacagggtcacaacatgtcagaggtcatgcacttaattggtgatgtgaagggtaaggtcgccatcatggttgatgatatgatagacacagcaggaacaattactagtgcagctgctttgttaaaacaggagggagcagaggctgtctatgcttgtagcacacatgctgtcttcaggtttggcagttggtttattgtaacatccatgatccatgtaatagtattgattcattggcttgttgcgaaggaaccatgttatggcatgattaggcagattggctttatgtttgatcaatataaaaatgacagggtagagcaataattttactagattccacttgagcacaccaatcacttagtgctagtaagtgggagtctggaaaagaggttggctttaatctagttgagtgcggatctggttcttgttgactctatttcattagtagtcatgaatctgtgccacacatatcagcatatgtttttctggctattttgatttaggaagggacctcaagtcctcaattgaagtcttgaattttattagcatcaacatgcatgatgtctttttacatggtaccgcacagtaatttgacttcaaaataatagcaggatgtgttgccacttacttcatttgcaaaaattgttgtccttttgtattcctgcactattttgtaggcataaaagtaagtcgtttaccacacctactttttcccactagcactgtctttgcagccctcctgcgattgaaaggctctctggaggcatctttgaggaagttattgtgacaaactccattctgctgccagagcacaaatgcttcccccagttgacagtgctctcaatggcgaaccttgtggcagaaacaatctggcatgttcatcgcgatggctctgtgagcagcatatttcaatagcggcggatgctatggctaccgcgatgccacatttgtgtggtgtggagaaggcacctgatggttgtgcccatctgcgtaggaatcaattttggtgacaagactaaataaggttgtagtgccgtgtaggcatcacacatgtatcgtgtgatcaattttgttcttgcacccactaaatagtgttttcctgttaactcgacgcaggatatccattgtatcaagtataagagaatcagtctcgtgcagttctttcatcctttagcaactgttgagggacaaggaaaagatttgtgctgttcactgatatattggaagtaatgcaaatgatgcttagctctgacgaagaagtgttgccagttttatgttg

SEQ ID NO: 16303 - DNA, 1924 bp, Oryza sativa
  ref <308>: DATABASE ACCESSION NUMBER: AK066803
  ref <309>: DATABASE ENTRY DATE: 2001-12-06
gagcgtgctcggggtcgcggcggctaaccgtctctctcgccgccgtctcgcacctcgcgtcgccgccgccgccgcgagtgtcggagcggaggagaaggggaggggggccatggcgaagggcgacgacgcgctggcgcggaagcgcaacaaggtgcggcggaagcggatgcgcagcagcgagaacgccgtgtcggcccgcgtcgccggcatcatcgcctccaagcgccgccgcaagtccggcaagcggcgggcctgcgagggcatgtgcttctccctccccaccccggaggaccccttcaacgaccgccacggcaagaagcggaagggcgacgacgagccgaccggagacgcccccgccgccgccgccgcaggcagggacgaatccaagaagaagaagaagaagaagaagaagaaggattcgagcgccaagaagcagccggcgagggaggccgccgccgccgccgccgcgaacgccaagtctagggagaaggacggggcggagtacgaccggccgtccaagttcctggtggtctgcctcaacgccatccgagacgcggcggcgtccgaggacggcggcggcggcggcatccacgacaccgggtcgtggggcgtggagctctggaattgctgctcggctgcgccgcctacgcacgtgctcgacaccagcggcgagtgcgccacccgggagaagacggcttggctcgtctccacagcctgcgacatcgtcgccaggaaggagaagctcgctgtggtcgtctcttgccccttcctactctacctcgtcccctcccaggaaaaggccgtgcaagtgcgttcgatttgcaagcctctgaaatcacttggtatccattccgtcagtctgcatcccggcgcttccattgaacaccagatttctggattaaagagttgcgaaccggagttccttatatccacgccagagaggctgcttgaactaatagctttaaaggcgattgacatatcaggcgtatcgatgctggtgattgatggtctgaagtgtttcacggaccttaatgtcagcgacaagctttgttctattagggatgccatattgagcaaccctcaaataactatattcagtgacccgtctgaccgaagggtagctgcactggcaacaaaactagtcggtggaaaaaagatcacaaggctttgtacgaatgattcagttacttctagaggtgcattcataacacaaaagatacacatatgcccatcaaaggaccaaaaggcaccgaaggtgaaggaaattcttgaacaaattctaaatgatcatgctagaaagactgcaaaggtcctactggtaaccgcaagtgatcatgaagcacagcatctgtcatcatccttgaaattgcaaaattgtaccgtgaccaatgactcgcatggcaactcttttaccatatgcagcagtgttgggctgattaatgtccttgtgaaagactgggagaacataacaacggcaaattttgaggacttcgacactgtgttggttgcagacttgcctccttcagttgacgaatacattgaaatcctcgctggtgcaagctgtcatgtgcttgtgggggaggtgcattgcatcttttctagcgctgatgctctgcttgcaaaacccttgtctgaggttcttacaagctgtggtcaggtagtgcctgaatttctcaggaaactggcatcctcatagcaggatcggttttctcatggcaatcatcatatagtatacgctaccatattcatggttcttccagtcactaaacatttttgtcagtttactgttccttatcatgtaattctcacagcataacgaggatcttcagccttgttgtatctctgcaactttgtattttttgaatgcgatcaagtcctagtctgtgagaaccaattgcttttgcattcattaacattacatggt

SEQ ID NO: 16304 - DNA, 1455 bp, Oryza sativa
  ref <308>: DATABASE ACCESSION NUMBER: AK066804
  ref <309>: DATABASE ENTRY DATE: 2001-12-06
gacacttggcgcagacaaaacaacgagaccgtacaggtagaggtggtaaaggtaaacgacgagagctaaagaaatctggcatggcgccaccggcaccggccgctctcctcctcccctccaaccattcctatcgcccgctcctgcctcgcccaatcctgcaccacgccaccggcttcgcctgcgcctcggcctcgccctcgccgccccctcgccttcgccttcgccttcggcatgccgccccgctccgtgccgccgccctgccggccatcgccatcgcccccggcgaccactggggcaactgggccttcctcctctccgccgccgccttcggcacctggtcggaggagtccacgtcgtggggcgccgcgctcagcggctcgctcgtcagcaccaccggcgacctcctcaaggccttcctcatcggatcagttgcaactacaattggcacaacgatagcctttctgttggttcctatgaaatcactgggtcaagatagctggaagatcgccgctgcgctcatgggcagctacattggtggagcggtgaattacgtcgcaatctctgaagcacttggcgtttctccgtcagtgctagcagccggtgtggctgcagacaacatcatctctgcactctacttcatgaccctcttctcgctggcagccaagataccagctgaacctaaaactgctcaagagggtagtaacggcggcgagtctgagggcggaaggcggatgtcggtgctccatggcggcgcggcggtggcgctgtcgttcgtgatctgcaaggccgggtcggccatctccagccagctgggaatccagggcggcaccctgccgtgcgtgacggcgctggtggtggcgctggcgacggcgttcccgcggctgctggggaagctggcgccgtccggcgagaccatcgcgctgatcctgatgcaggtgttcttcacggtggtgggcgccaacggcaacctggtggacgcggtgaccaaggcgcccagcgtgttcgcgttcgcgctggtgcaagtgaccatccacctaggcatcgtgctcgccgcagggaagctgatggggttcgagcggaagccgctgctgatcgcgtccaacgccaacgtgggcgggccgacgacggcggcggccatggcgacggccaaggggtggagctcgctgatcgtgccgggcatcctggtgggcatgttcgggatctccattgccacgtttgttggcatcgggttcggcatgtttgtgctcaggaggatctgcggcgcctaaccaatctatagtactaacaattcaattggtttatatatagctgtgatcaataaataataatggaggagtagtagcaatgaagaatcatgcatgcatttcaatgaaaagtgtaaacattagaagaagaagaagaagaagaagaaaatactgtattatttatcaagagtaatactattattattagaag

SEQ ID NO: 16305 - DNA, 3000 bp, Oryza sativa
  ref <308>: DATABASE ACCESSION NUMBER: AK066805
  ref <309>: DATABASE ENTRY DATE: 2001-12-06
gacacttcgccggggctccacatctcctctcctcccacagtcggcggtcctgcctctccccatccggcggcctcgagcttgagctcctcttcctcttctctcctccgatggctggcggcctcacctctccccccatccggcggtcctctcctcggtggagcctcgaatcggacaacgtcgaccagatcgacacgacaaggaggttgaggcagatgtggatcgaggcggccttcgtcgggccaccactgcggacgggtcgaggtggccgtcgtcgagctgctactgcacaggttgacaacgacgatgagcgacggcttgtaaatacatagtacaatatgtacatgagcaatccaggaggcgactccaccaggtctgaaccaccttcctagctcaccaccttgccaccatcggcaacgtcacccacccacttccgatgcctgccctctcctctcctctcacattctttttctttctctctctgcctaatacagatatttttcttctatgaattcaattcatattttctcgatccataaacactgacggcaagagcgagccatcacagacgacactcttgctccatgtgggcatcggttggtgcctagagagctgatttgataggatgaggttggtcggtttgttttgaacgtggactaatcaacgtgaagcagggaagcctttagaggaggttggcttgttcggtttagtaggtggttatagaggtggtattggccggacacaatgtacggttttttcctaacaaactaagcactgtatgttttttttgcataatgtatggtttgatattttttttcttaaaatgttatatcttctttaatataataaattgccacaccctttttaaaaaacctgatatgtgtccataggacctagccatgtgaagtctacatttgacaaatcaaattgatcaggtctgggccaggtgtactatgcccaaaattctgtcatcatcaaatccaaaaagcaaggaacagtctcttatcgatctgtagttctctacttaatagagttgatcacttaggttaggtatatagaatagtaaccaccactaccattatagtattacactatagtactactacatcacaaaggcattagacattaattaggagtaagagcaaatcttgtggagaacctttttgtgactgtgtcgggtaaccggcatgaactcaacctgcggcgtgcacaggacacagtgtgatcagatcagataatcagattagcagcttagcttagcttagcttgcttacgtccacactactttactctccgttggaccaaatcactaaactttgtcgtaaactcgtactacctccgtgccataataagtgtagccataagtttccgcgtccaactttgatcgtccgtcttatttgaaacttttttataattagtatttttgttgttatgagatgataaaacatgaatagtactttactcgtgacttatgtttttaatttttttaaaaaaattttcaaataagacgaacggttaaagttagatgcggaaaaccatggctgcacttattttgagatgtaggaagtaaggcataccgcacaccacgtcctgggggtcaggcagtcagcctagtgaaaaagataactgtgcaagctagcttctcgctctcgcgcctataaattgggcgctcgccgccggcctcagagtgcacacacagacacacagacgcactcacacactcagcttaagcgagcgagcgagtgaacgagagagagagacagagatggcgagtgttgcctccttcccggtgatcaacatggagaacctggagaccgaggagaggggcgcagcaatggaggtcatccgcgacgcctgcgagaactggggcttcttcgagatgctgaaccatggcatcgcgcacgagctgatggacgaggtggagcgggtgagcaaggcgcactacgccaactgccgggaggagaagttcaaggagttcgcgcggcggatgctggaggccggcgagaagggcgccgacgtgaagggcatcgactgggagagcaccttcttcgtccgccaccgccccgtctccaacctcgccgacctccccgacgtcgacgaccactacaggcaggtgatgaagcaatttgcgtcggagatcgagaagctctcggagagggtgctggacctgctgtgcgagaatctgggcctggagaagggttacctgaagaaggccttcgccgggtcgaacggcccaacgttcggcaccaaggtgagcagctacccgccgtgcccgcgccccgatctcgtcgacggcctccgcgcccacaccgacgccggtggcatcatcctgctgttccaggacgaccaggtgagcggcctccagctgctcaaggacggggagtgggtggacgtgccgcccatgcgccacgccatcgtcgccaacatcggcgaccagctggaggtgatcaccaacggcaggtacaagagcgtcatgcaccgcgtcctcacgcgccccgacggcaaccgcatgtccatcgcctccttctacaaccccggcgccgacgccgtcatcttcccggcgcccgcgctcgccgccgccgacgcggcggcggccgcctacccgaggttcgtgttcgaggactacatgaacctgtacgtgcgccacaagttcgaggccaaggagccacgcttcgaggccatgaagtccgccgccgaggtcgtccacgcggcgcccatcgccaccgcttgataaggatcagacttcactagctacggctgcgcgtgccatgatccagatatatgggatgtgtacggtagtgtacgtggtgctgtacatgccgtcccgtgtttttctgcgtaatgtttttacgtactagactactactagtgtgtgtacgtaacctggggatgtaagtatcgcgtcaagtactcaagtgtgtgtaacgggcgctctaatcgtattgttctgtgcttcaatggctaccacgttagatgggccttgtgctaatgttgttttatgct

SEQ ID NO: 16306 - DNA, 811 bp, Oryza sativa
  ref <308>: DATABASE ACCESSION NUMBER: AK066806
  ref <309>: DATABASE ENTRY DATE: 2001-12-06
gaccctagtctcctctcccgctccacctccccgccgccgcctctcgccgctcgccgccgccgccgccgccgccatgggttcgtgcagcgcgtgcggtgctgggagtacaggcagcagccggccatcgtccgcctcacccgccccacccgccccgacaaggcccgccgcctcggctacaaggccaagcagggttatgtggtttaccgtgtccgtgtgaggcgtggtggcaggaagaggccagtgcccaagggtattgtctacggcaagcccaagcaccagggtatcacccagctcaagttccagaggaacaagaggtcagttgctgaggagagagctgggcgcaagttgggcggactcagggtgctcaactcctactgggtgaacgaggactccacctacaagtactttgagatcatccttgtggatgttgctcacagtgctatccgcaatgacccaaggatcaactggctctgcaagcctgtgcacaagcaccatgagctccgtggtctcacctctgctggcaagaagtaccgtggtctgcgcggcaagggtcacactcaccacaaggccaggccgtcccgcagggctacctggaagcgcaaccagactgtctctcttcgccgttatcgttaagcctatgtgctttgatgttacgttactgtggaatccaacccttgcagactttgataatatctgtttgcacttttaaaattttggtacttgtgttctgaaaccagtgaactatcttctagaagcaatgttgctgttctctatttgcctgtgatgagatgaagaaatgattcagttatcg

SEQ ID NO: 16307 - DNA, 855 bp, Oryza sativa
  ref <308>: DATABASE ACCESSION NUMBER: AK066807
  ref <309>: DATABASE ENTRY DATE: 2001-12-06
gacatccgtgccctctccttctctctctgtgtctctaccgcatcccctccctctctcggcgagccgaatccatggagttctacgtggacgacaagtggaagttctcgaagaagagccggaacaatggcagcaggcgcatccccggcggcagcggcgcgggcggcgacccgttcctcaagaggtcggccagctccagggaccaggtgatcggccggggccgcgtgggcagcggcggaggcggcggggcggccgcggcgccgtcgtcgttctcgagccggtgcgcggggctggtgaaggagcagcgggcgcgcttctacatcatgcgccgctgcgtcaccatgctcgtctgctggaaggactgctcgtagccgtggcgtggcctcccccctccctccctccctctcgccccccgccgccggccggtaccgaagatctctcgtcctcgccgccgctcctcctccagaagaatgagacgtggcatcgagaagatggccaattaggtgaagtatgtatagatcagagagtttgattattaggagccctttccttccttttttttctcccctctcccatcaattcgtggggtgtttcttgatcattgctactgcttgattagttagtgattagcagagtgtttagtactacaagctagatgtggtattgtgcacaagttttgggatctcgtcctcctcaaaggagctggggatctggtagttgttgaggctgcaaaggggggagctgggcggttagcagcttagctggagcgaaaatctagtggatctcctactattgtaccactacaaggccgaacagttgtcagtcactacccgatgtatagctaaagaaatgagacgc

SEQ ID NO: 16308 - DNA, 3458 bp, Oryza sativa
  ref <308>: DATABASE ACCESSION NUMBER: AK066808
  ref <309>: DATABASE ENTRY DATE: 2001-12-06
gactccagtccacagcactaacccatcggtcccggcgatccccactagtgcccctcctcgcccgcttgccatggcggcttgcggcgccgcggcggcggagtattcagctctcctgtccctctcatgtgggcctatcactcgccgccgtttcgccgtctcctgccgcgctcgaccgcccggcaacctcagtgcacagcagaagaagaagcgagggaaaaacattgctccaaaacagcgctcttcaaatgcaaaactcttgcttactactgaggaaaatggacagcttccaagtaccagtttgaggacttctatggaacgtcctcagaagagtacatccagtgaggacgataccaatggggctattagccagatagatgaaaaaattgcagccattggtaatgaacagcaagagaggtcaaaggataaacatttcgaatcagactttcaacttgaagattttggggaaatgatacaaaacatggaaaagaatattctgctcctaaatcaagctcgtcttcaagcaattgaagatgttgacaaaattcttactgaaaaggaagctttgcagaaaaaggttgacactctagagatgaatttgtcaaaagcacttgcaaccaaagggaacataaatacagatatccctggtgatcatttagagaaatttacaaaagaaattttgatagaaagtgctctaagtggaggcaatccagcacatttgtgtgagtctccacttttcatggagctgactgttctaaaagaagagaatatgctacttaaggctgacgcacaatttcttaaagcaaagattgttgagtttgctgaaacagaggaattcctattcaaattggagaaagaaaggtcactgttagacgctacagttagggagctggaagctaggtttctagttgctcaaactgatatctggaaagttgtccctctgcaatatgatgtttggatggagaaagtagaaaatctgcaacacatgcttggatgtttgaaaaatcatgtagagaagtatgctgcattgttggatcagcatgatgatctgcatgacaagattgatgagctagaagcatcactaaaagaagggaaaacatctgagttttctccttatgttgttgaacttctgcaacagaagttgaaagcagcaaaaagccatcaccaagcaggccatcaagaaacaaacactcacattcaagtatatcagcagttaactgaggaatttcaagataacctaggtaaactaatagaagaaagtggcagactggagcattctgcaaatagtatgccatcagaattctggagtcacatcctgctcatgattgatggttggttccttgagcggaaaataccaaatactgatgcacgtatgctgagagaaatggcatggaagagagatgaccgtatctgtgaagcctactttgcttgcaagggtgcaaaagaaagtgatgttatggaaactttcctaaagctatcgttatcaggaaacagtcaatgcagttctggcttgcacattgtccatatagcagcagagatggctccagtggcaaaggttggcggtctggcagatgtagttgctggtcttggcaaggcacttcagactaagggacatttagtagagattgttcttcccaaatacgactgtatgcaacttgaccagattactaatcttaaggttttagatgttgtcatacaatcctattttgatggaaatctattcagcaacaacgtgtggacaggaactgttgaaggtcttccagtctattttattgagccacagcatccttcaaaattcttctggagggcccaatactatggagagcatgacgattttaaacgttattcatactttagccgtgcagcactggaattactttaccaatctgggaagaaaattgatataatccactgccatgactggcaaactgcatttgttgcacctctatattgggatatatatgcaactcgaggcttcagctcagctagaatttgtttcacttgccacaacttcgaataccaaggtacagcacctgctcctgatttatcatattgcggccttgatgttgagcagttggatagaccagccaggatgcaagacaatgcacatggaagaataaatgttgccaagggtggaattgtttattccaatattgtgacaactgtatcaccaacatatgctttagaagtgcgctcagagggtggtcgtggtctccaagatacacttaaaatgcattccaggaaatttgtggggatacttaatggaatcgacacaggaacatggaacccttccacagacagatttcttgctgtgcaatatagtgctactgatcttcaggggaaagcagcaaacaaagcatttctcaggaagcagctagggctgtattctgaggatgcctctcaaccactggtagcctgcattacgaggctagttcctcaaaagggtctacatcttatcaggcatgcaatatacaaaacagctgagttaggaggacagtttgtactcctgggttcaagtccagttccacatattcagagggaatttgagggtgttgcagaccaattccagaagaataacaatattaggttaattctgaaatatgatgaagctttgtctcattgtatttatgcggcatctgacatgtttatcattccatcaatgtttgagccttgtggccttactcagatgatagctatgagatatggttctgtgccaattgttcgacaaactggtggattgtgtgataggtgatttctccctcaaacatttcctttgcatagtatattctgatatatctgttgtgttctacttttccagtgtttttgattttgatgatgaaactatacctgtggagctgcggaatggctttacatttgctaggactgatgagcaggatctaagcagttgcttggaaagggcattcagctactacagcagaaaacctatggtttggaaacagttagtgcagaaggatatgcagattgatttcagctgggattctccagcttcacagtacgaaaacctttatcagagtgctgttgctcaggcaaggggagcggctcaaacataaaccttttcatgatgacattgtgagcttagattctcccaagcgcagagacaatcgtcagttttatcatatctgaaccaggcatatgctgaagaaatattgttcttctcacattcacagaattcacacatcgtgatccttgctgttgccattcccgaaagaactgagaaagagtagtcttacagttgatcaagatattgcattttgcagtcagtgcacggaactagttctgggtttaatggggatgagtaatcataatctatactggattgcccccctctaaattccccccaaccgttagtttttgtgggaatgcaagaagtaaatatgtgcactgtagggtgacattcgcatacatgatactgtacggtttattcagatcaacgtttgggc

SEQ ID NO: 16309 - DNA, 3623 bp, Oryza sativa
  ref <308>: DATABASE ACCESSION NUMBER: AK066809
  ref <309>: DATABASE ENTRY DATE: 2001-12-06
gaccggctcccccaaccgcacccccctccttccgttggcggcggcggcggcggcgcggcgccattccccttcctccgccaccctcctgttgatgccctcctccccaactccggccaccgcaccaatctcgtgttcgccatctcctcctctccacctccacctcaccgcccgccgccaaaccctagcgccccccatgtggcgccgcctccccgcccgccgcctcgcctccgccctcctctcctcctccgccccgctgccccaccctctccaccgcagcctcctcctcctcctccctgccgcctcacagcgtctcgcgccgtcgcagacgctgccgcggttcgcgtcctcctccgccgccgtcgccgccgagtccgtctcctccgaggaggtcgacgagttgcaccacgcgatcggggagatcgcccgcggggacccgagcgtctccgccccggctccggcggcggggcaggaggggcataggaggaggtccgggagagggaagcactcggccgaggctatggcggttccggcggcggggcaggaggggcataggaggaggtccgggagagggaagcactcggccgaggctatggcggtgcacggggtcgggtaccacaagtatgcgatgctgcgccggcggcagatccagattgagacggaggcgtgggagcaggccgccgaggagtaccgcgagctgcttgctgacatgtgccagcagaagctggcgcccaacctgccctatgtcaagtcgctctttcttggctggttcgagccactgcgagaccagatcattgccgagcaggagctcgtgggtgagcgcggcgcgcgggcctcccatgcccgctatttcaacatgctcccggctgatatgatggccgtcatcaccatgcacaagctcatgggtctactcatgaccggtagcggcgatggaagtgtccgagtcatccaggctgcgtgccagatcggcgaggcaatagaacatgaggttcgaatccacaaatttctagagaagacaaagaaaaaaagcaataaagaaatggataatgaagaagaaggaggtgattcagacattgccaaagaacaagagcgtctaagaaagaaagtcactgatctgatgaaaaagcaaaaaatacggcaagtaagaaatatagtaaagaagcaagataactccaagccatggggtcaagatgctcatgcaaaagttggtagtcgtttaattgagcttatgattgagacagcctacatacaaccacctgctagccaatcagcagatggtccacctgatatccgtcctgctttcacacatgaaatgagaactgtggcaagagagcaacagaagagtagtcggcgatatggtgtgatcaagtgtgatccgctggtccggcaagggcttgatagaacagcaaagcatatggtcataccttatatgcctatgttaattccgcctatcagttggactgggtatgacaagggtgcacatttatttttaccatcctatgtgatgcgcacccatggagctagacaacagagagatgctgtcagaagagctccaagggaacaaatgcaatctgtgtttgaggccttaaatactcttgggagcaccaagtggagggttaacaaaagagttcttagtattgtcgacagaatatggtcaagtggtggccggcttgctgacttggtcgatcgcactgatgttgctttaccagagaagcctgacacagaagatgaagacaagttgaagaaatggagatggaccttgagagcagccaagaaggaaaatagtgaaaggcactcccagagatgtgatgtagaactaaaacttgccgtagctcgcaaaatgaaggatgaagatggtttctactatccacacaaccttgattttagaggccgtgcttatccaatgcatccttacctgaaccacttgggttcagatctttgccgtggagttttggagtttgcagaaggtcgtccgcttggtaaatcaggcttgcgctggctaaagatacatctagcaaatttatatgctggtggtgttgacaagttatcgtatgatggccgaattgcattcacggagaatcacttggaggacatatttgactcagctgatagacctcttgaaggcaaacgatggtggcttggagctgaggatccattccaatgccttgcagtgtgcataaatctcactgaagctttaagaagcccctcaccagaaacgatgatctcacatattcctgtgcatcaggatggttcttgtaatggcctgcagcactatgctgctcttggaagggataagttgggagccattgctgtgaacttagttgccggggagaagcctgcagatgtttatactggaatagctaccagggtggtggaaattatgaagaacgatgcgctaaaagatcctgctacagatcctgatgcagcacgcgcacgtctgctacttgatcaggttgacaggaaattggtaaagcaaactgtgatgacatctgtgtatggtgtcacttatgttggagcacgtgagcaaataaaaagaagattaaaggagagagacatgatttgtgatgattcagaactttttagtgcatcatgctatgctgctaaggttactctgacagcacttggtgagatgttccaagctgcccgcagcattatgaactggcttggtgactgtgccaaggtaattgcttgtgaaaatgaacctgtgagatggacaacccctcttggactcccagttgttcaaccatatcgcaagcttgggaggcatcttattaaaacatcattacaagtcctgactcttcaacgtgaaacagataaggttatggtgaagcggcagaggactgcttttcctccaaatttcgtgcactcccttgacggttctcatatgatgatgaccgctgttgcttgcaaaaggcaaggactaaattttgcagttgttggagagctttgagaaatctttccctgaattaaaatttcctccattgccagagaggggagattttgatctcacggatgtcctgggatccccatatttcttcaactaagtcaagctgtggtggaaagcatgttattctaccttgctttgctgcccacctgtggcctggagttctattgaagtatatgagcggcccagcagtctcagatgacgaaactaattcttttgctagctgactgaaaaattcgtggatgtcttgcgtgaaagctgaaggtatacctagaaaaaagcattttaaacagagctggccaaggagatagttgaggggatgtcttcaagcaacagtcaaataagtgggaaccgatcaagaaaagctctgggagtaggttttgttgcgtttaggcttactgtagtttatatattagtgactttcttgctattcttttttttttaatatcaggctcacgtttagcacggatacatcttggaagatgttctggtccatgtaaatgtaattatgtaattttttgccctcttaagtttttttctttttttcttttgtgcaatttatagagggggtgaatctgatgactaaataccggcaaaacactaatttatactagttatcattgcggttgtaaggtaacatcttaaataataaagtgatataggttggcttcctcatcattcc

SEQ ID NO: 16310 - DNA, 2221 bp, Oryza sativa
  ref <308>: DATABASE ACCESSION NUMBER: AK066810
  ref <309>: DATABASE ENTRY DATE: 2001-12-06
gtgtgttgtgcaaactttgttatatctattggtttgcaattcaacttctacttgaggtttaatgcataggtgttttatgtctaaattaatctggcatccttatttggtaaatatttaaatcaatttgacttatgaatgcaatgcatatggtgtatcagtatgtggtatggttgcttcaaaggcactctagttggtactgaagatctttactttgatgtactgccttgcaaagttaaaattctgaattccgtcaactccatttttctcttgcattgcaaagatttgttggactgactaggtgatggatgaaagtttaagtggttggaaagcgtttgcactgaggagcttggctctcgcactcgcatattaggctttctgcaaattgataaggtaaatgaatataaagtttctatagaagtggtgcagtgggaacacaatgtgaacattcagaattgcatatgcactgaaccttcatggctcgcactgatccaggagccatgtgcaatttgcattgggtgccgtgcaccttcatggttgtctgtgggtttcatcaaaccggttgtgtgtgtgtgtgtatgtcctttttgctgtgctgagcagtctgttgtcatggtccacacgcagagacatgaatggcctgttgtcgttggtgcctctttgcaagtgtgttagacaaagccttcgtagatagatatctgctctgagaccatggtactaaatattggtggtagtgtcacactattgtggccacaattgcaggtggggaatgacgtggacgatgtgaggtctaaacccgcaaacgctaaaccacgcccttgtcgttatcaaccgtggcacacccgactgacctattcacgaataatgtttcctgcaatgcaaacggagaacacaagaagaaatagattgaggcaactcaggtagctagataggtaaatgcgcacaaatatgaagaagcaaacttatatttgctagataatgaagtggtgaactgatagcaaagaggttctgaagacaaactatgatctaattgatcacgaccaatatctgggtgcatttaaagagcaaaacacaacctaaaaaaaatctatgaaaccctgaatgggtacctagctatttaaagaggtgggaggacgaccaaagggcacctagggtcgttctctaccaggttggtgcgcactcatgttgggccaatacttggaccggggtcccagacgaagttacaagcccaatggcccatgataggtggcgcaacaccttgttttttcaattgtggctggttcagatggaatttggagacgaggctagatccgttttaaaagatgacttcgagggctttccatcatactagttaggtgcccatgcgttgctatggggaaaatatagatcaaccttatcgaagctcaatatggttgtgctgtggaaaacaaaatcaaattatgcttctttaaatacaaaaattagttagtgcatcaggaagcagtcaaggacatcacagcatgaaaattatcaaggagcatgcacttgcaattagatatttatgtactgataatgtgtctagactatagagggtcctgatgtgtgacatttctctattttcgtctactgataatatccatcatcaaaacttcatgttatatgcctataataggctatatatatatataactgaatattatctcgagagattacaactgaatttacatgatcaaatccaattcattaagacataaacaaatacaagtaaatttctggataatgcactaatgctcatagccatctcttaagagattctcaatacaccgagttgtaagtttgcataaatatgctgatctttaagaaacatgaatgaatcaccgttaattaggtactgtagcaagctgacattgtctgtttgctgtgaatcagacgttaaaaaacttcaaaaatcacaacactgctcacctctgacattattgcaactaaaataagaggagccttgtcaaggtgattgtctccgtatggtagattgccattaatccgtccaattctcaattccattatactcgtatctgcatcaagccgaagagaacaatcaactttgcactcttcaattgttttgctagtagcctttctatcaacaagaggacggggaatcaaagatgcaaatgtcaacttttatgatttagtgtaaagcccaattgtattcaattatctagcgacaacaatgctgataagtcatcgg

SEQ ID NO: 16311 - DNA, 1581 bp, Oryza sativa
  ref <308>: DATABASE ACCESSION NUMBER: AK066811
  ref <309>: DATABASE ENTRY DATE: 2001-12-06
gacattacaggcaattgctgttgcttcttgccttcatgatgcctggccagttcttgtaatctctccatcatccttgcgattacattgggcttctatgattcagcattggcttaacatccccacggaagatatcttggtggtgctaccacaaactggaggatcaaataaagcaggatacagattggtatattcaaatactaaaggggattttaatctggatggggtgttcaatgtgatatcttatgatgttgttcccaagataaaggacatgcttctggacttggattttaagattgttatagctgatgaatcacactttctgaagaatgcccaagcaaagagaacaatgcattcacttcctgttctgcagaaagctaaatatgtggttttgctaagtggcacccctgcgttatctcgccctatcgagctgtttactcagctccaggcattgtatccaactgtatacaagaatgttaatgagtatggtaatagatattgcaaaggtggcttttttgggctttatcaaggtgctagcaatcatgaggagcttcataatttgatgaaagcaactgtcatgatccgcaggttgaagaaagatgtcctttcacagttgcctgttaaacgcagacaacaggcctttctggatttaagtgagaaagagatgagacatattcgtgctctatttcatgagttggagactgtgaagatcaaaatccagtcctgtgactcccaggagacgatggactctctcaaatttgctcaaaagaatcttattaacaagatctacaatgattcagctgaagccaaaattccagcagtgctagattacctgggtactataattgaggccgagtgcaaatttttaatatttgcacatcatcaatccatgcttgaagctattcaccaacatctcttgaaaaagaaagttaagtgcataagaattgatggtcaaacacctgtacctgtaagacagactctagtcacagatttccagaataaggatgacatcaaggcagcagtgttatccataaaagctggaggtgttgggttaactttgacagcagcaagtacagtaatctttgctgagttatcatggactccaggtgaccttattcaagccgaagaccgtgcccatcgtattggtcaggtttcttcggtgaacatatattaccttcttgcaaatgacactgtggatgacattatatgggacgttgttcaaggcaaacttgagaatttgggacagatgctggatgggcaggagaaaacgctggatgtgtcccagagcgacactaggcccagcccttccaagcagaagacgctcgacgcctacctcaagcgatgcagcaattccacagaagctgatcagcccaagctcaagaaccctaggttctgacatttctcagggtttttagctctactatgtttttgtttggcaattggcatgaccctcttgccttaaacgaaggaatgctgcagtgtcaggtagctgtgtgttggtgttatgatcacagccatgctgtattttgtattacccagctaaatgcccgtgcgttgcaatgaaaattaagaataactttgatc

SEQ ID NO: 16312 - DNA, 2057 bp, Oryza sativa
  ref <308>: DATABASE ACCESSION NUMBER: AK066812
  ref <309>: DATABASE ENTRY DATE: 2001-12-06
gagcaagagtgcccaatctatctgtcttctccataagagagcatctcaggtgtagtttttagtttctctctctaaaaatgggaggcaactgaggaagaaggaagaacacggccttcatttcatccaattgagtcaagagaggaaatctgaatttgggggcggccaagaaatggagcagtatgaggtgctggagcagattgggaaggggtcatttggctctgccctcctggtgagacacaaggttgagaagaagaggtatgtcttgaagaagatcagacttgcccgtcagaccgacagatgccgccgatcagcacaccaagagatggagctcattgcaaaagtaaggaacccttacattgtggaatacaaagattcatgggtggagaagggttgttatgtgtgcatcgtgattggttactgtgaaggaggagacatgtcagaagccattaagaaggccaacagtaattatttctcagaagagagactttgtatgtggcttgtgcagctcctgatggcacttgattacttgcatgtcaaccatatccttcatcgtgatgtgaagtgctcaaatatatttctgacgaaggatcaaaacatacggctcggtgattttggtttggccaaagtattgacttctgacgatttaacttcatcagttgtgggtactcccagctacatgtgccctgaacttcttgctgacattccatatggttccaagtctgacatatggtcactaggctgttgcctctatgagatgactgctttgaagcctgcatttaaagcatttgatatgcaaacactgataaacaagataagcaagtcggttctcgctcctctaccgaccatctactccggtgcatttagggggctcatcaagagcatgctgcgaaaaagtccagatcacagaccaagtgctgcagaattgcttaagcacccacaccttcagccctttgtactggaactccaattgaagtcgagtcccgctcgcaatcttttcccggatacaaataaggcttcatgttctgatgatgaaaacaattggaaggctaagtacagcaagagccattcatttaaagtagacaggattgtaaaagttgacaaagttgctgctaacaatggccatcctagttctactggaactgcaaaagattaccaagaattgctaaaacaaccaatggatgagttgttaggacaattaaccgagaaagttgttgatgaagtgatacatggaaatcattcaagagtaacaaaatctccagctcctactccaagaagggcatcatcaactcctagaatacgactagaaccttcaaagacatttcatgctagagcagctgagactccaccatccaaatgttcactggaacgagcaagtcaacctacaagacgagcatcaaccccggtgaacatgttgcaaactcctgagaaacggcagggcgccgacatcctcaccagactaaaatcacccgacgtttcagtgaactctcctcgaatcgacagaatcgccgaattcccgataccatcatttgatgatgaacaattgcaccccacaaccaagctcaagctctatccaccatccatcactgaccaatcgatcaccaaggacaagtgcacattccaggttctccgaagcgacagcagcaagaaccacaccggagacagttctgatcccagcattcttggcactgacagtaatccactcatcacgagctcatcggattggatgaagcagaggagattcgacacgacgtcgtaccgtcagagagccgaggcactggaaggattgctggagttcagtgcacagctgctgcagcaggagaggtttgaggagctggggatcttgctgaagccatttgggccagggaaggcgtctccgagagagacggccatatggttgtcaaagagcttcaaagggactggattgtgattaatcagagtcctgcaaatgcaaaaaaaagaaaaaaaaatctgaacctagaataattttgtgtctttgattagattcaggctgctctgtacagtttcagttttgtggtaatatcctcttttcgtctttg

SEQ ID NO: 16313 - DNA, 3198 bp, Oryza sativa
  ref <308>: DATABASE ACCESSION NUMBER: AK066813
  ref <309>: DATABASE ENTRY DATE: 2001-12-06
gcagggagcagagttgagttttggagaagaaggaaccatctggattcccctcgcgaacggcacattcccttcccttcccacccacggcgaggcgcgggccccacctcgccgcctcctccgttgccggcgatcccggcacatggagtcccccgcggcgcgtggcgccctcggggacgacgcgtcgggggcgtccacgagccaggcggcccccggggccgtggatggcggcgcgtcgccggactcgctgcggaacacgccctccaacatcgcgaggctggaggacgccatcgagcactgcgccgctcgccgcaagtacctcgcccgcaccaagagcccctccgacggcgaggatgtccgctggtacttctgcaagctgcccctcgccgacaaagcgctctctgcttcagttccacggacagagatagtgggaaaaggggactacttccggttcagcatgagagactctcttgcattggaggcgtccttcttggagagggaggaagctctgcttgcatactggtggagagagtacgccgagtgcagcgaagggccaaaaggttccttagttgcagctgatgcttcggattctaaaagtctgtataaggtggaggaagaacgggttggggttcctgtgaaaggcggactttatgaggtcgatttaatgagacgtcattgcttccctgtgtactggaatggggagaacaggcgtgtcttgaggggccactggtttgctcgcaaaggagggcttgattggatccccttgcgtgaagatgtttctgaacaacttgagctagcatataattgtcaggtatggcatcgccgtaaatttcaaccttcaggcttatttgcagcacgtgttgatctccaaggaagcaccccggacttgcatgctctttttactggagaggatgatacctgggaagcttggctggtctttgatactggtcctaagctaggtggcaacacaatcaaattaaggcgtgggttttcatcttctggatcagcgaagcctacacaggatgagttgcgtcagcaaaaagaagaggaaatggatgattactgttctcaggttccagttggtcatctagtatttatggttcatggcattggccagaggttggagaaagctaatcttgttgatgatgttgttgatttccgccgtgtaactgctaatttagctgaaagatacttaactccttatcaaagaagtacccagagggttctgtttattccttgtcagtggagaaagagcctaaagctcagtggtgaacaatcggttgagaaaatcactttggatggagttaaaggtcttcgtgtagcattaggtgccacagttcatgatgttctgtattacatgagtcctatatactgtcagcacataattgactcggtctcaaaccagttgaaccagttgtacacaaagtttatcaagagaaatcctggttatagtggaaaggtttcaatatatgggcactcgttaggaagtgttctatcttatgacatactttgccaccaagaatcttcttctgcaccatttccagtagattatatgaatatggaagtttcttctgatgaaggtcacatagcaaaatcgcctgacacagttactgcacatgaatcagtcatgaaggagcaagatacatcttccatttctgggcattcttgtgctgataatgtaaatgatgtagttgatgaagggagcaccagaactggcacttcatgtacagaggacaccaccctcccaacatgtgcacttgaaaattcaccgaaacttaccacagatgcactacctacagcagtagatggagaacaaattgaagtcgaaaaacaggtcgacaatcataaaattgcatgcagtgaagaaggggacaattcatctgtaagagcaaaagacattgacagttgtatcatttcaagatctgctgagggagtccatgcggatgtccctgacaaagatacattgatatcatcattgaaagaagaggtggaacgccttaaagctagattagcacaacttgaacaacataatgatttggtgactgaaagcagtgctgagtctcatcaaggtaaaagtgccactcatgcagtgaacctatcatcaggcaaaaaccgcatagggcaaggaagcacgagtgagtcctacacaccacacatcagatacactaaactaaattttaaggttgacacattctatgctgttggatcccccttaggagttttcttgtccctgcggaatgttcgcattggtattggcagggggcaagattattggcaaaatgagaacatagttgaagagatgccatgctgccgtcagatgttcaacatttttcatccctttgatcctgtagcatacaggattgaaccacttgtatgtgaagattacataagcaagcgccctgtaattgtaccctaccatagagggggaaagaggatacatgtaggagtgcaggaattcactgaagatattgctgcaaggtctcaagctgttgctcgccagttcaagtcactgaaggttaaagcagtagctgctttgctatcactgagcagaaatgacacggacgaggacgttgacagcaataatgagaaagagaagtcatatggttacatgatgatggaaaggctgacaggttcaccagatggtcggattgaccatgtacttcaggagaaaacatttcaacacccatacttatctgccctgggatctcataccaattattggcgagatcatgatactgctcttttcattctcaaacatctgtaccgtgatatacctgaagaacctccaactgatgatcctgaaaggatgcctattcgactgttttatgtgagggatccaattgctgaagagactcccttgacgttttcagataattcattagttaaggaattctcaagaaaagtgagaacttattcaagaaaatctgagaacgattcaagctgtgaatcttcctgatggatatgctatgataatctcactgagagggtagattctagacatggaggaacacttagataaagagatgcgtggttcatagttcatacttgaccacagaatcggagcacccgggtgaatgttgtacataaaatctgcccggttgccgtgcaacttttgtatctaaactaaagaaaatgtaatgttgtacatgtacaaataaggctatataggaaatggaaaaagaaaagagattagttttgacc

SEQ ID NO: 16314 - DNA, 1134 bp, Oryza sativa
  ref <308>: DATABASE ACCESSION NUMBER: AK066814
  ref <309>: DATABASE ENTRY DATE: 2001-12-06
gatactaccagtacaccacctctctccctggtcttgtttggctagctaagctagtgagagatgccgccactgaatccaagagtggttgggtgtggggagaggacactggtcctctcccatggctatggaggcagccaggccatctgggacagggtgctgcctcatctcgccgagacgaacaaggtcgtcctgttcgactgggacttctccggcggcggcggcgacggcgagaaggcggcggcggaggaggaggaggagtacacgttcgaggggttcgcggacgagctggtggcgctgatggaggagatgggggtgagcggggcggtgtacgtggggcattccatggccggcatgatcggctgcattgcctccatcaaccgccccggcctcttcacccacctcgtgctcgtcggcgcctccccgaggtacatcaactcggatgactacgagggcggcttcgacgagccggagatcgacgcgatgctggccaccatctcgtcggacttcctctcctgggccaagggcttcgtcccgctcatcgtcggcgccgccgccgacaacccctccgccgcggagacgctggcgcggaccttcttcgccatggacccgcgcgtggcggacgcgctggcgcgcatgatcttcctcggcgacaaccgcggcgtgctgggccgcgtcgccgcgccgtgcaccctcgtgcacgcctccggcgaccccgccgcgccgccgtgcgtcgggcgctacatggaggggcgcatcgggcgcgccgccttggtgaccgtcgactcggccggccacttcccgcagctcgtggcgcccgacgagatgctccggatactcgacgctgtgctcgccgaggaggaggaggcggccgccaagggcggcggcgtcgccatcgtcatggaggagaggggcagcctcgccgccgtcggcgaggtggaggtgaagggcgacatcgatgtggccacgtagatagctagccacttgccacttccattgttccatgcttaccggccggtaaccggtgccagccggtcaacgacggctataagattacttgatgttcgtgtttgggtcgtcatgtacgtggttcatattaaattcgataaattaatcgtttatggatttggaaaatgt

SEQ ID NO: 16315 - DNA, 514 bp, Oryza sativa
  ref <308>: DATABASE ACCESSION NUMBER: AK066815
  ref <309>: DATABASE ENTRY DATE: 2001-12-06
gaaacacacaagctttgatcgatctctcccacacggctcaaacgcgcatacacgtaaacacacaagctttgatccttctgttcgccatggacggcgaggcgacgagcttgatgatctcgccggagatccgcgacgcggtgacgaaggttgccgtgttcgtgctggtgcaggcgctggtctacctcatcctccgcagctcgtcgagcgtcttctccaaggacggcaagctgaggtcgtccatgagcttccggtcgatgcggtccatgagcgtcaggcgcttcctcgcgccgctctccgacgtccccgtcggcaccgacgagccctggccgtcgccgtcgtcctcgccgtcgccgaccttgtcgcgccgctgggctagccgccgcgaggattaattgaagcggttagtgctagcttctgggctctggccagctaggtgctagtttggttactctgaagaaacctgaattatcatgggttggtttggtttgtgattaatggaaatggaaaatttggg

SEQ ID NO: 16316 - DNA, 1746 bp, Oryza sativa
  misc_feature (880)..(880): "n"=any one base of a, t, c, or g
  ref <308>: DATABASE ACCESSION NUMBER: AK098968
  ref <309>: DATABASE ENTRY DATE: 2002-08-28
ggcttgcttttgcgcaagtttcaagcgatgcgccaccgcgtcggccccgccgccgccgccgcggcggcgtctcggcggttctcccacctccgcccgccggccccgccgaacccgaggctcgccttccttcgctcagagtttgatggccgtgagcccggccgacagccaccgtcaccggaaacaagagaggagccaaaaggtggcgagcgcgcgcgctcgccggtggccgtggatatcgcgcacccgtggccggagtgggtggcgctgatggagctcctccttcagaggggccacctcgacgcctccgtgttcgccggcggcgcggctggctcgccgtccaaggattccaacgttatccgcaccgcctgcctccggtttgggcgagagcggccggagcttatcaggcatctatcaagatgggatatccaggttgctctccggtatgggtgccccagcattgacaggaaggttgttaattctgggaagcgattacgtgctcatgtaggccttgatgaaggagaggtctgcagccaatgcaatttaaggggtggatgcgagagggcatatgtaaaggctcggaaggaggaaattggaagaactgtggatgttatgcgcatccttttgacttatgggcttgacacagttactggcaatgtggagaacagagcatgtctaaacaaaaccattaaagaatctattaagagcctacttaatgagattgttgggttcgattccatgggtcctggttccagcactgaaaagcccacacaccgtatgccaaaaggacaatcttctattcctatgaagcagggtgattggaattgtccagatgcaacttcttgaagcttgcagagaatatagagatgttacgctgcaatgnaggatctgaaggtgagtatcagtgctccatgagaagccagagcatctcctctcaaaaaggtgattggatatgcaaaaggtgcaactattgaatttcgcaaagaatacaagatgccttcagtgccatgagaaaccaacaaaccgtcaactcaatccaggggaatgggagtgtgtctcgtgtaattatttgaacttcaagaggaatgcattctgtttgaaatgtggttggaaaagaccaaaatcattgaacaaccaagacagtattgaatcacaacgtgacttagatgataataagcattctgctatttcatttatccaagatggcatccaatcgaggaggcaaattctgcaaaataaggctccattgtctgacgaagattcagacttctggagctccgaggaggaaggggcctaccacagtgacaaaaacattcccccaataaagaaggattacaagttccttgaaagttttcccatcattgggggtaggactgctatgtctcaagatcctcttgagagggagaaatggaaggacgaaatgtccaggagaaacaaagggctcctaacagaagtatcagaagaaagtaatcggccttcgtgccccgttcgtattccgagaagcattgagcagattgaatctggtgacgacgacgacgacgacatttcatcatggttttctggtggtactagtaatattaacatgaaaaaggcatagccagatttctgtaaacgctagtatctgcacaatttcatctgtaatatttacagtgtaggcattcagtaagaaaaaatcatgtctcgcaaagaacttcagtattgtacttctgctatgatctgtcttggcaaataatatactatgattttacg

SEQ ID NO: 16317 - DNA, 2409 bp, Oryza sativa
  ref <308>: DATABASE ACCESSION NUMBER: AK066816
  ref <309>: DATABASE ENTRY DATE: 2001-12-06
gttttatccataaggtcttggaaatttacaacttttggtttcaaactaaaaaagagaaaaaaatcaacaattaatatttacagctcgacagaaggatcacgcccgtagctcagtgtctgagctcttgttggctctcaaaaatccacgctcattgtcagaatcaagcaataacaccttaaaaagaaaatcacaagaatccctaagcatgtcaatgaccgaagttcctagtaagagaagctctgaaagtggatctcgccgaaattctcgtagcggaacaaggagctcgcttcagaagatcaatgaagtacctgatcaagggaatagaactagaaaatctggtctgcgtgcatttatgggttttcttggtatgggccatggaagtgtagagaagaacatgctgaaacctagagatgaagatccactgatcgatagtgatgatgaaagacctgagagctttgaagatgagtttaggaggaaagaaatgaggaggggtatagacttggctactacacttgaacgtattgagaagaattttgtcatcacagatccaaggttgcctgataatcccattatatttgcatccgatagctttctgcaattgacagaatacaaccgtgaagaaatattagggagaaactgcaggtttcttcaaggccctgaaactgatcgtgcaacagttaggaagataagagatgccatagataaccaggcagaggtcacagttcagctcataaattatacaaaaagtggtaaaaagttttggaacctctttcacttgcaaccaatgcgtgatcaaaagggtgatgttcagtactttattggggttcaattggatggaactgagcatgttcaggatgatgctgcaaaagagggagtcgtgctggttaagaaaaccgcagataatatcgatgaggctgcaaaggaactcccggatgctaatttgagaccggaagatctatgggctaaccactcaaaagtagtcctgccaaatccacatatgaaggatactgcatcatggagagccatccaaaaggttctcgagagtggtgaaagtattggtttaaaacattttaggccagtaaaaccattaggatctggtgacactggaagtgtacacttggtagagttgttgaatacaggagaatactttgccatgaaagctatggataaaagcatcatgcttaaccgcaataaggttcacagagctactgctgaacgccaaatccttgatctattagatcacccattccttccaacattatatgcatcatttcagacaaaaacgcatatatgcctcattactgactactgcccgggtggtgagctctttgtgcttctagataatcaacctctgaaggttctacatgaagatgcagtcaggttctatgctgccgaagtggttgttgcactagaatacctacattgccaaggtataatataccgagacttaaaaccagagaatatcttacttcatagagatgggcacatctcccttacagacttcgatttgtcttgtctaacatcttgcagaccgcaggtctttcttcccgaagatgctgatgagaaaaaagggagaaaaaacgggagttaccccatattttttgctgaacctatgcgagcatccaattcatttgttggcacggaggagtacattgcgcctgagattattacaggagctggccatacaagcgctgttgattggtgggctctagggattcttctatatgaaatgttgtatggttatacaccttttagaggaaaaacgaggcaacggacatttgctaatatcttgcacaaggatatcagatttcctgctagtatatcggtcagcctagcggcgaggcagctaatgtataggttgctacatagggatcctgccaacaggctagggtcctacgagggagccaatgagataaaaggacatccctttttccgtggtataaattggcctcttatacgcgccacggcgcctccaaagttggagatcccactattttccaaggatgacatggagaagaagggactagtaacaaataaccgcacggatatgttctgaagaccctgatgatgatcttcaataaaagagagggacatatattgttgcttgctttgcgtgcgtaggccaagattaagattatgtcatgtaaatatgtaatgtatcgtacagaccttgttgtgtttgaacctagtatgcgatccatcatcttaataagatgcaatgcagcgcaatgtgtgccagtgaacagtaatgagcttgacttgagtttatagtagtctagtatagtgagtagaggaaaaaaagagtaaattgtattgacggtacgtaaacttgtcaagtgggtgcaatttagtatacgaacttgtaaaacactcatttggatgtatgaatttgtttgatgtgtgtgaacc

SEQ ID NO: 16318 - DNA, 2496 bp, Oryza sativa
  ref <308>: DATABASE ACCESSION NUMBER: AK066817
  ref <309>: DATABASE ENTRY DATE: 2001-12-06
ggctcgttctccctctcccgcgccgtcgtctccgctttcccctcgcgccgagcgccgccgcagccgcagccgccgccgcctccccatcgcgcagccacgtctgcctggcaccgtccccatcgccggccgcctccgcctccgactccccctcgcgccgcctccacctcctccgccatcgccgtcgccgtcgccgtcgcctcgctgcgtctccgggcgcctccgcctccgtctccctcctcgcgtcatcgccgtcgccgtcgcctccccatcgcgcagccacctcctcctagcgccgtccccatcgccggccacctcctcctccgccgccgccgtcgcctcgccgtctccgtctcccccctcgcgtcgtcgccgtcgccgtcgccaagcgaagcagtctctgccaccgccaccgccaccgccgtgcccgtcgccgcgcgtctccgctgtgtccttcgtcgccatcgccaacggccgcaactctgccctccgttgccgtcgaagaaacggcgatggtcacagagccgacgacggtggctgcgcgatggggaggcggaggcggtacagatacaatggaacttttggctgcttgctgctcgtcacttctccctcaggtcgtcgtcttcgtttatccccatgtattttgtcttgtccatcgcctctgcagggaagaagaacatgaggtgctaatcactgctgttctaggtgctaatccgtcaaggagctcagatctgtggatcctagactagagggttagggttggtcaggtggtatagtatcccattacaacatgctctttcatatgcttgttgattcatcgatgatctcaactcccaagtggggaatttttgtctacaaattaattttgatttggatgcgcttttccgtttgttattctgcgtgcaaaacttgttatgatgaaaactactatctttaggcaataataacggaggtctctccttgggaaagagagctgcgtgagcagtttgccgcttgcttacactaagcaaaagatccactgagcattgaaaattttgtttacatgctgccaggctgctggaatcgtggaagctgtgcggaggatctactcagatgttgatcgaaatggtgctggatttgggagctgttgttctcaattgccgggctgatcactggaggtgtgattctgcttgtcagttgagggaagaattcacacacttgtgttcactgaggacatcttctcaacctattgcttccaccgatcatctttaatgctagataatcaagaaccatgatgccaatagtccactactatgctttactgctttcagattaatgaagatatcagttgcagagagggctattgtggttcctcagccatggcaatgtgagtatatatatgtatacagctctcatatgaacagcattttctatctccgtttgtgcatatgttggattggtgaatgaagataccatgttcggccagacctgtgttggtctcagagcagtggtttctctgagatggtaaagggattccaattgttttttagacaccaaaatgattgcattaagttgtcatcttttgtagatattagttatgcatttttttttttagcttctcggatttatctgactgttaaacaaataaattgatgtgcacatcttatgttcttctcattgaggtgttacttacgcagactctggttaaattttaacaagcatggatgaagaaccaaatcctgcaaaggagcttgttggctgaaatgccaagttagatatgattataacttgaaagagtagctgtcttaattaatcaagaaacatgtgagctatgattttccccttttagtacaggtatttcttgtcatggtttttgtgaagaaaaaaaatcttttgacaagtatgcaggccaataaaaccaggtaatatcatggaacagaagtagattgtattgatagaggtgcaaatcgtttaattctttgttttgcaagaatctttactgtacagagtttctctttctgctgttatcagcggtgcgtggcacatgacatatttatggcaacttaacatcgatgctgcgcctttgcagatggtagagaccagtttctctgtggactatttgcaggcagaatgaaaaatgtgtgatacagatgatggagaaggagctgatgagtgaaatcaaggtcatggatatggtatggaactgcaagttttttggaacaccgttgttgttcatggacataatggtcatagatgactgctcaagtaattgatcaagaccttggtttttgttcccccgcctggttaggattccgcattgggtgcttgccagggaatttgattttgacatgcttttctcaaggtgcatttgttgatccaaggaaacaccgtgaggtatgcggtgattgtagttcatgtaactgggattgtctgccagttgattagtatttgaatcgctatggttgatcaaaatatgtaaacatagatcttacagatatgaaaattttccttggctgtagc

SEQ ID NO: 16319 - DNA, 2748 bp, Oryza sativa
  ref <308>: DATABASE ACCESSION NUMBER: AK066818
  ref <309>: DATABASE ENTRY DATE: 2001-12-06
gtacgaagcaggagaagcattggtcgaccttatcttcaacgcgccgcatccagctctccgtctctccgttcgcgggatagtcggcgagcgcgagttggagatcatcggttctcgcggcgatgacttttatcaacgagcgaaccgtctccgactggaactctgggatcagtatgtttgttccacagttcatccgttttcccaactatcgcatatttgtcgttgcgttggcaaaaaggagcatacttgcatccgtctccgccgcatctgtaatacacaaaggataactacaatggcatgtgatatgcttcaagctgttaacaatgaaaaggaaacatggaaagctgttaacaatgggtaattagactttgggttgccataaatcctaacagcaacgagcttattagccttgacatgatactgattgatgaagaggtcaataggttcagggcattcaagaaggatcagtgtccatgatatctaatttcaaggtttcttcagtagcagaatatcgtccagttcacaatgacaaaattctcaacttctcaaaacactgccaaagttcaggagatcaaaaccctagaaaacaaaccaaaactagaacaaacctttagattttcaaccattgagagtctttccaaaagagtatacagcaaaacatatttatctgatgttgttggcttagcatcttacataggacaaatcgaagaaacacaaacaagttgttggataagcaagatccgtgacattatgcttcgaattgaatttcggctctcccaacgctccggtgtatttcaagatagtcgccaaggtccctctagccgcagagcaagcaatcctttcggccctattggtagcatcctctactcgtggtaccgtggccattgggttattccaggtgcgccgcaaattctctatcatgggcggtgggtgtaaggggagtgacataggtgcattacaaacccacgataggaaccgccatcttagtcgccttgtggctgcggacttctcacttggtggccttggtggcatcagcacatccagcacaggactatactacacggagatagggattgggacacccgcaatggaatactatgtgcaggtggacactggcagcagtgcattttgggttaactgcatcccctgcaagcaatgccctcgcaagagcgatatattgaaaaagctgacattatatgaccctaggagctcagtaagttaaaaagtggtgaaatgtgatgatatgttctgcacttcgcccgatagggatgtgcagccagaatgcaacacaagcttactttgtccattcatcgcgacctatgctgatggtggatcaacaataggcgcctttgtcactgatcttgtgcactataatcaactctctgggaatgggctgactcaatcaactaacaccagcctcacattcggggtgtgacacgttgcatcagaagtcaagagacaattcaagcctcgaagtccagaaaagaagattcctatagaccccagtgtcatgaacttcttcaggggtatgtctgcacctgtcaaggaggccatcaagctatcggactatgagcgaacgctgaagaaagcatcttctggaaagtctaaaccagtccctcagcttggagagcaaccaaaccaggagatcgagccgttggtgaccgggaaagacatgacgatagaagaatttattattgacaccggtctaactacggatcaattgctaggagttgaaccaatagaaaaggcggaattgaaatacatgtacgaactcggtaaatcgcttgtcaagcccaagctggtgcagtccctacccacacaaatgtacaggttccatcagctgtacgtggagatgagcgccaccggtagagagatgatcggagcgaggatcagggacttggacttcttgcaaggagatgatattctctggatcaatttcaagggaatctacgaagtataccagctggacgccctcgacgtctctattatgagttgctggactttaatggagattcaaagggcccgatggcggagggttttcgatactggattcatcgaccctcggagagtaaacgttgcaatgctcgaccaatatccgcaggaaacaggaaacagaggacaatctcgtccatctcctgaaggcgcagcattacaagacgttcatactgttaccgtacaacacagaattccactgggtgcttttattcttcgacctgtcggcctgcaccgtcaatgtatatgactcaatggataaaagagagtctacgtttgacaaggttttcgaacttatagacagggcttggtatcggttacgtcatttggtccgcggcaactggagagaaagacttaggcggaggttcaaatttccttgcgcaaagcaaaagcagggaactaacttgtgcggctactacgtgtgtgagtattgccactgccttgcagaccaaatcatcaccacaagagagctcgattttattcgcatgagggataacctgaccacacacaaggaatttatcgcagtggttcaagaacaactcatgggattcatcaacgaagaaatccttgatcccaagggtgaattctactacgacggaaacacaattcaccggtccttagcttctgagctagcagcgactactactacgtcgaaatcgtagctagctaggacatataatggattgtaattaatacatgactacatatgtttctatatgcatgtgtacacattttctataatgtaaatatattttggcc

SEQ ID NO: 16320 - DNA, 2292 bp, Oryza sativa
  ref <308>: DATABASE ACCESSION NUMBER: AK066819
  ref <309>: DATABASE ENTRY DATE: 2001-12-06
gcctccccaagcaaagcatcggcatctctcctccctaaaaccccacctcccgtctccccggggcggcggagccgatgagatcccggccatggcgggccccacctcgcgccgcctcctcctcctcgtcgcccgccgcgctggtcacctctgccgccaccaccaccaccaccaccaccgcgacggactcgtcctggcccgctcgctccaggccgctgccgctgccgccgcctcgtcgccaccaccgcttcccgcctcgcccccggccaggagcttttctagtgcattctcaagtgttcatggggagagaccgtcctcagaatatgcaaagatcagaaaggagtcgttagaaagccagtttggaaggatcttgggttcaagctcacgtacactatttgcagatcgtggctttggtccattccttgcaatgtacagggcagcaattatctcttttcatgttatgaagctcactatttggcatttattgctcagtgatgtgcacaaacgggctgagaagttccaggagaccttgatccggttggggcctttttacatcaagtttggacaagcattgagcacacgccctgatatattgccgaatgcatattgtcaagagctctctaagctacaggaccagataccaccatttcctactcgtatcgcaatcaggactattgagtctcaactgggttctcgaatttctgatctatttgctgatatcagcccagagccagttgctgcagcatcgctggggcaagtatataaagctcatctacactctggagagcttgtcgcagtcaaagttcagaggcctggaatgactcccttgctgactctagatgcacttttgttccatatgatcggaggacagttgaaacggtttgcaaaggctcgcaaagatttactggtagcagtcaatgagattgtcaggcacatgtttgatgagattgattatgttttagagggaaggaatgctgaaagatttgcgagactttattctcatgatttaggtgggaatagctccggagatgggacaagtatcaaagtcccaaaggtctactggaattttacacgtaaatctatattaactctagaatggattgatgggatcaagctcactgatgctgagcgcattggcaaagccaatctgaacaggaaaaggatgatcgatgagggtctctattgttcattgaggcagcttcttgaagaaggctttttccatgcagacccccatccaggtaatctggttgcaactgaaggtggatcactcgcgtattttgattttggtatgatgggggatattccaaggcactatcgtgtagggcttatacaaatgcttgtgcactatgttaaccgtgactccttgggcttggcaaatgacttccattcacttgggtttgtccctgagggaacagacctacatggggttgctgatgcattacgtgtttcctttggtgatggaaggaggcaatcaaatgattttcagggggtgatgagccatctgtatgatgtcatgtatgagtttaatttctctcttcctccggattacgcactggtgataagagcactgggttctttagaagggactgcaaaagcattggatcctgacttcaaagttattgaaagtgcatacccatttgtcattgggaggctacttgaagaccccagccctgatatgaggaaaatattgaggcagctcttgatatgcgatgatggatccatcagatggaatcgactggagcggctgattgcagctatatccgaacagtcagaatcttcaaataagtctgaagatagatctggtgaaaatgctgccaacaaacctgggtggagatcattcgacatgcattctgtggttgcagctacagaagacctttttcatttcattttatcaaggaaaggctggagggttcgtgtttttcttgttcaggacattgtaaaagcttcagatgcattcctacaagaagcaacatttccaggtatattcgatgaagaggggactacaggggagctacatccagagagaagtaaaatgataagaagggtggtacatggtgttcaatcattccgtcaagctatcagtttggccccagatgcctggactgctatgctattccgtaccttgttgaaacctgaatcccagaaatttattcttgatgtctttctagccttggcaatgcattcctgttacaagattccagaaacaagctggatttgtatgtcgagattcctgaattacttggacaggcagggtaggtaacacagataatggaaatgcagtctaattatcttttg

SEQ ID NO: 16321 - DNA, 3283 bp, Oryza sativa
  ref <308>: DATABASE ACCESSION NUMBER: AK066820
  ref <309>: DATABASE ENTRY DATE: 2001-12-06
gattgcattgcgtagcgtggactatcactaacacacaatggctagaatggctagaactccagttcatccacgatcgtcctcgattgtagctgcattcacttaccttttgctagtcctcttccgagacgccatcaccaccgcagctgcatctcccaaagctccggcatccaccaatggctgcattgcagccgagagggatgccctgctctcgttcaaggctggcatcacaagagaccccaagaaacgcctcagctcatggctaggtgagaattgctgccagtggagcggtgtgaggtgtagcaacaggacggggcatgttatcatcctcaacctcagcaacacttacttatattatgatgatccgcattattacaagtgcgcccatgttgattttccgctgtatgggtacataagttcgtctttggtaagtctacgacaactgaaacgcctagatcttagtgggaacgtccttggagaaagtatgccagagttcttgggctcctttcaaagtttgacccatctcaacctagcacgtatgggtttttacggcagagtacctcatcagcttggtaatctgtctaatttgcagtttcttgacataacatctgaaatttatgaccatcctcctatgcacacagctgacatctcatggttggcacgccttccttcattgaagtatcttgatatgagttatgtgaatctaagctcagtggttgattgggtccgtccagtgaatatgctttcccgtcttgaggttctacgccttacagggtgttggatcatgagttcatcatcaacaggactcaccaatctgacaagccttgaaacacttgacctctctgagaacactttgtttggcacggtaattcccaactgggtgtggagcatgaagacggttaagatgcttaacctggcctcatgccagttgtctggttcatttcctgatggattaggcaacttaactttgttggaaggccttaaccttggaggtgatagctaccatggaagtaatagcttcgaagggacgctgccatcaacattaaacaacacttgcaatctgagggtcctatacctcaatgagaatttgatcggcgtggaaatcaaagatctgatggataagcttccaagctgtacttggaataaattggaggagcttgatttgtcttataatgacattactggaaacctggattggctggggagccaaactagcttaacaagcctttacctatcttggaacaaattcagtggtcatttgcccttgctaatcagagaaatggctaatttgacaactctaattctacataacaataatatcagtggtgtgatctcaaaccagcatctttcaggccttgagagtttggagagaatcattatgtcttataatcctttaaaggtagtgctggacgaaagttggagccctccctttggattgttcgatgtttattttgcatcttgccaactgggtccagaatttcctgtgtggatcaaatcgttgaataattgttactcaattgatgtttcaagttcaggcataaaagatgagcttcctaattggttctggaatttagtttctgacgttgcaaacgtaaatatatctcataatcagatcagagggaagttaccagacagttttcaaggtatgtcaactgaaaagctcattctagcttcgaaccagctgactggtcgcctgccatcgttacaggaaaatctctattatttggacatttccagaaacttattgtctggtccgctgccatttcattttggtggcgcaaatcttggtaaactcattctcttttccaaccatatcaatggcagcattccacagtccctttgcaagatgcacaatttgggtgccttggatttagcagacaattttctggtaggagaacttcctcactgtttgccgacagaactgaaaccatcgactggtggtagttttatacattccacaagtctgaacattcatatccttttactaagcaaaaatcagctttctggagagttccctatgctattgcaatcgtgccaaagcatcaccattcttgatctagcatggaacaaatattctgggaagttgccggagtggataggtgaaaagttgccatccatagtaattctgctatcaggtctaataagttctctggtcatatcccaggtggttttaccaaacttgatcatctgcggtatttggatatagctaataatagtttttctggtactatcccacaatcccttccgtgcttgaaaggaatgatcaacgaaccagaaaatttagaaacatggttcctatttggagaggcactggaaaacggattcggagctttcgatgtattcggcctgttccattatagcatatcatgtgttctgcaaggtcaacaacttgaatacagcaagggacttgtgtacttggtgggccttgatttttctagcaacaaattgtctggccatattccaaaggagattggttctcttgtcgaattggtaaatttgaatctgtcctggaaccagttagcaggaaacattccggatcagattggtgagctgcaccaattaacctcccttgacctatcatataatcaattttctggagaaatcccttcaagcctatcaaatttgacattcttgagctatctgaacttgtcttacaacaatttatcgggaaggattcctcggggacatcaactggacacactcaatgcagatgatccatctttgatgtacatcggcaacccaggtctttgtggttatccccttgcaaagaattgtcctgaaaatgggacatctcaaggtcaaaccgttaaaagtcatcacgatggttcgttctgtgctggtctcagtgtggggtttgtgattggagtttggatggttcttgcgtcacttttgttcaagaagagttggaggttttcttactttcaccactttgataggcagtatgacagattgaatgtgtttcttactgtcacttcagcgatatacctccaaaaggctacacgatttaaggatggaagaagctgagtggtttcctacatataagggctttctacctgagaaaattttctcgtacttgagaaggtaccgagagctactatattttctagactaaaaaatgtggaacttctcgatatcttctcaaggatcatctaatcaatcggaagttgaaaaataatcctacattacatctttgtaatattagcccatgtgtggctctctatgttgccttcttgtcttgttttcaagcactcgtattagaaaataataatctcgcagcatatcgtgc

SEQ ID NO: 16322 - DNA, 813 bp, Oryza sativa
  ref <308>: DATABASE ACCESSION NUMBER: AK098969
  ref <309>: DATABASE ENTRY DATE: 2002-08-28
gctcctctccctcttcccccaactgcaaagcagctgtccacctccacgctcctcctcctcccccaaccccaacctctccgccttccctctcgccggcggcggggatcctcatccgccccgcgacgcccggccctaaccgcggcggagatccgtggagggtggggggacattcttggtaattaagccgcgcggcgcgcgcctcccctcttcttcttggattcgacggggtggcgcggggatgaacacgaggccggtggtgctcgtcttcctcctgctggtgctcgtcatcacgtcgcagttcgagtggaagcagcagatcggggacgccgccgccgaccccgccgacgcgcgccgcaggcaccagggcctcgccaaggaggacgccgtcaaggagaagataatattttctcaggagaaaaatattcaacaacttaacgagcttattgagagccttcagcggcagctcctgcattgccgtggtagcaacaacactgtccacaccacaacagtttctcatactgaagttagtgaggtggacgggcaggaaagcattgatgattgatggtattggtagataacctcttggcaggttgttcactgattctagtacagaagccaaagaacaacggctgatcaggcagcaccatactctacaaatgccatctaatagggaggtaccaaatcacactgtattgtacacttgctaccagtgtttctctggtaagattgtagagagctgtaacatgtaatatgttggttttaggtcacggccactaattcaattgaaaagttgcttgatgattcttttgttgt

SEQ ID NO: 16323 - DNA, 2551 bp, Oryza sativa
  ref <308>: DATABASE ACCESSION NUMBER: AK066821
  ref <309>: DATABASE ENTRY DATE: 2001-12-06
gcctaggtgccacaagaatggcttctgcctgtagtggtggaatggccattgagtattatgcagcaggggattttagtaatgcaaaacaactttttgatggtgttgctggcctataccgtcaagaaggttgggccactttactttgggaaaacctaggttacttgagagaatgtgcaaggaaacttaagtctctgaaggactttatcagttattcacttgagatggctgcattacctttattctctggcagtggacagggaaattcagaaaataaaaggaaaaatggaccagcaggatctcctaccatttccagtagagagcttatacagcaggaagttattaatatcttggaaggaaagcatgcatcggagaacactgatgatgaatttgatcttcatttgatggaagaatctactcacctcgatattgatcaaataagtccactaaggatagtgtttctcgcatctgttgcttttcacgatcaatctgtaaaacctgattcaccaatgcttgtcagtgtctctctacagtctcatcttccttgtccagttatgattgataagttggaggttcagtttaaccaatccgactgtaactttgttatagttagtgcacaggaagattgttctgcatcaaattcacatgttcatgatggagctgttcagactcctctgacactgttcactgataaatggatgcggttgactcatgaagttaaaccaggacagagtggaaagctggaatgtttggcggtgaaggcaacaataagtaaacgtcttgtagtttgctgccaagcggaaagtcctgtttcaatgggagaattttcattgtggaaatttgaggaccaagtagaggcattacctatgaaggacaatgtacttgctttttctgggcagaaactgatccaagttgaagagccagatgctcaagttgaccttgtcttagattgtcctggtcctgcattggttggagaattatttacagtcccagtgaccatattgtcaaaaggacacgcagttcattctggtgaactgaaaatcaaccttgtcgatgccaaaggtggaggccttttgatgagtcctagggaagcagaagaatctgaaagtcatcatgttgaacttcttggtgtctcagatgtgaccacggaaaatgggtcaaaggaagaagttgatagcataagaaaaatccagcactcgtttggggttgtatctgttcccacattatatgcaggtgattcctggtcatgcaaattggaaataaaatggcatcaagcaatgtcagtgatgttctatgtctcacttggctattccctggactcgactgaagaagcagcactgcacagacttaatgtgcacagaagcttgcaaattgaaggtaagatccccatgatagtcagtcaacagtttttgagaccatttaggcgagaacccctgttattatctaggatcagatcctcaagtgatgatgataaaaaaagttctcttgctttcaacgagtcaaatatgcttattttaagtgctagaaattgcacagaggtacctttgcggctacacacgatgactattgtgtctaatgatgatggaaaacaactctgctcagtgcaacagatcagtgggatttccaatgaatacgcagttattgctcctagtgaagaatacaaaggaatattttcagtgaatccacatactattagtccaagcttttttctaggtgaaatttgcctgagctggtcaagagattcaagcattggagagagtcaagatagccgtgttataatgaaagaaaggttacctgaagttcatatcgaggagccgccacttgttgtgaccatggagtgccctccttatgctatccttggaatccctttcacttttcatgtgaagatctacaattcaacatccttacttcaggaaatcaagtactctcttgttgattcccagaacttcgtcttctctggggctcacaatcatgctgcatccattctgccgaaaaccgagcatattgttagccataagcttgtgccgcttggttctggttcccagcagctgccaaggataacaataacttcagtgaggtattctgctgcactgactccttcagcctcagccgcaactgtctttgtatatcccagcgagccgaaattcaatttggaaaagggctattcgtcaactgatccgtgcgttagctagacttgtatatactcagatactctggcagctcttagctttgttccggagaagcgaggtatgctcctgaaaaaaacacgccagttttatcttaattcttgaataggcctggagcagattctgttggtgaacagcggttggatcattgcaaaagttttggcattcttttcaggtgttgatttcgtatacctttttggattgaccacatttctgtaacttacgatttttgtaccgttgattttggctaaggataatcaatcatacacacaagacgggctggtgtaaattagcaccccactagagacaagtggggaataaactagtcccatgtctcccattagaactcgagaaattttcttgtcttc

SEQ ID NO: 16324 - DNA, 762 bp, Oryza sativa
  ref <308>: DATABASE ACCESSION NUMBER: AK066822
  ref <309>: DATABASE ENTRY DATE: 2001-12-06
taggcccaacggcggcttcctgtacgtgcgcgcggcgaggcggacggtggacttctaccggcggtggcgcgacgcgcggcggcgcttcccgccggggaccaacgagcagcacgtcctggagcgggcgcaggcggagctcagccgccgcgccgacgtccggatgcagttcctcgacacggcgcactgcggcggcttctgccagctcagccgcgacatggccagggtctgcacgctccacgccaactgctgcaccggcctcgccaacaaggtgcacgacctcgccgccgtcctccgcgactggaggaactacacggcggcaccgccggcggcgaggcgccggggaggcttcggatggaccacgccgggcaagtgcatccgctgacacctccagcagctgcttgctactagcttaattttaagcttttagcctagctagctagctgctgctaccactgtttattactacctccgtttcagattataaaattttatagcattgttcatatttatatagatgttaatgaatctatgcacatatatctagattcattaatatctatataaatgtagacaatgctagaaagttttatgatataaaacagataaagtagttattactgtgattgttttacgtactggtcaagagtagtcagtgcgtgtgtacattttcttgtttccctcttgttgggatctaagtgggactgattgatatcaggagcattgtaaaagtgttctttttatcataacatataatacaaattc

SEQ ID NO: 16325 - DNA, 1188 bp, Oryza sativa
  ref <308>: DATABASE ACCESSION NUMBER: AK066823
  ref <309>: DATABASE ENTRY DATE: 2001-12-06
ggcgcacggagaagtcccgagaccggcgccgccaggaccgccacccacctctgcctccgccctccaaaccctagctccggcgatggccccgaagcgccccactccgccgccgccgccgcctccggttgcctcctcagaggaaaccgcctccggctcggactcggacgagtcggaggaggaggaggaggagagtccccttgctcagcccgcacccgtggtctctaacaagggcgcggagtccgattcttccggggaggaggaatcggaggaggaggaggaggaggacttggtgcgctcctccgctaccaagagcagggatccaccgcaggagaatcgcgaggaggatgattcgtccgatgaggaagaggacgagtcgtccgaatccgagaaggcggaggcgccgccgccgccgccgccgaatccggctccgaagcagggggcggaggggaatggcccgaaggtctcgtcgcccaagaggcaggccttccaccgcatctggtcgaccgaggacgaggtgcgcatcctcgaggcgctcgcggcgcaccgccgggagcacgggtcgctgccacagaccgacgcgctcatcgccaccctcgccggcagcctcgacaacactggctacggccgcaaggagctccaggggaaggtcagcactctcaagcgccgttacgaatccaccgctaagaagaagggcgatctcccaagcaagggccatgaccgccggctctatgacctctccaagagcgtctggggcagcgaggcggcagcggcggcggtgaacggcaccaccaccgcgccgagggagttcggcgagatgtgcgagctgtacccgcacctcgctgaggaggtcaagttgctggaggcggcacaccctggcttgttcaagagggacttcgggaagctcgatgacgacaaggcgcatgcgctggacatgaagatcaagaagcagaggattgccgagatttcggtggtcgtgcgccgtggcgacctgaccaaggaggtgaccaaggtgctcgctgagctggtcgagtgactaggtgagctgaactgaagtgaacagtagtagctcggcgttccttaccatggcataagaaagtgtacctggtcattacctgcaaactatatcgtgaacaggcattacctgcaaaattttgcttcttagtgatggagttggatgttctatgttct

SEQ ID NO: 16326 - DNA, 1623 bp, Oryza sativa
  ref <308>: DATABASE ACCESSION NUMBER: AK066824
  ref <309>: DATABASE ENTRY DATE: 2001-12-06
gtttggcgggttcggctggatcttttttcccccttttcctttcttctccggcagcggcggcggcgatgggggacggccgcgtcggaggtggaacgaatcggccggcatggctgcagcaatacgaactagtgggcaagattggcgaggggacctacggcctcgtcttcctcgctcgcctcaaacaatcgcatccccacgctgccgctggcgttggccgccgtggctctcccatcgccatcaagaagttcaagcagtccaaggagggcgacggtgtctcgcccaccgccatcagagagatcatgcttctgcgtgagatcaaccacgagaatgttgtcaagctcgtcaatgttcacatcaaccacgccgacatgtccctctacctcgccttcgattacgccgagcacgatctctatgagattatcaggcatcacagagagaagcttaacctccccataaatccctacacagtcaaatctttgctctggcaactgctcaatggtctcaactatctccatagtaactggattatccatcgagatctcaagccttctaatatactggtcatgggagaaggagaagaacatggaattataaagattgctgattttggactcgctaggatatatcaagctccattaaagccattaagtgataacggggttgttgttaccatctggtatcgggctccagagttgttacttggggcaaagcactacacaagtgctgttgatatgtgggcagttggttgcatttttgctgaattgcttacactcaaaccactgttccaaggtgttgaagccaaagctactccaaacccgtttcaacttgatcaactagacaagatttttaaggtcttaggtcatcctaccgttgagaaatggcctaccctcgctaatcttccatgctggcaaaacgatcaacaacacattcaagggcataagtatgagaacacaggacttcataatattgttcacttgcctcagaagagtcctgcgtttgatcttctctcaaaaatgctcgagtatgatcctcgaaagcgtataacagctgcgcaagctttggaacatgagtactttcgaatggatcctctgcctggacggaatgcacttttaccatcgcaggctggagagaaaattgtgcaatatcctgtgcgtccagttgataccacaactgattttgaaggaacaacaagccttcaaccaactcaagcgccatcagggaacgcagctcctggcaaccagtctgtggtaccgagacccattccgaggcaaatgcaacaacccatggtcggtatgtcgagaatgggtggtacaaacatggcggcctttggtgcagctccgcaaggaggcatagctgggatgaatcctggtaatattccaatgcagaggggcgctggagcccaatctcatccgcatcagttgagaaggaaagctgatcaagggatggggatgcagaaccccggttatcctactcaacagaagaggcggttctgaccgactgaatttgtaattgtatatctatttggtgtgttacttgtgagcacgcttagcttttgcggtggttgctcctagtcgtacagtgagaattgtatctgttctgttgtaattgaacgccatcacaacc

SEQ ID NO: 16327 - DNA, 3196 bp, Oryza sativa
  ref <308>: DATABASE ACCESSION NUMBER: AK066825
  ref <309>: DATABASE ENTRY DATE: 2001-12-06
gccggctgcctcaccttacctcgatctgcaagcaagccaagccaagcataggtagacgacgtgtagatacgtagtcctcctcctctctctcgattctgcacgcctcgtcgagcagctagctagcatatatacccccatacctgcataccatgctgcgtccccagctcaatccatcgtccagccaccaccatacgacgacgacgagcagcagcagcagcacgcagctgtacttcgcctcctcgtcgtgcatcgctagccttcgccggccgtcgccgccgtcgctgatcgccggtgccggctgccggacgacgcggcggagacagcagggtaggcagcgagttgttgtgaggtgcgcgtcctcgtcggcggcatcatcggcgtcggaggcggcgagaagagggaccggtagttcggacatggcgccggcggcggtggtgaaggtgaaggcggtggcgacgatcaaggtcaccgtcgaagggcttctcaacagcctgaggccgtcgaaggcgatcgacaacatcagggatctcatcggaaggtcgctcttcctcgagctcgtcagctccgagcttgaagcgaagacagggaagaagaaggcaacggtgcatagctacgcgcacaaggtggacgacgacgaccatggcgtcgtcacctacgaggccgacttcgacgtgccgaccggcttcggccccatcggcgccgtcgtggtcaccaacgagctcgggcaggagatgttcctcgaggacctcaacctcaccgccggcgatggcgccggcaactccaccgtcctccccatccgctgcaactcctgggtccagcccaagtccagcatcgacgagggcacgcctggcaagcgcatcttcttcgccaaggcttatctgccgggccaaactccggcgggtctccggagctaccgggaggaggacctcaagcagaagcgcggcaatggcgctggccagagggaggccgacgaccgcgtctacgactacgacgtgtacaacgacctcggcaaccccgacagcaacggtgacctcgcccgccccgtcctcggcggcagcaagcagttcccttaccctcgccgctgccgcactggtcgccccccttccaagaaagacccgaagtcggagacgaggaaggggaacgtgtacgtgccgagggacgaggagttctcggaggtgaagaacgcgcagttcttgctcaagacgctgcagtcggtgctccacgccgccgtgccggcggcgcagtcggcgctcatcgacaatctgagcctgaacctgccgttcccgtccttcttcgtcatcgacaagctgttcgaggacggcgtcgagcttcccggcgtcgagaagctcggcttcctccacagcatcgtgccccgcctgctcgagctcctccgcgacagccccggcgacaagatcctcctcttcgacactccggccaacgtccaaaaggacaagttcgcatggctcagagatgaggagttcgcgagggagacgctcgctggcatcaacccgtacgccatcgagctcgtcagggaatttccgctaaagagcaagctcgacccggcggtgtacggtccggcggagtcggcgatcaccgccgatttgctggaggagcagatgaggcgcgtgatgacggtggaggaggcgatcagccagaagaggctgttcatgctcgacttccatgacctcttcttgccgtacgtgcacaagatccggtcgctgaagcacaccaccatgtacggctcgcgcaccatcttcttcctcaccgacgacggcacgctgcggctgctcgccatcgagctcacccggccggcctcgccgtcgcagccgcagtggcggcaggtgttcaccccgtccacggacaccaccaagtcgtggctgtggcggatggccaaggcccacgtccgcgcccacgacgccggccaccacgagctcatcacccactggcttcgcacgcactgcgcggtggagccgtacatcatcgcggcgaaccggcagctcagcgagatgcaccccatctaccagctgctgcacccgcacttccggtacacgatgcggatcaacgcgctcgcgcgctccaggctgatcagcgccgccggcatcatcgagctctcgttttcgccgcagaagtactccatggagctcagctccgtcgcctacgacaagctctggcgcttcgacatggaggcgctccccgccgacctcgtccgccgcggcatggccgaggaggaccccacggcggagcacggcctcaggctcgccatcgaggactacccgttcgccaacgacggcctcctcatctgggacgccatcaagacctgggtccaggcgtacgtcgcgcggttctaccccgacgccgacagcgtcgccggcgacgaggagctccaggcgttctggaccgaggtgcgcaccaaggggcacggcgacaagaaggacgccccgtggtggccgaagttggactcgccggagagcctcgcccacacgctgaccaccatcgtctgggtcgcggcggcgcaccacgccgccgtcaacttcgggcagtacgacttcggcggctacttccccaaccggccgtccatcgcgcgcacggtcatgccggtggaggagcccgtggacggcgccgccatggagaggttcctggacaacccggaccaggcgctccgcgagtgcttcccgtcgcaggtgcaggcaacggtggtgatggcggtgctcgacgtgctgtccacccactccaccgacgaggagtacctcggcggcgagcagacgaggccgtggaacagcgacgcggcggtgcaggcggcgtacgctgggttcacagctcggctcaaggagatcgagggcgtcatcgacggccggaacaaggacaggaagctcaagaatcggtgcggcgccggcatcctgccgtatcagctgatgaagcccttctccgacgccggcgtcaccggcatgggcatccccaacagcacatccatctgatgggaggacatctacttgcaattgatcgttcatgtcatcatgtgtgtgaagctctgaattatttgtgtcagtagtagcattgttacataatttttaatctgcatatatttgtctgtaaaaataagaagtggttgttgttgatgttatttattgaaaatcttatgaataatgtattcttttatttgatttatttgcagaaacaattgatagcatttacattg

SEQ ID NO: 16328 - DNA, 2768 bp, Oryza sativa
  ref <308>: DATABASE ACCESSION NUMBER: AK066826
  ref <309>: DATABASE ENTRY DATE: 2001-12-06
gtctatgtcttttccatgctacttcccagagttgcaaccagctaaagtcaatcccagtgggacatctgctggtggactcccatatattcagggattcagggcagagagcagtatgcttttgcttctaaaattgcagattcatactctctcctcttcttcctcctcttctccaagagttctttgctgggtgctggctgttcttggatattcatacagattacaggcctcaagtctttctgctggtgaattaactgatcttcaggtgagttttgcttattggatttttttttcttcattgctgaatctactaaattctgtgtctaggtctgttgcaagaatttcattgctcttgtctctactgaatatttcaattcatctagggaaagttttttcatggaaacctttttcaggaaaggtattagttcagttttctttggattagactgtatttaatgggctcttcctttcggttcttgtgcttatcatcagttcatctatttctgtttgtaaccgtcagttcatcttctgaagatcaacggtcacaccgcaaacttggttactctacaattcaatgtgaatacaagtgttttttctcatggattttgttggacaacatacaattcttaactctgactgggacgagtgtttctctgtcagatttgcatacttcatgtctttatttctttgttacaatttttctgagttttctagagattttgttcttcgtttctgctctctgggctcacagcaaggagaaacacaagaaaagagacggtgtgtcttttcttccttgagggcatgagttttgccctttttttcttgaaattactctagaaagagaaaagtaggttcattgtgtagaatttttcaacaaagtactacattatctcaatctctttttatcgatcgattattttctctcaggtttatacttttataccaagagtacttttacggtgatctctacatgatattctgaagatatagctgaagagtcctagaagaaaaaccctgaattacagtaatgacttgctttcctgcgttctggagaaacaaaaaatccaggagtcaaattgtgcagcatgacaaagatacaccgatcatcagaaatgtgaagatctactcctccaaggagctcagaaaagccacaaaaaatttctgctcaggacacaaactaggacagggttcttttggctgcgtctacctggtagcttgctagtcatttcaagcattgacatttcaaagtccaaagctcaaagccctgtgtgccataacccaattagttcctccaaatgcctgaattatcataaactgatgaatatatacatatactcttcatgcagtttctatcaatgaattagtgaacagtggtagaagcaatattgccattctcttcatgcttagaagtttctatggctgtaccatttggaccagtcattaacatgatttcgcatttcctcacatgaattgttcagggaaagctcaggaatggtcagaaagttgccatcaaggtgctctcctccgagtcaaggcaaggaacaagggagttcttaaatgagctgagtgtcatatccaacataaaccatcacaatcttgtgaaattgcatggctgctgcgtcgacggagatcagaaaatgctggtctacaattacctggagaacaacagtcttgcacagtccctctttggtaaagaacaaaaaaaaaaatcagtttccactagattctcaaatcatggtgaatttgtgatacgttttgttctcagaactctgaatctctgaagcatcatgatcatgtccttcaggcaattcccatagtagtatccaattagactggaaaacaagagtgaaaatatgcatcggcgtcgcgagtgggctcaagtatcttcatgaagaagtccggccggtcatcgtccaccgtgatatcaaggcaagcaacattcttcttgacaaggatctgagccccaagatatcagattttgggctggcaaagcttttcccgggcaacatgacgcatatcagcgccagggttgcaggaacactaggatatcttgcaccggagtatgcgatccgagggcagctgacaaagaaggccgacgtctacagctttggagttctacttctggagattgtcagtggaagatgccacactgaccccagattgcctcttcaagatcagttcctactcgaaagggcttgggcgctctacgagtccggtgatctcaaaagcctagttgacggcaccttgaaaggcgtcttcgacaccgaggaagcgcaacggttactgaaaataggtctcctgtgcactcaagatactccgaagatcaggccctccatgtcgacgatcgtcaagatgctcaagggcgagtgcgcaattggcgataagatcatgaggccaggcctgatcacagatgtcatggacctgaaaatcagaacagttgagccggttcagttcagtgcctctccacccaaatctccttcagacagcaactcccaggtgtccatgcttgcagtagctggtagcactgtggtagaagagagcccctgatggaaggttggatatctgaaggaaaagatgatttcaggttagaaagatataaaagaagaatgaaaagatgcctgaaaagcaatggttgtaaattgaaagggagatggaaagagccaaagaggatcttatacatttttttttgtttgtgtagttttgctaggtagatactattgtaggaatgttgtttgtatacatagcatctgagttttattatcaccagctat

SEQ ID NO: 16329 - DNA, 929 bp, Oryza sativa
  ref <308>: DATABASE ACCESSION NUMBER: AK066827
  ref <309>: DATABASE ENTRY DATE: 2001-12-06
gactctcgttctatctctcagtctttccccgtctctctccatccccttctctagttttgcccaccagatcaaccatggagccatcgtcgagttgccggggggcggtggatcgggtacttcgccatgtcccccgacgagatgacgcggcggctcgggttttgcgaggtggtcgtcttgttccggggcaccgtcacgccggcgagtagatggctaacctcatgagctcgctgtagtcggcatgcctcaactcgtgcgatctgcaccctaacgttaaggtggattcttggttcctcagcttgtacacctccgccgctagcgcctctcgcgcggatccgctgtcggcggcgacgggaggggtggatccggcgacctcttcccctcctgcatggatcccgtcgtctctccgctcccctcttgtgcggatctgccgtccgcggcgatgggtgggtcgatccggcgacctccgtcgtctctccaccctccgttcgtgctgatccgccgcgggtgatgatgggagggacggaggtggggtggcagactggcagatggggcgacgacctcgacgatggcgacacatgtggtttgggcgccatcgcaatcttttcgcccaggttagataacatgtcagttttgctagctattcggccagccagagaggagggttcaagcttgcggacgaaggtgcaccgaggagagcgcagtcgagtggtggtaccgagcgcccgagcggtggtactgaagatttcaggcggagccggaggcggcaaggtggggctgccggtgttggacggcgcactcgctttcccgcaggccacaacggcgtcccagttcctatctgccggtgattttgttcatttaaatgagccgtaggagggtgatttcatagtgatctactccgatatcaagtccaacaaatatgtaatgttccc

SEQ ID NO: 16330 - DNA, 1245 bp, Oryza sativa
  ref <308>: DATABASE ACCESSION NUMBER: AK066828
  ref <309>: DATABASE ENTRY DATE: 2001-12-06
ggtcggaggaggcctctggttagcgctgcagcaggttgtcaaagaggccctgtcccgttcaaggacgtggccgcggtcgtcgccggcgacgacggcgcggcggccgccatggcgcaccggccgctggctgatccggaggatgaagaccacgacgaactcatcgcaaccctaccgtgcaagccgccgacgccgctaatgagaaggatgcggctgtaccgcggcggctggttcccggagaaatggctccccgcgatcatggcgttccggcggcgcttcgaggcgcgcgacggcgacgtcgtcgtcgccagcctccccaagtgcggcaccacgtggctcaaggccctggccttcgccaccgcggtgcgcggcacgtacccgccgccgccggtggccggcagcgacgacgaaggcaaccgtcgtcacccgctcctccgccttaacccgcacgagtgcgtcccgttcttggagagtgtgtactccaccatggaggaggagagcaagctcgacgcgacgccctcccctcggctactgagcacgcacctgccatactccgtcctaccagcctccatcaccgacagttcccgatgtaaaatcatctacgtctgcaggcaaccgaaggacatgctaatctccttttggcatttcatcaaccgtgacaagtcgcgtgatgtgtcatcatcatacgtgtgggagtctgtccgcgagtgtacatattttggaagcccaatttgggatcacatccttgggtactggaacgcgagcaaggtgaagccagataacgtgttaatcctaaagtatgaagacatgaagcgcaaccccaccgaaaacgtcgagaagatcgcagagttcataggccaaccattctccaacagcgagaaggaagccagcatcgttgacaacattgtagagctgtgcagctttgagaagatgaaggctctaggtgcgagcatggcagggtctcaaaaggtaatttcctccgagttccccaatgattcgttctttaggaagggtgctattggagattgggtgaaccacgtcacaccagagatggctgagagtctagataaatttctctccgaaaaattcgatggatcaggcttcactttcatgtgagaacaattctatgatctccccctttaattacagggaaacagggtgcaaagcatttgaaagggtagcacctgcaccactcatgaatgatttgaaattaatgcaaatcactatgtgttatgttatatttgggac

SEQ ID NO: 16331 - DNA, 811 bp, Oryza sativa
  ref <308>: DATABASE ACCESSION NUMBER: AK066829
  ref <309>: DATABASE ENTRY DATE: 2001-12-06
gagctaggggtcgccaaactccacatcggagtggcgttagaggacctgccgttgagggggagccgccgtcatccgatcagatctggagccaccgtcgccatggctctccaccgcggaggcctaggcagccaaggacacgaggtgactgccaagctcctccaacgcctgccgcagcgccgtccacccctcccgccatcggcgatgttcatgaaggaaacgggatgtaacccgatccgctgggaccagcgccggtggcaccaggagagccgcgacaggtccggggcatcaggcatggcttcctcctccttgctcatcacggaccagcgctgtatcggtgagacctggcggctggaggctggccgtccctgtgctatgcgtggattccaggcagatttggcgctgatggctgacattgcctgcgcagggccacacctgctgctcgtcaatttcttccctatctacaagctgggtcctcaccaacacctgcgacacttctcatattgccggcacccaaagacagccgaggacttcctgaagctgagccccggccgcaagaagaaataatctgcagctgtggttggtattcacactccactatgattgatggaactgatggtttgggtgttgctgatttgggagttggtgacattgaaacaaccactgattgcacaaacacatcaaatatatgtataagttttatgagtctattagtatatgttctttaggttatttttttttgtactagtcttgtatctgacattctgaattgctgacaaatgcatgtatgaaattttagtttttttgctgtgcc

SEQ ID NO: 16332 - DNA, 1393 bp, Oryza sativa
  ref <308>: DATABASE ACCESSION NUMBER: AK066830
  ref <309>: DATABASE ENTRY DATE: 2001-12-06
gaattgtgcagcgagacaccgatagctagctaactaatcttccccttcgtctccggcattattcaacttggacgaacactagctcaccggccggccatggcgtcttcttccgttctgatcaagctgctcgtcgtcgtcggctgcgccgccgcggcctccgcggcgacgctcaccgtgggtggtagctccgggtggacgcttggccagaactacgatacttgggcaagtggccaaaccttcgcggttggagacaagctcggtgagtccttgttttcttttggcttaatttggtagtagtgatcagaatgtttggaatttcaggctggaatttagtcatatttttgttacaatttcttgtttcatgcttttctatacatcaaaagagaaacaaaagggtagaaatttattggagggagtagcacataagtgtacttcttttgccgggtcggccgaccaaattccattaagatagagggtatgcaaatttataaacctgtgaatttcgacaaaaaaaaaagctatcaaaaccgaatggagattggtacacaaacaacctcccgaaaacagaaaaatgtgctacggcttggctgttcctctcccaaatcctttaaaacttcagcttccttccagattatgatttcctctttgacgattctagaacacgcgtgcattcctttccttccaaataagtggagtactaattaatactcgtgactaatcaagcataattggtaatttcccttttcagtgttcagcttcgttggggcgcacacggtgacggaggtgaacaagaacgattacgacaactgcgccgtcgcaagcaactcgatcagctcgaccagcaccagcccagccaccctcgacctcgccgccgccggcatgcactactacatctgcaccatcagcggccactgcgccggcggcatgaagctggccatcaacgtcggcagcggctccggctccggctccggctccgggacgccacccagcaccaccccaggaagcagcggcacgccgccggccaccccttcttccccctccaagccgaccggcggcgcgtccgccggcctgcaggccagcgccgccgtcgccgccgccgccggcgtcctcgtcaagctcgccctcttctgatcgggcccacctgccaggatagaggcagtgcatatgattcttgtttcttgatcatttcgtctgacggccggcatgcatgtgtgtgagagagatgagtggtttgctagctagctagatgatgatggtgatgatgatatggggttgttgttccgttccatcgtgtacttagtactgtaattacgagctgtcatgtgatttgttttctcatctccatggatttgtataattttcctctgaattttatcatctgcatattgatcgg

SEQ ID NO: 16333 - DNA, 1161 bp, Oryza sativa
  ref <308>: DATABASE ACCESSION NUMBER: AK066831
  ref <309>: DATABASE ENTRY DATE: 2001-12-06
ggccgcctctctccccatcctcctcctcctccgccgccgccgccgtcgggaagtacacctgtgctctggttccggcgacaccgcgagcgaggagaggagaggtgggggtgagggagtgagggtgaggccggggttgggcaccaccagcaagccagccagcccccccgtccccttagatccgggccgggcgttctccggcgatctcacggccatggcgtcccgccgcctcttcgcctccctcctcaggtccaccgcggcgccgcgcaccccgtccacgcccgggtgcctcttcaaccgcgccgccgccgccgcctactcctcgtccgccccctacaacggccagggttttccacttccttagtctgaaactgcttcacgtctgggtttgttctccagtcccggcgacacacgccaaccttcatacggagaccgtctaatgcagtcacaacagctgagtcaagactaccgtgctaggacacaggccaataatgcgccacgttttggtgacacaatgtccaggatagctggtggcgagaactcttcctactttgggaccccatcacgcatctttgacgaacacaaacaatctttggtgaaaggaaagagagattttgtccatgtcttgctgaagagaaataagacctttgtgaccgtgacagacgttagggggaacaaaaagaccggggcatccgctggttgtttggaggacaggaaagggcgctctcgtctttccaaatatgctgctgaagcaactgcagaacatgtcgggcgtgctgccaggaagatgggtttaaaatctgtggtcatgaaagtgaagggaactacatttttcaataagaagaagaaagtgatcctgagctttagagaaggctttcggggtgaaagagtaagggagcaatctcctgtggtgctcatccacgatgtgacccaacttccacacaacggatgccgactccccaaacaacgccgggtttaggtctcagcgagctggaatcgaacctgagttgagaggagtcgaagcattcaaggtgatctggaagctctatttaagctgtgtgatgttggtctagttgacctaagacagatatgtattgtttctcttggctctgctacttgaattggttttggcatgacttatgttactcagttagttaagttatc

SEQ ID NO: 16334 - DNA, 2508 bp, Oryza sativa
  ref <308>: DATABASE ACCESSION NUMBER: AK066832
  ref <309>: DATABASE ENTRY DATE: 2001-12-06
gagtgaggggaaggctgggaatctataggagacgcggcgcgacgagcatcccctttcttcctttctctttccctcctcgccgcgccgcctccgcagcagcagagcctctcgaaattttgggcctcgccgcggagcgcgaagagagatcgagggcggcggagctgcgcgtgggtagcaagcggcggcggaggcggaggcggcggagatgacggacggccatctcttcaacaacatcctcctcggcggccgcgccggctcgaatcctggccagtttaaagtgtattctggaggtcttgcatggaagagacagggtggaggaaagaccattgagattgagaaatctgatttaacgtcggtgacatggatgaaagtccccagggcctatcagcttggagtcaggaccaaagatggcctgttttacaagtttattggcttccgtgaacaggatgtaagcagtctgaccaatttcatgcaaaagaatatgggcctctcaccagatgaaaaacagctttctgttagtggtcaaaactggggagggatagatataaatggaaatatgcttacctttatggttggttcaaagcaagcatttgaagtgtcgctggcagatgtctcacaaacacaaatgcaaggcaaaacagatgttctcttagagtttcatgttgatgatactactgggggcaatgagaaagattcgcttatggatttaagctttcatgtacctacttcaaatactcagtttcttggagatgagaatcgcactgcagcccaggtcctatgggaaacaataatgggtgttgctgatgttgattcttctgaagaggcagttgtcacctttgaaggaattgctattcttacaccaagaggacgttatagtgttgagcttcatctgtcatttttgcgtctccaaggacaagctaatgattttaaaatccaatatagcagcattgttcgcctttttcttttgccaaagtcaaacaaccctcatacatttgtggttgtcactcttgatccaccaatccgtaaaggacaaacactgtatcctcacattgtcattcagtttgagacagaggcagtagttgaaagaaatctggcattaactaaagaggttctggctgaaaaatacaaggacaggctggaggaatcttacaagggtctgatacatgaggtattcaccaaagttcttcgtggtctatctggtgctaaagttacaaggccaggttctttcagaagttgccaagatgggtatgcagttaaatcgtctctcaaagctgaagatggactgttgtatccacttgaaaagggcttcttctttctgccaaagcctcccaccctcattctacatgaagagattgagtttgttgaatttgaacgtcatggtgctgggggtgccagtatttcatcacactatttcgacctcctagtcaagctgaaaaatgatcaagaacatctcttcagaaatattcaaaggagtgaataccataacctcttcaactttatcaatggaaaacacttgaaaataatgaaccttggagatggtcaaggcgcaactggtggggttacagctgttctacgagacactgatgatgatgctgttgatccacatctagaacgaattaaaaatcaggctggggatgaggaaagtgatgaagaggatgaagattttgttgcggataaggatgatagtggatcacctactgatgattctggtggggaggattcagatgctagtgaaagtgggggtgaaaaagagaaattatccaaaaaggaagctagtagttcaaagccacctgtgaagaggaagcctaagggaagggatgaagaaggttcagacaaaagaaagccgaagaagaaaaaggatcctaatgcccccaaaagagcaatgacaccattcatgtacttctcaatggctgagcgaggaaatatgaagaataacaatcctgatttgcctacaaccgagattgcaaagaagctcggggagatgtggcaaaagatgacaggcgaagagaagcaaccttacatccaacagtctcaagtcgacaagaaacgatacgagaaggaatctgctgtctaccgtggcgcagccgccatggacgtggactctggctccggcggcaacgagtctgactagagccacacactgacactttggcggttggcgtaatgaagaaatttgttaatccctggaaccactgatgcagtttgggcactgaaatcttctcagctattaaccttgcattgcgctggatgatccgatccatgtgtttgcgtacgatggtatcggctgttctcgccgtggggtgactcgatcacaaaccgttactgtctgtgtacgccgacacgagcgatatccctcggaagcatcgtgctgttaagaagtgcttaatttggcgtagcatctatctcgaatgcaagactctgttagcctatgagcttttgtaaaacaggaagaatgatttgtataacaaaaatttaccatggattggttatgttataacatagtgattt

SEQ ID NO: 16335 - DNA, 1322 bp, Oryza sativa
  ref <308>: DATABASE ACCESSION NUMBER: AK066833
  ref <309>: DATABASE ENTRY DATE: 2001-12-06
ggacctgacctgcccagccagcccctctcctcagtgaactccgcctcagccgtcgccacccgccgtcccgttcctccctgcgacctctgcttggacagcttgcagctcggatcctcggagccgctgcctcgatttcctcctactcggtccactcgctgttcctcctgcaaccttccccttggcactctgctctatggtgcttccggcttcatcgccgcctcaccaaccactgctttctggtcccctcacctccggctggaagatttggccagtgtaaagcatttgcaaattttggcgactttctttgatggggattatatggatctagggattactttgatgctgtccagttaaccacatttgattgattcaagcgggtctcctcacttccggttggaagatttggccagtgctagagcatttgcaaattttatggattttcttcgatggggagtatatggatctgaggatttctttggtactatccatttagcctcatattgttgattcatacaggtcccctcatctactcctgctggaggctgctgctgcggttttcttgatggattttatcaaactctctcggatacttcccctctttcttatttcttacaatcatttatatgccgatcagtttttgtccaaaacatatgtttattctcatgcattgatctgcaatgaccaaatctatgcttcgatcttttaatttgctacagttttccctgcttctctaatcagtaccattacagatttgtctctgtgactgcttattgtactttcaaattgctttacagtgcatgcacaagtctgttgcctattttagtactaaccaatatatagctgttcccaacgaacatggtaaaaatattatctctgcaattctttgcttctatagattctcatgcttacgatatctaatcgatatccatccttcttttgcatggttttcattttcagaacatttcagctttcagtatatgaagttcatgaatgaagtgaccgttgtccggcttgcaactgttccatggtgcaaatcaatcagtttggatatggaacacgcattgtacgggttgctgcttataggttgtttggatatcacttaatggatcaaactagcttgtcatatttgtttatatacatgtgctatttggaattaagtgcagtggttgtacgggttgattcagagttgatcccagcttatatcaggtgattatattgataacatgtattacaaattttattgattttcagtttgagttaatattgtttatcactgtatgcattgttttttccttagcaataaattaattcttcccctggcc

SEQ ID NO: 16336 - DNA, 1069 bp, Oryza sativa
  ref <308>: DATABASE ACCESSION NUMBER: AK066834
  ref <309>: DATABASE ENTRY DATE: 2001-12-06
ggtctgtctgtacccccgccgcggctcacctggaaactgggcagattggacaatcgctcgagcgagctagcgagagagagcgcgagagagcgaggcggcgcgcgcggtggttgcggatttgtagcttagcgcggggccatggggaggtcgccgtgctgcgagaaggcgcacacgaacaagggggcgtggacgaaggaggaggaccagcggctcatcgcgtacatcagggcgcatggcgaaggctgctggcgctcgctgcccaaggcggcgggcctccttcgctgcggcaagagctgccgcctccggtggatgaactacctccgccccgacctcaagcgcggcaacttcaccgacgacgaggacgagctcatcatccgcctccacagcctcctcggcaacaagtggtctctgatcgccgggcagctgccggggaggacggacaacgagatcaagaactactggaacacgcacatcaagcgcaagctcctcgcccgcggcatcgacccgcagacgcaccgcccgctgctcagcggcggtgacggcatcgcggcgagcaacaaggcggcaccaccgccgccgcatcccatatccgtcccggcgaaggcggcggccgcggcgatcttcgccgtggcgaagccgccgccaccgccgcgcccggtcgactcctcggacgacggctgccgcagcagcagcggcacaacgagcacgggggagccgcggtgccccgacctcaacctcgagctctcggtcgggccgacgccgagctcgccgccggcggagacgcccaccagcgcgcggccggtctgcctctgctaccacctcggcttccgcggcggggaggcgtgcagctgtcaggctgacagcaagggcccacacgagtttagatatttcaggccgttggaacaaggccagtacatatgagatatgaccatgagatgtgagatggcttaattagcttcaattcccaacatgtgtaacacagggagtttttctagtggacgacaatactgtttaatttcagaaaaaaaaagggaaagaaaaaggttctaatctgttcatatttcttacc

SEQ ID NO: 16337 - DNA, 2357 bp, Oryza sativa
  ref <308>: DATABASE ACCESSION NUMBER: AK098970
  ref <309>: DATABASE ENTRY DATE: 2002-08-28
ggtgtgggggaaggtgtgggagttttttttttcctcgcgtgtaatttttggcggtgttggatcgggttatgggggatagctgggaggttagcgaggtttggggtgtgtggttgggatgggagattggttgatcccgtcgattaggggtgtcccgcggcgagatttggtcccgttgcgcatttctgtttttctttttttgaaatgacctgattaattcaatccagttcgtagggtgtagctctctgtctggatcagattaggctttagtttatccatgtgtgattgcttcctagatttgaactggtcgggagtgtaccatgtgaatactgctttcgtatgaactgtgcggttactaacttccattcctaattaatatgactaatttttagggaagaaatgacttggtacctatgctagtatttttttcccctcatggataatgcttgataacgactttgagaagggcaaataaattcctaaaaaatgtttagcgttgctgttttttttttctttagtgttttctcacagttcaatatttactcatctacaccattatttgatccaccttgcaggttaagtcagcatagctaataactccgtctactgttgtgacctctgtggtttgctttgtgtgtttggcttcccaatcatctgcataaaccaggaagtgggtttgctttggaaatatttggggtcaaactagtagttggcacattgtgatctgatcatgtttatgcacagtttgtactgctaagcacaattggagttctgactatacagatgctgtgcgcatgcttgctggcaatatgaacaacgataactatattgacttgagttcagacagtgatatagattttgacttcgactcagatgattcagttggtggtttggaccaggagctagcttcatcttcttctaggcctactgaaaatataaatggtcaatatagaactctgccaccttcttttacaaatggtagacatgttgataacgctcgtcatgcgttaggttcaggtgacagagcttatccgcattcaagttcttatagggggtcaccaaatgattctgcaagggcaactcctgcttccaacagaactgatattgtagtcaagaagcacaatggttttgcatcggaagaaaatgataatggcaagaggattcttccctcatccttttcaaatggccgcacaacaaatgctatgcatccagtggttgcaagtgagacacgcaaattcccaccatcttttaccaatggaaattcacaaagattggctgaaaataggatgggaaaaaatgttgccaatggaattggggagccttcatcgtcaaggtttccgagccgaagttcttttggtactgacaacaagaaggtcatcacagacagtgacaatgaggatgtctatgtatatggaagctccagttcacatagggttcttcctccatcttttggtcgcaatagttctgctaatcacagcgaatttgctaatggcattgatatgcaaggtcgtctgaacctggaaaataggattatagattctgacgagagagcggtgtaccaggaagcactacagaatattatccaggataaaagggaagatgatctgcctgagggtgttctgtcagtacctctgcttaggcaccagaaaatggcattggcttggatggtttcgaaggagaatagctctcattgtgcaggtggaattcttgcagatgatcagggtcttggcaaaacagtgtctacaattgcccttatacagaaacagaggatccagcagtctaagtttatgtctgttgattcagatcgtttaaaagctgaagcgctaaaccttgatgatgacgatgaggcagcgcctgttgcggataataagggggagcagactaagaatgatgaacccaggaaggatctaggagctggttcgtcatcaacagcagctggtactggtgacgttgaaacatgtgctagcctaatgaatactgctccagataagacggttgaaagaaatgttgaacgtaagaagaagagtaaggcaagcacatcatctactatgcaatccatgacaaggcctgctgcaggtactctagtggtgtgcccagctagtgttcttaagcaatgggcgaacgaattgactgacaaggttggtgaaagtgctaaattgtctgttttggtctatcatggtggctcaaggaccaaagatccaaatgagttggcaaaatatgatgttgttatcactacatacacaattgtggccaatgaagtgcctaaacagaatgccgatgatgacactgatcagaagaatggtgaagaatcttctgctggtaataagagaaaacaaccacccaaagcacagagcaagtcg

SEQ ID NO: 16338 - DNA, 2430 bp, Oryza sativa
  ref <308>: DATABASE ACCESSION NUMBER: AK066835
  ref <309>: DATABASE ENTRY DATE: 2001-12-06
ggggtgctcaaccagctcccgaagctgagccccatcaagcgcgtcccggacctcgccgccctcgccgaccggcactccggcgacctacccggcgtcgacgtcttcgtcaccaccgtcgaccccgtcgacgagccgatactctacaccgtgaacaccatcctctccatcctcgccgccgactacccggtggacaggtacgcctgctacctgtccgacgacggcgggacgctggtccactacgaggccatggtggaggtcgccaagttcgccgagctgtgggtgcccttctgccggaagcactgcgtcgagccgaggtcgccggagaactacttcgcgatgaagacgcaggcgtacaaaggcggcgtccccggcgagctgatgagcgatcaccggcgtgtgcggcgagagtacgaggagttcaaggtcaggatcgactccctctcgagcaccattcgccagcgatcagatgtgtacaacgccaaacatgccggcgaaaatgcgacatggatggctgatggcacacattggcccggcacatggtttgagccggctgacaaccaccagagagggaaacatgctggaattgttcaggttttactgaaccatccaagctgtaaaccgaggcttggattggcggcgagtgctgagaatccggttgatttcagcggtgtcgacgtgcggctccccatgctggtgtacatctcgcgcgagaagaggcccggatacaaccaccagaagaaggccggcgccatgaacgtgatgctccgcgtgtccgcgctgctgtcgaacgcgccgttcgtcatcaacttcgacggcgaccactacgtcaacaactcgcaggcgttcagggcgccgatgtgcttcatgctcgacggccgcggccgcggcggcgagaacacggcgttcgtccagttcccgcagcggttcgacgacgttgacccgacggaccggtacgcgaaccataaccgcgtcttcttcgacggcaccatgctctccctcaacggcctccaggggccctcctacctcggcaccggcaccatgttccgccgcgtcgcgctctacggcgtggagccgccgcgctggggagcggcggcgagccagatcaaggctatggacatcgccaacaagttcggcagctcgacgtcgttcgtcggcacgatgctggacggcgccaaccaagaacggtcgatcacgccgctggcggtgctcgacgagtcggtcgctggcgatctcgccgccctgacggcgtgcgcatacgaggatgggacgtcgtgggggagagacgtcgggtgggtgtacaacatcgcgacggaggacgtggtgaccgggttccgcatgcaccggcaggggtggcgctccgtgtacgcctcagtggagcccgccgcgttccgcggcacggcgccgatcaacctcaccgagcgcctctaccagatcctccggtggtcgggcggctcgctggagatgttcttctcccacagcaacgcgctcctcgccggccgccgcctccacccgctgcagcgcgtcgcctacctcaacatgtcgacctacccgatcgtgaccgtgttcatcttcttctacaacctcttcccggtgatgtggctcatctccgagcagtactacatccagcggccgttcggcgagtacctcctctacctcgtcgccgtcatcgccatgatccacgtgatcggcatgttcgaggtgaagtgggctggcatcacgctgctcgactggtgccgcaacgagcagttctacatgatcggctccacgggggtgtacccgacggcggtgctgtacatggcgctcaagctcgtcaccgggaagggcatctacttccggctcacgtcgaagcagacgacggccagctccggcgacaagttcgccgacctgtacaccgtgcggtgggtgccgctgctgataccgaccatcgtcatcattgtcgtgaacgtcgccgccgtcggggtggcggtcggcaaggcggcggcgtgggggccgctcaccgagccggggtggctcgccgtgctcgggatggtgttcaacgtgtggatcctggtgctcctctacccgttcgcgctcggggtcatgggtcaatgggggaagcggccggccgtgctgttcgtggcgatggcgatggccgtcgccgccgtggcggccatgtacgtcgccttcggtgcaccgtaccaagctgagttgtcaggtggtgctgcttctctcggaaaagcggcggcgtcgctgaccgggccatccgggtagggacagttcgatcgcgtttgatttgatttgaatatttgattattttcttggtgcaataattggttgttacttctgttatgtcgttacgtcataggagcggctgactatattgctagtctgctctatacgagtgagacttggattgttcttctttaaaaatgacaagatttgaatttctcc

SEQ ID NO: 16339 - DNA, 1925 bp, Oryza sativa
  ref <308>: DATABASE ACCESSION NUMBER: AK066836
  ref <309>: DATABASE ENTRY DATE: 2001-12-06
gtggcagaccggcctacgagtggataggaggacggcagtgcgaggcaggagaggaggagggcgtcggcggccggcgacgggcgacgcggcggtggcggcgaggcggccggcgatgggagatgctgcggggtcgagcgagccgtggagccgtggcgtcaaggtggagcagttgggtgcgggcggcggccggcgggggagcagctgggcacgggcgttggatccacacgccggcggcgcccgcaccctcagccgctgcagttcccgcccgcctcagccacctccgtctttgcctgtcactgccgcatggtggatcccacctccaggatgcgcatccgcccagccagggatggccacattgcggcggtcgtcgacgcctcaaacggcagcgaaagctgggccgcggcgtcagcggaggagcatccctcgtcgcggtcagatgagcagtcggaggaagccgacgaggatggggacggcaacgcggaggccgtgggcgctgctgtgctcctcttctcgcccccaccgccggctgtggctgtagcgacgttgttgttgttcccctcgtcggacgcgggggcggcggcggcggggacgtagcggcgtgggagaagccgcgtcgcccgtcgcctgtcgcttggaatttgttgctgcagttcatcaaggctggcttctatgcaaaggcttccccatcatttcctgaattccctccgaacaaagaagtccctttccaaaaaggatgttgtgggcataagtacaagtggaggtttgagaagctaaaagaacatatacaatgagatatcgatgctgaaaatgaagcgtatgaaaggtatacacagaatgttgggttactggaggaaacgtttggtcttacggaagatgctgttgatgaacctgaagctgaagcaacttcttcagaacagaggatggaaacattggtttccgaagcaaaggtgaggctgaaatcaccgccgccgcctcgccgcgtcatcagtgatctcagatcaaaccacactcacttaaatcttttccgtttgctgatcttgctcgctctcgagcttttcttgccgccaatgaggtcgtctaatccatggcgtgcgtgtgttgggtgtgtggtttgcacgtgagcgtgccgagcagtagcctgttcaagacggtgatggtgcggtgcggccactgcagcagcctcctcaccgtcaacattaggggcctcctcctcccgaccagcgccgccgccaccgtcgccaccgcgccaccacctccacccccgccgccgccgccggcggccgcgcacttcccccactctctcaacctcgcgccgccggccaaccctccccaccaccactccctcctggatgagatatcgacggcgagctccccgacccagctgctggcggcctgatggcgagcgctgcaagctgcaggaacaacgtctgcagaaacaataagaagatgatcgccttcctccgctgggcgctccacccccccttccttcttccgcgcctggcacatcggcgtccgcgccagggagtccaagaagcgggtcgccttcatcttcggtgtccccgcgagcatccgcgcacgcgacgacgtcgtccgcatggcagtgatcaacttcctctgcgtccacaagaagctccgatccaagcgagaagagaggagagaggaagggagagaagaaggaaaaagagagatgatgacgtgtcatcctaacatgtgggacccacgtgggtcccatgctgactcagccgtcacgtgagacaaaaccggcgtcaatactgccctaggacctcgggtgaccggttttgtatagttaagggatcttatatatctggttttacggttcaagtacgtatttttatctggctcacaagttgagggtccttcggtgtactttttctaacactggaattggatgctacgaacagctg

SEQ ID NO: 16340 - DNA, 726 bp, Oryza sativa
  ref <308>: DATABASE ACCESSION NUMBER: AK066837
  ref <309>: DATABASE ENTRY DATE: 2001-12-06
gaatccaccgcaagccgaagcgtgagcaaagtgccctcgagccatggccatgtccctctccctcgcgcgcgtcgcgctcccgcctctgctgcagcagcaggggggcgcccccaggaagctccaccccggcgccctcgcgttccccgccaagtcgttcttcggcgcgccgctggcggccgtcgcggtctcccccgcgtcggcggcggcggcgtcgccgctccgtcgcaggccgtcgtccgcctccgccgtcgtcgcggcggggaaggggtacaagatgaagacccacaaggcgtcggcgaagcggttccgggtgacggggagggggaagatcgtgcggcggcgcgccgggaagcagcaccttctcagcaagaagaacaccaagcgcaggaagaggctatccaagatgatccaagttaacaagagcgactacaacaacgtgacgggcgcactgccctacctcaaagtgaacaggaatgcagaatgagatctcctaggtcttgcaaacatgcttctgtttcgtttcatcaaattgtaattttgtgtatcttctttgtatttcttttctgaataccaaggtcccaagtcataccaagcaagcacaaacaattattcatgccaacatgttcaaaaatgagttgcacttgcacgagctagttatttacaagtcctttttccccttttgacaaagaaaattccaactgataatgaaagcaactattaaggagt

SEQ ID NO: 16341 - DNA, 2289 bp, Oryza sativa
  ref <308>: DATABASE ACCESSION NUMBER: AK066838
  ref <309>: DATABASE ENTRY DATE: 2001-12-06
gggggctttccttgtggcagccagagaatttggatttgaatttttcaagagaacacaatcaagtgtctttgtcagggagaaattcagctcttccaatggcccagttgagagggagttcaagattctcaatctattggagttcaacagcaaaagaaaacgaatgtcagtaattctgaaggatgaagatgggcaaattcttcttttttgcaaaggagcagatagcatcatatttgatagactggcaaaaaatggaaggatgattgaagctgatacgagcaagcatctcaatgattatggtgaggcaggcttgcggacactggctctatcatacagagtgctcgatgaatcagaatattcctcttggaatgctgagtttcttaaagcaaagacctctattggacctgacagagaattgcaacttgagcgagtctcagaattgattgaaagagacctgatccttgttggtgcaactgcagtagaggacaaactgcaaagtggggttcctcagtgcatagatcgtttggcacaagcaggtctcaaaatctgggttctgacaggtgataagatggaaactgcaatcaacattggatacgcatgcagtttactgaggcaaggcatgagaaggatatgtttgtcaatacccactgatgaccaagtagcccaggatgcaaataaggctgcaaaggagagtctcatgtcgcaaatcgcaaatggttcacaaatggtcaagctagagaaggatcctgatgcagcatttgctctagttatagatggaaaagcgctcacatttgctttggaagatgacatgaagcatatgttcctgaatcttgcaatagagtgcgcttctgtcatatgttgccgtgtgtccccaaagcaaaaagcactggtgactcgactggtcaaagaaggtattggaaaaactacattagcaataggtgatggtgcaaatgatgtaggcatgattcaagaagctgatataggagttggtataagtggggtagagggcatgcaggctgtgatggctagtgacttttctatatcccaatttcggttccttgagagactactcgtagtccatggccattggtgctataagagaattgcccaaatgatctgctacttcttctacaagaatattgcttttggacttactatattttactttgaggcatttgctggattttctggtcaatcagtttatgatgattggtttatgctgctcttcaatgttgttcttacctcactgcctgttatctcacttggggtatttgagcaggatgtttcatctgaaatctgcttgcagttcccggcgttatatcagcaaggaccgagaaatcttttcttcgattggtaccggattttaggatggatggcgaatggcctctactcatctctggccatattctttctcaacatctgtatattctatgatcaggcaatccgttctggaggacagactgctgacatggctgcagtgggaactactatgttcacctgcatcatctgggctgtcaacatgcagattgcgctgacaatgagccatttcacctggattcaacatctctttgtctggggcagcgtaggtacttggtacctcttcataatcgtctatggctcggcgttgaggtcccgcgacaattaccagattctactggaggttcttggacctgctcccttgtactgggcagcaactcttctggtgactgctgcttgcaacatgccctacctgatccacatatcctaccagagattgtgcaatccacttgatcaccatgtgattcaagagatcaagtacctgaagaaggacgtcgaagaccaaacgatgtggaagagggagcggtcgaaggcccggcagcggacgaagattggtttcaccgcgagggtcgatgcgaagatcaagcagatcagggggaagttgcacaagaaggccccatccctaaccatccatactgtatcgtagtgacatctgagtcatctgaccggcgtttcgacagtagttgtcaccttactttttttctcatgcaaggcagcggtttttggcttctctcccagctatacagtgaaattctttctcttcttttttctttttttggtcttaattttctgatcatattggatttttttttctccgttcgtgtaaggaatgttgggggtgtgatgggtggcatttccccgagtagaagttccaaagccagccatgtaaaaagtatagctcatttcagttggaagaagaacctctctagatagctgacaatatatgtatatctgcaattttgcttattctttttc

SEQ ID NO: 16342 - DNA, 1932 bp, Oryza sativa
  ref <308>: DATABASE ACCESSION NUMBER: AK066839
  ref <309>: DATABASE ENTRY DATE: 2001-12-06
ggtcgagtcgactgcacggtagcgtggtcagttgtggcactcatcagagctgggagccatggccatggagaagagccgggtcctcatcgtcggcggcagcggctacatcggccggcggatcgttgcggcgagcttggcggagggccaccccaccttcgtcctgctgcggccggagatcggcctcaacatcgacaagctccagatactgctggccttcaaggcgcagggcgcgcggctcctcgaggcgtcgctcgacgaccacgatggcctcgtcgccgccgtccggcaggtggacgtcgtcgtctccgccatgtccggcgtccaccaccgcagccacaacatcttgctgcagctcaagctcgtcaaggccatcaaagaagctggaaatgtcaagacgtactggatggatgcagatgtggtaacagccttcgagctaagccgggccatcgacgatggagtgctgcagcctttgccctttggttcgctgacatgctgttccttctatgtgaggttgccagtaccacggactcgccgtcagcactgtgcaacgtcatccttctgcgctagactgactccaccctctgctgagtgagatcgcgtgctttttccactcgctacaagtccgagcagccaagcacttatcgcaagaatggaaaaccagctgccattcaatatggcactggttcagttgatgggtttttcaacgaggatagtgttacagtaggtgatctggttgtgaaagatcaggaattgcttcaccgctttaggaattcattgaagttataaaggagccaagccatatactttcatggttgcaaaattcgatgacattcttggtctcggatttcagaaaatagctattggagatgaggtgaatatttggctttgattggtgaaaaattaatggagcggatataatcgaacttggacttgctacgcattgtcccatcagtggtgctttggttcgcataataaactgagaaaatattatgggagtcttctcttcattgctgccctaggcaacaaggtgtatggatatgccatcaaccaactcaagaattgcactgtaaaatgtcaaaaacaaaatggaaagtatttgtgttcttatcaaggtctttctgttgagttttaaggatcagagtgaagatctcttgatggtccatttgtgttggtttggatcaacaacatgccatgtgctgctgatagtatcatggcggttcttggggccaaggaggcgcgccattggtttgtccttaagatgacatattgttaatatcatatgaggtcattatagcatttggaagaatgggaaccatgtttcggtgtgatatgtatgacatcaaaccaaattttgtctcaataggcaatgtgagttcaggcttcagtagtaccagagtgattattgataactaccgagatgtccacgtcagagtggtacgagctccagattaagaagaacaagctttgtgacatgtttgatgaggcgccttcccaatggtgcatgatttagtgaaagcaagggataaccactttgttagagtcaatttcgactcgtgatttgtcctctatagtcgtcgtttggaactaccccatctataccagagatgcctgtccaccgttatgacagggacctaagcaagaataacttcatgagctcaccagcaccgggtgatgggtttccaatagtaacatccctaaccaccttatttatgaatagagatcaacttactggaacaaaccatattgagttctccgcaaatggaccatttaaatatcaagttgcttatcaaaatctaggcctccttggtgatgatcgtgagtggtattttgcaattgctgatgttgcatcgtgtgcacttccttaccaactttgtgagtagtttgtaactcatctcgtcttttctgatattgcaaattcattatttctatttg

SEQ ID NO: 16343 - DNA, 865 bp, Oryza sativa
  ref <308>: DATABASE ACCESSION NUMBER: AK066840
  ref <309>: DATABASE ENTRY DATE: 2001-12-06
ggccgtcatctgaggagacggagagcacatgcgggcgtccgctgggtcttgcgttccacctcaagacggggatcctctacttcgccgacgcctacaagggcctgatgcgggttgggccgcggggtggccaggccgacgtgctcgccacggaggccgacggcgtgccgttcaattacctcaacggcgtcgacgtcgaccaggacaccggtgacgtctacttcaccgacagcagcaccaccatcacacgccgataccaagagaacatcatgaggaaccgcgacgcgacggctcggctgatgaagtacgacgcgaagacgaagcaggtgacggtgctgaaggaccggttgccgtacgccaacggcgtggccgtcagccacgacgggaggtacctcgtggtggcgcacacggggccggcacaggtgttcaggtattggctcaagggggccaaggccggccagtacgagctcttcgccgacctgcccgggtaccccgacaacgtccggcgagacgccaaggggggctactgggtggggctcaaccgggagaagattacgttcaacgtgccggcggcggcttctccggccaagcacctggtcggcgtccggctcaacggcgacggcgtcgaggtggaggagctgacggctgctagtagggctgtgacgctgagcgaggttgtggagagggaccgcaagttgtggctcggctccgtcgatctcgactacgtcggcctactgcagtagaaggaagttatctgtttagtggtgttaggaataataaaggcaggctaattaggtatttagcagtagaatcaggattggtacaactcttttttgctggcagctatattaattagacgttttagtgg

SEQ ID NO: 16344 - DNA, 3059 bp, Oryza sativa
  ref <308>: DATABASE ACCESSION NUMBER: AK066841
  ref <309>: DATABASE ENTRY DATE: 2001-12-06
ggcgagggagttagtttagttagttaatcagttgggaacacacacgtcggccgtctcgtctcgcgccattttttttgatgggctcgaggggcggcgacgccgacgcgtgggagacggcgagcgcgcggagcggcgtctcctcctcctcctccggccgcgcgacggccgcggcggcggcgccggcgccggagaacaaggtgttcgtggctctcccggcgcagcacaagagcggcaggtccacgctcgcgtgggcgctccggcacgtcgccgaactggctccggcggcgatcggcggcggcggcgaggtggtggtggtggcggcgcacgtccactcgccggcgcagatgattccgatgagcatgggaggcaagttccatgcaagtaaattgagaccggaacaggtcagtacttacagaaaatatgaaagggagcaggtggagaagaatttggatgaatacctcgagcaatgcacaaaaatgaaggtcaaatgtgagaaaattgttattgagaatggagacattgctaatgggattacagagcttattttgctgcatggggtaagtaaactcgtcatgggagcagctgctgacaagcaatactccaggaaaatgaaattgcccaagtccaaaacagcactctcagtcacggttaaagcaaatccttcatgcaagatttggtttgtttgcaaggagcatctgatatacactagagattttgttgctcctatttctccaaattcacaatcacctgacactatcagaggctcaatatccaatctagctgcacggggaggaactacaaaccaatatgcaaacaatgcagttaacggttacgtacagaggtccatgtctgaaatggttgtccctgcatctagcagggtatcattgcaactgcattctcgatcatcgttacaggagtcccttagcaggctaaacatggagggcacctctgttgattcctgggatagcttccgcagaggaagctttccaagttcataccgagcttcttctactgtgactgaagaagtgttgagcgattctagttcatctggaatacctagagatggcatctcaacacttgcaggttgtgactttccaaactcagcactgcaccatgaacagggtgacgcaggttcaaatgctaacctatttgataaacttgaagaagccttcgcagaggctgagaagtataggaagcaagcatatgatgagtcactgagaagacaaaagacagaagaagaattgatttcatatcaccaaaaggccaggaaatctgaggatttgttcttaaatgaggccaagcaaaggaaagaggttgaggaaaccctagcaaaggcaaatgtggagatacaattattgaaggaagaaatggatgcactgaaacacaaccgagatgacctcagcagtaagctttccgacgtgagtgaacagaaagtgacactagagcaacaggccgtggaatatggaagcattatcattgatctcaaggatacagttgcagcaagccaagccctcattgattcaatgcaaatggagtttgaacaattgaagcatgaaagagacaatgcactcaaacatgcagaagagctgcacagagaaacaaaacatggtatcgagctcagacttggaatggagcactgaattctctttgttggagctgcagcaggcaacacaaaatttcagtgatgcaatgaaaattggagaaggtgggtttgggtgtgtctacaggggtcagcttcgtaacaccactgttgcaattaagatgcttcgctctcagaacttgcaagggcagtcacagtttcagcaagaggttgctgttcttagtagagtaaggcatccaaaccttgtaactcttgtaggttattgctcagaagcttcaggtcttgtgtatgaattcttaccaaatggaagccttgaagaccatctagcctgtgaaagcaacacgtctccgcttacatggcagatccgtacacggatcatcggtgagatatgttcggcgctcatcttccttcactctgacaagcctcacgcagtcatccatggtgatctcaagccagcaaacattcttcttgatgcaaatttggtcagtaagcttggtgactttggaatctctcgcctcctaaataggtctagcacagtgtccacgagcttctaccaaacaacaaatccaaggggaacttttgcttacatggaccctgaatttcttacaactggggaactaacagcacggtctgacatatactcatttggcattatcatactgcgactggtgactgggaagccagctttaggcattgcaagggaggtggaggttgcacttgataagggtgagttggagttgcttgttgaccgatctgctggagactggccgtttgtgcaggctgagaagctgatgcttcttggcctgcagtgtgcagagcttagcagaaggaagcgccctgatcgtatgaatcatgtgtggagcgtggtcgaaccccttgtaaagtctgcttcgctgccagtagaaccagaatccattggacattgggtgaataagaaccgcacgccattctacttcatatgcccaatttctcaggaggtcatgagggatcctcacattgcagcagatgggttcagttacgaagaggaggtcatcaaaggatggctcggcagcgggcacaacacctccccgatgacaaaatcaactctggaacatcttcagctgatcccgaatctcgctcttcgttctgccattgaggaatttatgcagcagaagcagcagcagattccatcatagtaattagttcagtgaacttgattattcttagcttcataagttgtaaagttgatagctcattctttgttcagaagtctgctcgtgtagtgtagctgttttgttttgtgagcagcaacttacaataaatcgtgcatgctcatatgagcaggtgatgatcagctagcaaatgtttgatgtcagattgtgcttgaacataattgtttcaggccacttagaatcatgggacttatcagtttactgttgttggaaattggtaaaaatgaatatggagatgattttttccc

SEQ ID NO: 16345 - DNA, 3378 bp, Oryza sativa
  ref <308>: DATABASE ACCESSION NUMBER: AK066842
  ref <309>: DATABASE ENTRY DATE: 2001-12-06
gtcttgtaatggtacatccaacttgttgaatgccatgggacttcccagtattgcctaatgccttggacactttcatatttatataatacttattcccttaacgagaaactatctgcatgtacctaaggtatttctttttaatatttgaacctttttttaaagaattaaaataaactcattcacaacttatttccaaatctggagcctttctccagactacttcagttggcacatgaaaaagaactgctaatcaggaggaatgtcataggatggcaagagtcaagacaatgctgccaccatggtgggtggtgtagcactgtagcagcactgttttgccacagcagtacacatctcatggccaaggggtttgtttttaaataagatgttaactttttataaaaaaatatattaagttctaaaattagaaaaaaatccaaggtatttcatatccagacatactcctttgaagtttgagatagcatcatcgcctgtctctgatagcaaagccctttttggtacaatactactttggtttctagctgtgttactttaggacctgtctgtaattatagaaactatccaatggtttatccacttcatatttacattgtaagtattacattgtatgtgaagaatctccgtgcctcatatttttctttgtgctcaagttgtctatttcaatattatttgttggcaaagacaccaagaccttacctccaaatctacaggcacttcaacaataaccggctcaatgagtcctttcctaatgcatctgcacttttaagtatacaatccctgtaagtgtgtttcatttccattttcacaaaagaatcattttatttgttttcactatcaacatcacaaacaaggcctgtttgaaaaataattagattacattgtattttgttcagaaaaaggtaatactccctccgtcccaaaatataagcattttagcatagtgtaagtcaaatattttttactttaactattaaaagcaaaaaaataaaaatgatcaatcatgtaaaattgatgttattagatttatcattaaacaaactatcataatatgcaactcttttttatttaaaacatcttacttttatagatattgttagtcaaagtagcatctcgaagattgtatcaaggtccaaaatacttatattttgggacggagggggtactaattaacttattggcattctatgcaggtggatgtttgataatgacatcgaaggaatggttccaggatttattgcgaactttgccaatcttacagatttgagaatgtatgggatgaaacttcaaggacctattccagaaaatttctctaaattgatcaatatagaaaatctcatgattggtgaccttgataccgagggctatccttttaatttcacaggagattggatctctgaggaattgtggattcacggggaagtttcctaaccaaattctgaagaatctgaacaaattaacatacgtgtaggtttcagaaaatcttttgtttgcttatgctcaatggcacactctccatctggggaccacaatccttgtctatgtcgaacaggggccctcttttgtgctctttgctgtcagtgaggtgatgttgagtgttctagaaaaaagtgaggtgatgttgcttagtagcatgagggtgcttgatctcagaaccatcgtgaccccatcttctaatagagtttcaaagaacgactaaatcttatgttaatcaaaccgaaacataattggaatctcaaacacttcaatttgggaaaagaggggggtgggctgtcaatgcaccttgcaggcaacaactttaaatttggctgcagaagcctatgcctatttgattttgttgttgttcaaaaaaacgttacaatacaataaaccatgtattctgatattaatcttcaatattacaatgaatgtgaacattgaaataactactgtttttatttgcgatgattctctccttctctgcctgtttctctctcttactctctcaatttgccttatgtttgcagagatttgagatcaaacaacttgtcaggatcaattgaccttcagcagtacgatagtagcctaaagtacctttatgtaggtgaaaacaatttcaatggatctctgcctgatcaaatgcctcaatcactagttgctctggatgtcacatataatcctttgcttaggggaaggcttcctagcagttctgctgatagaaagatgcggataaattatattggaacttcgattggtgcaggaagctcagttggcagtgaaaaccttcgtctcctcaattgtgtcgacatgaaaggatgcaacacaacaggtttaactaatcctgtatcctttgctgtgaactgtgggggcaagcaatatactcctccttcagatccgtcgaatatgttcaatgacgactccgctaaccttggagcagcagactttcatgtggacactaataataattgggtagtcagtcatgtgggcactgatccttttagtaactcttctggtattgtaactaccggcaatggaacaaacatacctgagctctacagaacggcaagaacatcaactggttccttatggtactatgtggttggcttgcctagtgggaaatatacagttcaactcttctttgcagagatagttatagaaagtggatcaggaaggcgtttatttaacatcgacattcaggatcggaatatcatgacagattttgacatttccaaggaagcagggggttccaacagacccattaacagaaattatacagcggatgtcaccacctcagtgttgaaaatacatctctactggaatgggcgaggcacttgctgtattccacgcaatggaacttatggtcctctggtgtcagcaataagagtattcccttccgcggagacgcaagccagcccccctcctgtggcgcttacatcaaggcacgatgaaaagcgaagaggagtggttgcaggaattgctgctctttccatagctgctacagtgatatcttcatcagctgtctacctctggtggaaatgggtttcacttgtgaagcatcgaaaggcatgaggtgttcagatgtgcatatacaaagctggttgttttaattttgttccttctgtcttcttagcatgttcatgagcctatgtctgtattgtatgggcattgagctgggtttacatgagctgtacaggaaaaggtactgtgtaacgtcaagaggaaagcaacaatattgatgtacagtttggtttgtggtcatgatttttagcctatagttttgttgctctaccatcatttatagccagggtgtaatctcaagttaattttttttttgaaagttttgtacatgttacttgtatcaatttgtaaagcttttttgcaccc

SEQ ID NO: 16346 - DNA, 964 bp, Oryza sativa
  ref <308>: DATABASE ACCESSION NUMBER: AK066843
  ref <309>: DATABASE ENTRY DATE: 2001-12-06
gtgtgggcgccgcgagcgagaacgaacgacgaacagacgctacccacgccagcgtcgagtcgagtcgtgcacctcgtctcgtgctgctccatggcgtcctcgcctttcgccgccgccgtccagggcggcctcgcgctccggcccgtcgcgccgcggcggttgtcgtcgacgtcgagcgacgtggcgcggagcggcggcgtggcggcgtggcgtgctccgcggcggcggagggtggcggcggtgggtgacctgcgcccggccatcgacgagtacccggaggggatcctctccggcgagtggccggagaacttctccctcctcagctacgccgacctccgcgcctacctcgagtcgcagatcgtcaccaccgaccagatgagcccgacggcgaagctcggggaggtcatgtcgcggctcgtgcaggtggccatggcggaccagaggctggcggacatcgacgccttcttcgccgcgcagtccggcctgccggtgctcgacgaggaggggaggtgcatcggcgtcatctccaagaaggacaaggccaaggcatccaatgggttggactcaactgttggagaagtcatgtcatctcctgctataactctgacacccgagaagactgtattggaagctgctgctcttatgctcaaggagaaggttcacaggataccagtcgtgaatgaacaacagcaagtgatcgggatcgtcactcgcacggacgtattcaaggctttggaggccagcaaggtgtagtaagatcccagttaataataatcagtaaataaacatgctccttgtgtagatatcgatgccttcgtaggctgtcggggcgttgctcttgtacattaattctagctgtaaaatctggaagtgctcaagcctttctatgtactactcatgtgtcatgtttctgaacaagtaccttagggtgctggggtttgtgatcttcgttagttggttgctg

SEQ ID NO: 16347 - DNA, 2272 bp, Oryza sativa
  ref <308>: DATABASE ACCESSION NUMBER: AK066844
  ref <309>: DATABASE ENTRY DATE: 2001-12-06
ggctgccaagctcgccggattcttttcttggattggagcagattggggggtgacgatggagaagatgatgccggggatggtgaaggaggagtggccgccgagctcgccggaggagggggaggcgccgaggcccatggaggggctgcacgaggtcgggccgccgccgttcctgaccaagacgttcgacctggtggccgacccggccaccgacggcgtcgtctcgtggggccgcgcgggcagcagcttcgtcgtctgggacccccacgtcttcgccgccgtcttcctcccacgcttcttcaagcacaacaatttctccagcttcgtccgccagctcaacacctacgtgagtccccccaatttccattgccaccactagtgttgttccctgcttgtcttcagttgttgggaaattgtgtgttctgttttcttgttttggatgttgttgttcagttcttggtccggacgaattacctgaacaagcgatcacatttctacagtttgagatttcaggttggattgttagataattaaaatgggtgtgttctcacttttgtggttgccattatgttttgtgccacatcgtgtgtgttgagtattgataggaatcttgacactagaattaaatggatggagcattgtaaaattttcagtgcaaattgtaaacccggcggtattggttaaataaatcggttgtattgtgcatttttccactcagtgcaagaactttgtgcatgcacaaatgcacaattatgtagcaatggagctagaaactgggatttacttattggtgctgacctgttggttgtagaaaattacgatggctacaattgttcaacggactgttttgtggacttgacattatttgcccaaactcagctatgtccaatccttttcagacacatgcatataaaccctcaattcctgaaatgttctcaatgattcagaaagaggaaaaaaatctccatggacgaactactcagtttctgacatgctgttttcttcaatttgttactgtgtagctagatggatcaagacagcggatgaagctacaagaatctgcttgtttgttctagaagactcctttgatcaccatcaaaaaaaagaaaaagtgatgtagtatactgctacctgttctcttaataatgctatgataaattttgtcgcaaaactatgtgaaaccaaccgttttacatactttgtgtgacttgctatcctaattgagttttgtctgtggcttctgtacttgaactaactatacctgtaatattctttgtgtttgcaatttgcagggtttcagaaagattgatcctgacagatgggaattcgcgaatgatggtttcctgagaggccagaggcatcttctaaagatgattaagaggaggagaccattgtcttatctccctggatctcagcaggcacttggcacctgccttgaggttggtcagttcggattagatgaagagatcgacaggctaaagcgtgacaagaacatcttactcgcggaggttgtgaaactaaggcacaagcagcaaagcacgaaagccaatatgcgagccatggaagagaggctgcaacatgcggagcagaagcaggtccagatgatgggtttcttggcaagagcaatgcagaaccctgacttctttcaccagttgattcaccagcaggataaaatgaaggggctcgaggacacattctcgaagaagaggacgaggtcgatagacatagtgccatttctcaaccccggggaggtcagccagggcgatcaactcgagtcgacattgctgtttgatccaaggccatttgctgaactgaatgatgagcctgcaaagtctgaactggagaatttagcactgaacatccagggtcttgggaagggcaagcaggatgtcaacaggactcgaaatcagccacgaaatcaggctagcaacgaaaccgagttaaccgacgacttctgggaggagcttctgaatgaaggagcaagagatgatgctgggattccagggatggagcgaagaagacctagatatgtcgatgcattagcgcagaagctgggttatctaagcaatagtagccaaaagtagatcaagtggctccgatttgtccaaccatttttgtgatagctcttattgtatatcggtgtaattgtattatagtgatagttttatagcgataggtccaatttatattgcggatccggcgtgctgtgtagtatatgtctggtgatgtaaagttgagccatcattcttaatggtatatattgacaattttttgc

SEQ ID NO: 16348 - DNA, 798 bp, Oryza sativa
  ref <308>: DATABASE ACCESSION NUMBER: AK066845
  ref <309>: DATABASE ENTRY DATE: 2001-12-06
gaatctctccatttgccagtcgccacatctccctatcgtctccgccgcaagcccgcaagcgaagatggcgacgccggcgaacgccaccacattctccggcgaggtgtgggcggagctccgcctggcggactccagcgacgtgccccacatccacgccctcgacctctccgcgtccccgctcgccgacccggaggccgccgccttcgcctcccctcgcggcggcgggcgcgtcaccgcgggcttcgtgatctgcttccccaactactccaccttcctctccaagcccgggctgtacgtggaggacatcttcgtgcgcgcgccgtggcgccgccgcgggctcggccggatgatgctgtccgcggtggccggcaaggccgccgagctcgggatggggcgcgtggagtggtgcgtgctggactggaacaagaacgccatcgacttctacgaggggatgggcgccgaggtgctcccgcagtggcgcatctgccgcctcaccggcgctgcactcgacaagtacaaggggaaccaggaggaggggggaggcagcaaggcggcggagtagatcggccatggatggaaacgtcgattcttggctgtccaatctcgagtgagtgattagtgataataaaggtagtggattttggttccacttatctgctccttgtggtgatgtatttcttgatagtgattcagtgcattggatcggttcttcattgctatgaattacagtgatgttttagcttgattatgtcatgaacttgatctgaaacatttcggtatcaaattcttgattgaacc

SEQ ID NO: 16349 - DNA, 807 bp, Oryza sativa
  ref <308>: DATABASE ACCESSION NUMBER: AK066846
  ref <309>: DATABASE ENTRY DATE: 2001-12-06
tccgcctccactccccctcccttcccgaggaaacccccaccttgcatggccaagcgcctcccggccgacggcctcgccgccatccgcgccgcgctccgcccctccgcccgcggcctccgatcccgcccctcccaaggcggcaaggcggggaagccgtccgccgctccgctggatacgcccaggaacgccgccggcgccggcgccagcgccgggcgcgcggaggtgcgggatttggcggcggcgtgcggactgcaggaggacgaccgggtgccgctctccgaggtggtgctggactgcacgaggcggtggttccaggacacgctcaaggaggcccgcgccggcgacgccgccatgcaggtgctcgtcggccagatgtaccgcagcggctacggcgtcaacaagaacgagcacaaggctcaaatttggacggagaaagcatcacgatatcgatctacagtctggaaagttagcaacaaacgcccaggatacaatgctagtgactcagattcagatgattccaaggaaacaggcaaacaatcacatgttactggaaagtgactacaaaaccagcaaggcaagaaaaactaccccatgatgacatgatgtaccccatgatgcatgaaatacgcggttctatcaaggagattatttgcgtgccctattagttaagcgtgtatggtgctctgttctcgtttgtgtggtttacaaatttacttatcattgaaaatgtaaaattctcaggatgggtttcactgaacactgagcatacgaggaatcagtaaggatattcgattttttgttttgtct

SEQ ID NO: 16350 - DNA, 2332 bp, Oryza sativa
  ref <308>: DATABASE ACCESSION NUMBER: AK066847
  ref <309>: DATABASE ENTRY DATE: 2001-12-06
gtgatgcgcgggtggaagcttgcgagggtcggcaagcgcgtcgtgcgccgcgacgggatggtgcccatggtggccgccatgctgaggaacggcagcgcaagggtgcgtctcaaagcgttgcaagcccttcgggagtttgcaagagaggacgatgaatacagggattctgtatctgaaggggacacaattcgcaggattgttaagttcatcgatttcgaggattgccaggagagggagttggctgtatctcttctgtgtgagctgtcgaaatctgaaatggtatgcgaaaagataagcgaattgaatggagcgatacttatcttgggcaaggtggcatgtagcaaatcacagagtccagcgttagccgaggaggctgagatgacgcttgagaatctggagaaatgcgagaaaaatgtcctgcaaatggctgaaaatggaagactggaacctctactaaacctgcttattgaaggttctccagaaaagcagttgcggatagcatcatctctagaaaagattgttctgtctaacgacttgaaaaacttggtggcccaaagagtgggtttactgtttgctggtgttgttgaaaatggtaccttgccggcaaaagaagttgctttcaaggtgttagatcatatatccaccaatacagaaagtgccaaggttcttatagaggatggaatccttttaccgcttttccgagttctctctgttgatggtgtcaaattcgttccaccaaggctgcaagagaccgctgcagcagttctatctaatctggtagcttgtggtattgactttgggacagtcccactggatggtaatcgtactatagtgtctgaagacattgttcacagcttacttcatttgattagtaacacctctccgccaatacagtgcaagcttcttgaaatatttgtaatgctaagtagttctaccacaacagttctgtcaattatctcagctataagatcatctggggctatcacaaacttggtacaatttgtagagagtgatcatcaggagagccgtgctgcttccataaagctgctgtgcaaaatctcatttgacatggaccatgagatagcacaagtcctccgaagtagtcctacattgcttggatgcttagttaggattgtcagtgaaaatgatgcaaatgcagatgagcaagatgctgcacttcagattctggcaaatcttcctaaaagggacagacgtcttaccatggagctcatggagcaaggggctttcaaatatattgcgcgcaaagttttaaacatatgtagaagaggaactgccaataacatagttgataacacgatgcttgaagggcttgtaaaagttctggcaaggataacgtacattctacgggaggagccacgctgtgttgcccttgctcgtgaatacaatcttgcttcactgtttaccagcttgcttcggctgaatgggctggatggtgtgcagctgctctctgcaaaggcattagtgaatctctctgttgaatcaagatatatgactggcacaccaaatttcgatgaacatgaacagaagtctgggcttacctggtttggtaagaaaccaccaggtattcaactttgtcgtgttcactctggaatctgctcgattagagacaatttttgtattcttgaagggaaggcagtggagcgattggttgtttgtcttagccatcaaaacaagaaggtcgttgaagcctctttggctgcactttgcaccctacttggggatggcgtggaggtcactgaaggtgtttcggtgctctatatggccaatgcggttgaaccaatatttgaaatcttgaagggaaacccaacaggcacacttcagcagagggtgacatgggctgtcgagaggattttgcgggcagagaacattgcaaaagcagcttcaagcgaccgtggcttgagttctgcccttgttcatgctttccagaatggggattccagaacacgacgtatcgcagaggcatcactgaagcacattaacaagttgccaactttctcccaaatcattgataagcatccctcgagacgaggttcgtcaattggaagcatggagcgttactttaggtctgatcgctaggctatgaaattgtgaagtaaccgaatgccatgacctgcctatgccttatggacaaggaatttttttgccatttcaagttaattttgttgatttgctaacgtttggaattagggattttagtttttgtgtcaaaaaagaatagtagttaggcattgatagtcttggtaatgtgcatattgttctgtacttgtaataaattttgtagatcatgtgtatatattgtttctgtacttct

SEQ ID NO: 16351 - DNA, 1211 bp, Oryza sativa
  ref <308>: DATABASE ACCESSION NUMBER: AK098971
  ref <309>: DATABASE ENTRY DATE: 2002-08-28
ggaacgcagagcgcgactcgccgtccgtcagcggtggtcgcggcggccggctacaagatgatggcgtgcagggccctcgcgctcctcccgctcccggcgccctcccgtctcccccgcccgcgcgccgcctcgctcgcgcggctcgacgccgcccgccgccgcgcctctgcctccttattggtccggtgctgcgccaaccccgccggtcccggaggccaggaggatccgccgcaggacgccgtgctcaaggccatctcccaggtagcgaactctaaaggacgggttgcacagacaacaaatgttgtcatgggtggtactgtgacagatgatgcaactgatgaatggcttgttctggataagcaggtaaatacatatcctacagttagaggatttactgcaattggtactggaggagatgattttgtccaggccatggtggttgcagttgaatcagtactggaagaacaaattccaaaggctcagatttcccataaagtgtcgtcgaaggggaaatatgtttctgtaaaaattgggcccattcctgtggtttccagcgagcaggtccaagcagtgtataatgccatgaagaaggacgaaaggatgaaattcttcttgtaaacattaacagtacagtattattcttgtaactctagcatattgccacacgattggccatctttataagcaaaagccaagaaatttcaccatttcttggccaaacattaaaaagatggattcccactttagttgaatagcttaaatgagaggccacatttcctatttactgggaatttgttctgttacctactgaaatttactggccaggttgggcatgtttggaccatactttcaggaggacctcagtatcacgcagctccatggggttttctgtgaagatagctgcttggcttggtcgatctgacctcgggaacattgatggaaatctgatgcattttggaggtatcgtatctgttccggtcgacctcacactcacaggcagcaatttgctaaactttgaacaggagtgtacgtcatcgtccaagggtgaatctaatctccagtgatatccataaaataaaaattctccaattattggaatagtttgtcgagcaaaaagaaggcgtgtatgtatgtgccgaaagttgaaaggaaaagacaccggaatctgcttggcattttatctcattatttggccattggttgggttcagg

SEQ ID NO: 16352 - DNA, 3145 bp, Oryza sativa
  ref <308>: DATABASE ACCESSION NUMBER: AK066848
  ref <309>: DATABASE ENTRY DATE: 2001-12-06
gtgttttggagagttttttttttttttttggacaagatcaacaggatttgattaacaaaatgtgagtacaagagaatgcatccatgcatctgcctctcagattaacaggtacattaacaacacgcctgcaattatgctgatcactgacattgtccgtggcgattccgctgcactaggactactacaagcagcagctgctgctcccctcgccgtcgtcgtcgccgtccccggcgcgcacagggctgaaggcccggccgccgccgccgagcccggctgcaatggagtcacctgtggttgttgccccggcagtctcgccggagcaggtgatggcttgaccggaagggtcggcgccgccgccgccggcgccatggctggtgccagaccggcggcggtgccgttcctcatcagccccgtcgggtacgtctcggcgagggtggtggtctggaacagcccgaacgacttctccgacggcttcccgggcttgaggtcctcgtcgtacacggcgaacaggtacgtgtccacgggcttccccggcgcgcgcggcgtgccggccatggaccggaggtgcgacacgagccccgagacgaacgcgcgcgcgttccccacggtggcgccggcctcgtcggccccgccgctgtgcggccacccggtctcggcgacgacgatctccacgtccttgtaccccttggcgtccagcgcggcgcggacggcgtccacctgcgcgtcgaacatgttggtgtaggtgagccccgagccggcgtcgggccgcccggcgttgggctggaacaggcagaacgccagcgtctccggccgcgggtcgctcaggtacgcgaagtaggggtacgggttgatgaggaacggcgagccggtcttgctcaggaaggccaggagcgggtcgagcgcggcggcgagctccggcttgaacgcccccgaggagggcgggtcggagctcgccagcacgtccatggcgtgcacggtggacaccttcacgctggagttgggcggcagcgcggcgtggatgttctgcagcgccgggacgagctgcgacgccagcgacgtgtcggcgaagaggacctcgttgcccaaggagacggcggagatcgccggcgacgaggtggacgggagatgcgcggcgacccacgcggcggccgcggccggcgaggacgcgaagttggggatgtcgccgttggcggcgccgaggaggagggagatgcccgtgccggcgaaggcggagatgacggccgggtcggtgccgtagaggcgcaccttggtgatggtcgtcgactggaggaggcgcgcggtggacgccggcggcgggaggttgtcggcgacgtcgccgtagttgatgccgatgaaggactgcgacgctgaataaggaagacgaatgagctgcaagaatccccagagaagaagaagaagcagaagctgcctcctccctgccatctctctctctctctctttctctcactctcactctcagaaacgctgcttcctgcaggcttaagcagacgaggttggaaggttgcttagcgaggtaggaaatagccgtgggctctctctccccactcgctgcttccgccgccgccgccgccgccgccgcagcccatggcctcctcgtcggagaacgtggaggcgccgcgagacgagcagcgcgacccgccgccgtcaccgccgaaccctagcgaggaggccggggcgggcgaggagatggaggcggagggggagggggaggaggaggtgaaaaccctagagcgggcggaggagctgttcgagagggggtccaaggccatcgaggagggggacttcgtcgacgccgtcgactgcctcagccgcgccctcgagatcagggttgcacatcatggagaacttgctccggaatgtgttagcacatattttaagtatggatgtgccttgctatacaaagctcaggatgaggctgatcctttgggtaatgttcccaagagttcatctaataaggagtccatgaagagtactactaacaaggatgatagtggaagctcaaagacccccggtagcaatactgaggatgctccatccacggataaagctgatgctgaagaagggcaaaactcaactggaaaaggtcaagaggaggaaaacggtgacagtgacaaggatgatgatgagatggtgggagatgaagatgattctgatttggatcaggcctggaaaatgttggatattgcaagggctatagttgagaagagcccagatgacactttggagaaagcaaaaatcttttctgctctagctgaagtctccatggaaagagaggacattgataactcactcggtgactactttaaagctttagccatattggagaaattgtttgagcctgatcatcgtcgaactattgatctaaacttccgcatatgtttggtctatgagttggtgtcgaagatttcagatgcaattccatattgcgctaaggctatttcattatgcaagtcacgcatacaaagcctaaaaaatgacaaagatgctttgttggctggtaaagatgataacgcatcagctgctgatggaggctcagaaaagtccgctcctgagggtgagatagagcagctcagtggcattttgagtgaacttgagaagaagctggaagacttggaacaagcaatgtctaccccaagctctgttatggatgagattatgaagaggattgcctcaaaggcaggtggtgaacagaatgctactgacacaatgccagcggctgcttctttcaattcttcttcacagatggctggatcaagcaacggctttgattcgtcaactctgtctacggcagctacaaccggaagtactggaagcactgtaaccgatcttggggttgttggtagaggtatcaaacgtgctaatatcaagccaatctctgctgaacctcctcccaagagagctgcagctgattcgctctcagtaaaaggtgatagcagcaacaactcagatgttcataccccagcacaagagggcgatgattctgtatcaaagtaatgcattttaccctaggtagtaacttaatggaatctattcggtgccaaaatcctgtcttgcttaatatgtactgctgcatgtccattttctcagaagaactgccaatagggattgcatgaaccttttacct

SEQ ID NO: 16353 - DNA, 779 bp, Oryza sativa
  ref <308>: DATABASE ACCESSION NUMBER: AK066849
  ref <309>: DATABASE ENTRY DATE: 2001-12-06
ggcccgatcgatcgtactacgtgcagagagcttagctagctgcggcgcacgcacggtttgtacaaggtacagtatagtatgacaccgaccgtcgcgaccaccaccccggccgccgcggcggcgacgacggcggcggcggccgaggtgaagccggcgaagcgctccgtcggcctcggcctccccgcgcttccgccattattgcccggcctcgcctcccacggccagccccgtgtcgcgtccttctgcaagaggctggcgaggaacgtggtggccatggcggcgggggaggcgccggcggcgccgctcgccgccaacgcggagatcaccgagttcatcaacgccctcaaacaagagtgggacaggattgaggacaagtacgcggtgacgacgctggcggtcgctgcgtcgctcgggatgtggagcgccggcggagttgtatcggcaattgacaggcttcctatcgttcctggtctcatggaagctgttggcattggctacagcgggtggtttgcataccggaacctgctgttcaagcctgacagggaagctttctttgcaaaggttagggaggtctacgaggatataatcagcggttaacagagatactacttatatacaacttcagttcaagggaggctgctactggattaattatctgtactgtatcacagcatagcatctaatttaattgctcttactcaatgtatgtctatataagttggacattactgctaaataacatttttcagaatgtttactcagagttgaaattctttgcc

SEQ ID NO: 16354 - DNA, 2770 bp, Oryza sativa
  ref <308>: DATABASE ACCESSION NUMBER: AK066850
  ref <309>: DATABASE ENTRY DATE: 2001-12-06
gagtgctcgagctaaacgagtgagagaacgagtagtacgtgctgtagtgggtggatcggtcgagatggccgtggcggcggcgacgcgcattgcggtggtggtggtggtcttggcgctggcggttctcgcgccggccgcgcgcgggctccgccgagacgacttcccgccggggttcctcttcggcgccgcgacgtccgcttaccagattgagggcgcatacttggacgacaacaaggggctcaacaattgggatgtcttcacccacacgcaggctggacgaatctcagatggacgcaatggggacgtagcggacgaccactaccatcggtacacggtacaagagaaattttacaagacagcccataaatgtccaagtgatgcatgttagatttataataactagtatggtggcccgcgcagattgcgcaactagcattattatattttctctcatataatagtatatatgttttctcattatattattaaaatatattacaatgacaacataattttaaattttgtaataactttacgaaactactaatgtgtaatattcaaattgtattttatatacatgttagttattaattatttttaatatcaaattttagttatttgtaaattatatatattcctatatagactctagactcgtcttttaatatttcttttttttaattctgaatttttattatttctaattgtatttctatgtggactctaaactcatctttcaatattctttaatttttaatttcaaatttctgttacttctaaattgtattcctatattaactataaactcttcttcccatgtttttattaattttaaattttagttatttgtaaattgtatttttatacggactctaaactctacttttaattttattatgtttattccgaattttagttagttttaaattcctatatggactctatactctacttctaatattcctttttttttaattccgaatttctatttttttcttaattgtatttctatatggactctatactctacttctaatattccttatttttgattccgaatttatattatttcctaattgtatttctatataaactctatactctatttctaatattccttatttttaattccgaaattcagttatttcctaattatatttctatatggactctagtctcctcttctaatattccttattttttaattccgaattttaatgatttctaaattgtatttatatatggactctagtattctcttctaatatttcttattttttaattctgaatttcagctatttctaaattgtatttctatatggactctgatttttctttttctacgattaatgtgagaatttctaggcaatgagagcgaatgtggaggcttatttttctattcctttaataatataatagattaatataatagatgtgtgatgttgtgaacaggaagatgtggatatcctgcataacttgggtgtcaattcctacagattctcgatttcgtgggcgagaattctaccaagtatttcaagaactgtacatgcagtgcttgttttaagtcggttctgaaatttgacctgactatggaccattcagttccttacttagctgtcctcgaatcatcgcaggaggccggcttggaggagttaattcagcaggaattgccttctacaaccgtctgatcaacgcactccttcagaaaggcatacaaccattcgtgactctgaatcatttcgacattccgcacgaactggagacccggtacggcggctggttaggcgctgcaatccgggaggagtttgagtactactcggacgtctgcttcaatgcgttcggcgatcgggtcaggttctggacgacgttcaacgagccgaacctgtccaccaggcaccagtacattctgggagagttccctccgaaccactgctccccgccgttcggcaactgcagcagtggcgactcgcgccgggagccgtacgccgcggcgcacaacatcctgctctcccacgccgccgccgtccacaactacaagacgaattatcaggcaaagcaaggcggctcgatcgggatcgtgatcgcggtgaaatggtacgagccgctgacgaattccacggaggatgttcgggcggcacggcgtgcgctggccttcgaggtggattggtttttggatccaatattctttggtgattaccctagagaaatgagagagatcttatcatcaaatttgccaaagtttaccccagaagagaaaaaactactgcagaataacaaggttgatttcattgggataaatcattacacagcaatttacgcaaaggattgcatctattctccgtgcacgcttgacacttacgaggggaatgctctcgtatacgccattggtagaagaaacggcaaaataattggcaaacccactgcacttcatgggtactttgtcgtcccagaagccatggaaaaggttgtcatgtacgtcaatgatagatatagaaacacaactatctacattactgagaacggctactcacaacacagcgataccagcatggaagacttgatcaacgacgtcgaaagagtcaactacatgcatgattacctcaagtatctctcttcagcaatcaggaagggagcaaacgtagggggctacttcgcgtggtcaatcgtggacaattttgagtgggtttatggttacaccgtcaagtttgggttgtaccaagtggatttcgacacgcaggaaaggattccaaggatgtctgccaagtggtat

SEQ ID NO: 16355 - DNA, 819 bp, Oryza sativa
  ref <308>: DATABASE ACCESSION NUMBER: AK066851
  ref <309>: DATABASE ENTRY DATE: 2001-12-06
gggaggcagagacaggataggattatctctcccacactcgctccccccagccatggccatggccgcggccgcctccctcctgccggcgagcgccgccccaaccctccccggacgcgccttccgcccgccccgcaactccaccccgacggcctccctctcctgcgatggcggctcccgctgccgcggcgtcggcctcggcgtcatcctcggtgggtgtcgcgcgcaaggcgttcgacggaatgccgcagccgagacctacgtcccaggctccggcaagtacatcgccccggactacctcgtgaagaaggtgacggccaaggaactggaggagctggtgaggggggagaggaaggtgcccctcatcgtggatttctacgcgacgtggtgcggaccctgcgtcctcatggcccaggacatcgagatgcttgcagttgaatatgaaaacaatgccctgtttgtgaaggtggatactgatgatgaatatgaacttgcaagagatatgcaggtaagaggacttccaacactgtatttcttcagtccagatcaaagcaaagacgccctaaggactgagggactgattcctattgatatgatcagaaatatcattgataatgaattgtgatcgctaggatatagggacatagttgagattttgatgtttgaagtattttagccactagtagatgtgatagatttgagctttctgatctttagtgggaaggttctgaatcttctggtacgcagagtctgcgtgtggaatgtagtatgttatatgtggggttcgtgcttcagactaacaagctactctataattcagtt

SEQ ID NO: 16356 - DNA, 1250 bp, Oryza sativa
  ref <308>: DATABASE ACCESSION NUMBER: AK066852
  ref <309>: DATABASE ENTRY DATE: 2001-12-06
ggagagccaacacggtgcatctctcagccacacagccccacccgcgccatgtcactcgccaccgccgccgccggagcgcaaccgttcgtccgctcctcctcctccgccgccgcggcgtcctcgtcgcggcccctgctcgccgtcgccgccgcccgccaccgccgcccgcatggatctctcgccgccgccgccgccgcggcaaggcggcgtcgtcgtcgtccgctcctccaggtgcgcgcggcaaggacggagtccacgggcgtctccgtcgggttccgcgcgccccagttcgagctcccggagccactgacggggaagctctggacattggatgacttcgaaggcaaccccgcgctgctggttatgtttgtatgtaatcactgtccattcgtaaagcatctcaaaaaagatattgcgaagctcacctcattctacatggagaaagggcttgctgctgttgccatatcctcgaactcaattgtgacacacccacaggatggtcctgattacatagctgaggaagcaaaattgtataaatactctttcccgtatctatatgatgagtctcaagaagttgctaaagcttttcgagccgtctgcacgccagagttttacttgttcaaaaaggatggacgaaggccatttgagcttttctaccatgggcagtttgacgattcaagaccgagtaacaacgtgccagttaccggaagggatttaagtcgtgcgattgattgtgcacttagtggacaagagctaccttttgtgccaaaacccagtgtcgggtgcagcatcaaatggcacccatgaagagcgtattgcattgtcatgtgctggaatatagatgtttttcccccttaaattgaaggttgaacatggggattgaggtgagccatgctctctactactagaagtatggaagcacacacatagtagatttatgatagctaatttcacatagtagatttatgatagctaatttataatgtaatttttaagggaaatagatgcagttgaggccttgtggagctgattcttaacgttgtgggggctgttcaacttgagagttgcaaaactagacatgaatggcgtggatagtgttatgttgtgtgctggtgtctcatcttggccggaaaaagaaaaactgatggatgtaactggtatttgtgcaacaatgggataatgcacacaagtacaataacccattattatggctaacacaacacccacgggtgaaaattaaagatgagggc

SEQ ID NO: 16357 - DNA, 2522 bp, Oryza sativa
  ref <308>: DATABASE ACCESSION NUMBER: AK066853
  ref <309>: DATABASE ENTRY DATE: 2001-12-06
gggtagaaacggtcaacccactttcccaccctctccattttttacggatctggcggcgcgacggaggcgaggaggagaggcgatggttgcggtcgatgcagcagttcaacagcggcggcggccgtaccctatggtcaaggagtggcggcgtccaggcgacgggcggcgtggaggaggcggtgacgacggcatcagggtgcggtggggcagcggcgggtgacggcgacagccctcggcagcggcgggcggacgacgacggcctgctacgggctcgtcaggccatcccccgcccggatccggcggcaacacccgtccctcgcggcagcgtcgggtgacggcaacggcctgcggcagcggtgggcggctcgggagcaaaaccctagctcctgccgtcgccgccctccttccctcctctcctccacattcccgtcgtcgaagcgcgtctccaggagagccaggcggcgagtcgggatgtcggtggcggggccgtcttctctgccttcccgcgccggtggacgaggaacaggaggggatggggccggcacgtcatccggcagcggcgccgcggtgatccggtcgctgctccccgcccgctgttgctgctgctgctgctttcctgtcttcttgctctggtttttcccctctcatggcggttgctctgtctagagactactcctcctttggaatccttttcagttttggttggattaattggagttcgctttgctgcgcgattgcaattgttcttgattgatttgcttggctcagaatagtccaaggctctgtccttgtttctcttcgcatactgattcctggttaagaatggtcttcgctttgtgcactcgttcttctgtctccacgaagaaaattggctttctcaaaaacctgcaaaactggaaacaataaaaacgaaacgaattgcatatgattattatgttgctcgcaaacggaatagattgaatcagcacgattgatggatacagtacatagtccttgcttgtctctgactttgctctctactgataggtacagatgagcctgggaagcaagtcgatctggagtgctgtcaagatcaagaacatcagcaagtctaaatgtagcatttaaggtaattaacagagctcctctctgatggcttcttcatcaaattaaatgctaataccagtggttttgcaaatgatggtagttaccagtaactcagtaagtagtagccagcagtccagctcctgttaatttcaaagatgctgctcggattaatgataacatcaatcctctcaataactcaggttgaaggtgaactgtattttaggatgaaatcaatcctctcaataactcatattaaaggtgaactatattttaggattatctgtcaatttagagatgttcatattttaacagatgactatgtattgatctccaccataaaaatctgttggttcagtccccacctacactaatttgatggctactaataaagcactaatttgatgcatgccttttgttctggttccaaataacagcaccaaagagttgcttcataaaacctccaggtggcatacttgttctagcagtacaaacaatttcagcttttcctagtttagagatttgattctggcatgactggtatggggaatatgattagtgcttggcttttgggctatcggctcataagtcttcggacaacatttaattgataagccaatagtttctgaaattttctatttgatgtgctagtagattcttagattttctagttgatattttattaggctattagcttctgaaatttcctagcttggaagagtattacttgataggcaatacagttctctgaattttttttgttcacacagacatgtgcagaagtgataattttttaatccgtccagtggctgctctcaactcacctgttgatttgcagtggttattgctgaatgaaagatgggagaattttcgttcagagaaattatattcagagttctgagtgtcatgttctctcagtttgcaagtacatgcccttctcataaatttttagtttggtcggctggacaatttgatacttacagttgtgtcaaaagctctgaaatgttatgaaaattatggggtttatagacaaatcatgctctaaatgtcaattagaaatatgtcatttgcaaatttgtgtgtgcagtattctgagaaatctgctctcatctgaattatcatcatcatgttctctcatatgttggcgggttccagggtgaaggttggatcctcggtggagcatgccgatgctaccgactccaccatggatgtagctggcagtgggattttgacgtcgaccgtgagtcttcggcaccggcgatggtatttggcgagttgggatgtactcgcttcatctcaatatgtagcaacctcttccagatttgtagttctagtattggtttaatctcatcctagattgtaacatattgcgacggagggagtagtcattggttacaatcttcttgattttttttatcaaaatgaatatgtgtatgtct

SEQ ID NO: 16358 - DNA, 1434 bp, Oryza sativa
  ref <308>: DATABASE ACCESSION NUMBER: AK066854
  ref <309>: DATABASE ENTRY DATE: 2001-12-06
ggcacggcaaaggctcctttcccctttcccgcaaggctcccacgctgacgaaatcgacgccgatttcccgaaatccccaatccccaatccagaatccactcgcttttcgataaaatttctgttgattgcgtcgaaaccttcgcaatcctctcgcacgcatcacgccttgcgcgccgcatctcgtagccctgaattttgatttgattctgctgcctccggcgcgcccctgattggcgaggaggtggtggtggttgtggtgggtgcggccatggcggcttcgacggcggcggcggtggcaccggactggtggaacgacgtgaacaactcgccgatgtggcaggaccgctccttccacgccctcgccacgctatacggcgccgtctcgttcgtcgcgctggtccaattgatcagaatcgaatgtagagtacctgagtacggatggacgacacagaaggtgttccatttcatgaactttattgtgaatggagtgcggtcaatcgtgtttgtgctccgacgagatgtgcaacttgtgcagcctgaggtatttcaacatgtgctcattgattttccggggcttgcattcttcacaacctatgctctgttagtgctcttctgggctgagatttactatcaggcacgggcaatgtctactgatgggctcagaccagctttttatacaatcaatggagtggtctatgcaatccagataatactttggatggcgttgtggtggaaaccagttcgagcaatggtcatcttgtctaagatgttctttgcagcgacatctttatttgctgcccttggatttcttctctatggagggaggctatttctgatgttacagcgttttccagttgaatcaaaaggaaggcgtaaaaagttgaatgaggttggatatgtgacaaccatatgcttttctggcttcttgatcagatgcgtaatgatgtgcttaaatgcgtttgataaagaagccgatcttgatgttctgaaccatccaatcctaaacttcttctactacttgttggttgagattgtaccttcagctttggtgctgttcatattaaggaaactaccacctaaacgggggatcacacagtaccatccaatccattagatcagtccagggatccccaatgtgcccttgcaaattgttccttcaaactggtgagtacagaaatgtaaatcttaaccacggatttctttgtaggtaggttgcttggttttcatgtgaaaaaagctcaacaaaaattctgggatatatatagtttgtaaaaagtctaacatcccgtcatcccaaattcctgcaattgctgtactgcgacccaggagtattctgcaactacaggttttcttctgtaaactgaaggacaaatatgctttgattatttgtttgattatttgtaataatgtcagctttggtttattgttcctggt

SEQ ID NO: 16359 - DNA, 1348 bp, Oryza sativa
  ref <308>: DATABASE ACCESSION NUMBER: AK066855
  ref <309>: DATABASE ENTRY DATE: 2001-12-06
gagcagcagcagctaccagcaacaagcattctcttctagccttagcctagctagctagctttgttgtctagctctgatcgaggttggtggtgatcatggcgtcgtcgagggtgatcctagcgctgctgctcgcggcggcggcggtgatggcgtcgtcggcgcagctggacgagaagttctacagcaattcgtgccccagcgtggaggccgtcgtccggaaggagatggtgcgcgcgctcggcgccgcgcccagcctcgccggcccgctcctcaggatgcacttccacgactgcttcgtcaggggttgcgacggctcggtgctgctcgactcggccgggaacagcacggcggagaaggacgcgacgccgaaccagacgctgcgcgggttcggcttcgtcgagagggtgaaggccgccgtggagaaggcatgcccgggcaccgtctcctgcgccgacgtgctcgcgctcatggccagggacgccgtgtggctgagcaagggcccgttctgggcggtgcctctcggccgccgcgacggcagggtgtccatcgccaacgagaccgaccagctgccgcctcccaccgccaacttcaccgagctcacccagatgttcgccgccaagaacctcgacctcaaggacctcgtcgtcctctccgctgggcacacgatcgggacgtcgcactgcttctccttcactgacaggctgtacaacttcaccggcctggacaacgcccacgacatcgacccgacgctggagctgcagtacatggcgaggctgaggagcaagtgcacgagcctccaagacaacacgacgctggtggagatggacccggggagcttcaagacgttcgacctggggtacttcaagaacgtggccaagcggcgggggctcttccactccgacggcgagctgctcaccaacggcttcacccgcgcctacgtgcagcgccacgccggcggcggctacaaggacgagttcttcgccgacttcgccgcctccatggtcaagatgggcggcgtcgaagtgctcaccggcagccagggcgagatcaggaagaagtgcaacgtggttaactaatcatctctcttaattatcgtcatatatcatcagctgctcgccgagactgtgattatggatttcagcttttgattccggccgtgaccatcttataattaatttccatgtagatcattatcgtaagatttacctgtcccttctttttttttcttgatttcaatcacttcattaattaattgttttgtttatatagcgagccatgcatgtatgtaacaaagttttctccaagtacgtgctcatcatgatcatatgaataaacttcattttttttc

SEQ ID NO: 16360 - DNA, 687 bp, Oryza sativa
  ref <308>: DATABASE ACCESSION NUMBER: AK066856
  ref <309>: DATABASE ENTRY DATE: 2001-12-06
ggctccacctcgtcacctccgcctgctccccgccgcgcgtcaggctcgtcggccccaccaccggccggagatcgccgctgcgcgcggctccggcgccgccgccgccgcgggcgtacaaggtgacgatcgagcacggcggcgagtcgcgggtggtggaggtggaggagggcgagaccatcctgtcgcgggcgctcgacgagggcatcgacgtgccgcacgactgcaagctcggcgtgtgcatgacgtgcccggcgcgcctcgtcgccggcgaggtggaccagagcgacggcatgctcagcgacgacgtcgtggcgcagggctacgcgctgctctgcgcctcctacccgcgctccgactgcaccatccgcgtcatccccgaggacgagctgctcaaggtccagctcgccaccgccgacgactgaggcacatcgcgcgcccgccgccgccgccgtcgccggcgtgtgtgtcatctccggctagcttgtacaacttttttcccctcaagtggtatttcccgagatatttgtgacaattgctcctttgcctagctagttgtttcagttgtgataatgtagtatctactatttttgttttaagcattatgtaggatacatagtattatttctatctttttcatattctaagagacgaactacaaaagggtaatgtacaaaaatttggggagct

SEQ ID NO: 16361 - DNA, 3895 bp, Oryza sativa
  ref <308>: DATABASE ACCESSION NUMBER: AK066857
  ref <309>: DATABASE ENTRY DATE: 2001-12-06
gcataacctcccgtacatgcacatagctaacagcccggccgggtcgcacgcacgactacaagccactcactcatacaacgatctgcgcatcttacgccaagattcgctcctccgagctgaccgcgagccacgccacaacgtgctccactaatcctgcatgctcctaactaacttgccgctaatcttgttattcacctaacctgtttagttgctagttgtgctgcaacacacgcagctgccactcactagcactgactgattctacatgcaaatatggactaaccactacctacgtgatgcacacatacacatcacttacaagatacatgaacatatcacgttcctctctacatgcaactaatgcaaaacccaaagacatatgcaagtcatgattagttccaacagcagatagcagccagaggggtgcgcattctggctgcataccacccattgttctagatccgtcgtgtggttgccggctgtgcgcggtacgcctctcccatcacaactccatctgggaaatgaatgccagatgggagaggctggcgaacggaataggggcagaggaggcttgtgcagccctacggctgcatgacacatttaacccttggctagcgcaacggtgcatcgctcgatagattgtgatgcgtcatgggtgtgtacgttgtggccacctagtccaaggcaagcaacgcgacagaaagcatacaaaacattaaataaatagtcgcatcaaaatattttccatgataatatattgatatactccatccatttctttacttgttagggtattgacatggtatcagcatgttgtatcactatctctgatcatatgaaacattaaatatatagttgcatcaaaatattttccatgacaatataataatgtcattttcacatatcaaattttaatatgtttatatatattaatgagctaagatttgtaggtttgactacacgcattctatcctaatagaacaattcatggcactaggtcattcagtgagggttgtgtggatatggatagtagcaacattctatctcacttttttagtttaccttccttaactttccatgttcattgtctgtttgagaaatgggaatattggattgtctagaataaagtcggagatctaaactcttatgaattgtggttacttagtttatggcacaacaataaattgtgcttccaaagaggagaactgcaccaacaaaaatatggaaagcaatttatcattaccaagaaatagtggaatttatttatgaattgatgattggtggcttctgattgcactaaggaagactgtccatttcaacatccagggggaatattcgaagataacccgtgaaaactggacataagcattttttaatagagataagtataagcatgaaatacattcccaccaaatctactgtttaatgtaaaatttgtcttttggttcccccacatgaagttgagtttggacatgaatatatttcatgtttatacatatctctagtatttttttcattaatttagaaaacttataggttcggttttcacgggttttcatttatttgatggttttcattggatatcccccccccccccaaaatcccccacacccaaacatccataccatgatatatcaattaatcatcatgatacacgataactgatagtgtattttgttaaaattaaattcaataaagaaacattttcagacattttgcttatctcttcattttgcactacaaatccgaatgcattagtttataaatagacatactcatgggatgaaatcagaaattattaaaattatttgataagcacacatcatgccactgctaaatatttggtcagcatgatgtgattgtcatgcgagaaatggttacactcctcgaaggcctacaaaaaaaatctgaaaacaattaatatgcgagtggaaagattatgttgctacaaatctggtttgtaatatgcttaaaaaatgaatatgcagatattgatgaatgtttaactaccatataaagcatcaattttgatacttaaaggcccttttcaacaatactacatatttacatgctaattctaaccatgtttatttcacagattgcaacgacatgatgaatcaatctctcttcttagtcggagaaattggtggcaatgattacaaccatcctcttatgggcggggtatccattagaaagattcgcagcttcactccgagtatcattgccaaaatttcttccacaatcactgtgagtaatatgcctatggacatacatacatatatataaggtgtctgggcttcaaggtttgaaatacacgaattggctccaatttttgaaaattttcaacttcttgtttttatatacctagatgcaagaatttgattcaacccataattagcagtaaaacaactcaaattcatggatgggagagaacctttttaattttgacatggggaaaacatcttgttagtctataatttattgatgtcttattctatattttatggaattccttctttgtagctgtgacacatcttcttatttatgtgagagctataaatgtcttgatcatatttgctgtaatatttgtaaatggctcagaatggtctaaagataagaatttttggattgttagagatggactcacttcactcgtttgtataactagtcctttttcaccatcacaagctcatgtatcacaacatggaacaagtgtatatggctagtaatgcaatagagttgagtttgtaggaattgatcgggctcggagccaagactttagttgttcctggtaatctcccaattggatgtattccacattatctcatgatattcaagagtggtaagaaggaagattatgagccagagacaggttgcctcaggtggatgaactagttctcgcaataccacaacagacttcttatggatgaactagaaaatttacggaagcttcatcctgatgtggccatcatctatgccgattactatggagctgctatggaaatcttcctttcccctgaacaatttggtgattttcgttaattcattactgtatctactctgatttcttttgtaaagcttaacatattaattttagtttttagtttacaagaaaaatactctatatgtgtgttctcttaaatttgatttccttatgttgacaatgaatcgcttgatgacaaacactctatatttgttcttgcttcaactatttgtagtagacaacaaagtatctagaggagaggagctgaaaagcaatatataggcatctaaatttgatttccttagcacttctcaaaccaaagcaaatctttatctatatatgcctgtatcttagtcacagcagctaaataggatttctgctccacaaatttattaccaagttggctagtttatttttcagcacctcatggcatgcgctcctatgctaatttttgcattgacaaatcacagttttttattctcgttgatagcttgaataaaaattctctgattgtgtttcaggaattgagaatcctttggtagcttgctgtggtggaggaggaccttatggtgtatctgaaactgcaagatgtggaaatggtgaatacaaggtgtgcgatgacccacaactgtatgggtcatgggatggctttcatccatcagaagcagtctataaggccattgcaactggcctgatatggggttcatacacacaacctccaatcgctaccaccaccatttcgtgcctgcaaattacagagctcagttcttctgttgaatacaaggtcctctatgatttgtaattgtgtgactatattttgttattttcatagaatgtatgtgcggataaaaggttcatgtggaatcgtcgaaataagctggtattgtgctgaaatcgagttaaacttatgcc

SEQ ID NO: 16362 - DNA, 899 bp, Oryza sativa
  ref <308>: DATABASE ACCESSION NUMBER: AK066858
  ref <309>: DATABASE ENTRY DATE: 2001-12-06
gtatccatccccaaatccgaaccctccccccccccccactcctctgcgcctccctcctccgcggcctccgccatggcctccctcgcctccgccactacgcccacgtcgactgccccggccacgccgactacgtcaagaacatgattaccggcgccgcgcagatggacggcgccatcctcgtcgtctccggcgccgacgggcccatgccgcagaccaaggagcacatcctgctcgccaagcaggtcggtgtccccaagattgttgtcttcctcaacaagaaggaccaggtcgacgacgaggagctgctccagctcgtcgagctcgaggtccgcgaattgctctcctcctacgagtacgatggcgacgaagtgcccatcgtcgctggctccgcgctcaaggcgctcgagaacctcatggccaaccctgcttccatcacgccacacaccaagtttgatgcggttgtgtatgtcctgaagaaggacgagggtggacggcactcaccgtttttccctggttaccgccctcagttctacatgcggactaccgatgtgacggggaatgtcacaaagattatgaacgacaaggacgaggaggcgaagatgtgcatgcctggtgaccgtgtcaagatggttgtggagctcatccagcccgtcgcttgtgagcagggaatgaggtttgccatccgtgagggtggaaagaccgtcggtgccggcgtcatcaatacgatcttgaagtaaactggatggagcatatccaccgtgagaattttccttgtttactctttgcgaaatgctctgtagttgttattacgcgttgagttttaggggttgctcatgtgaaattgtagtatggcacttttctcttcaagtgaatttgcatactttgtgatattcacgacg

SEQ ID NO: 16363 - DNA, 1421 bp, Oryza sativa
  ref <308>: DATABASE ACCESSION NUMBER: AK066859
  ref <309>: DATABASE ENTRY DATE: 2001-12-06
gtcaatggcaatggctgggcaaatattgcgagcatcgatatcgtttacgacattctacatatgatgggccgcgacgacattccagtaggcctaggcaataccactgcattgggaattccaacccttggctgcaacaattcttatgctatcccccatggaagtggtggttttattgattcagatacactgtatggactagccaggtcactgccaagaagtcctagaagatatgctcctgaaagtttagatcacccagaagatcggcagcctttggctcttgaagtttggcaatctgtcaggaagcagcttgatccaggcgaaaagatcactgttcttactaatggacctctcaccaatatggccaacatttcactctctgacagggatgcaagttctgtaatagagagagtctatgttgttggtggactcatcaaagatggaggcgatgagaatggaaatttgttcacggttccatcaaacaaacatgcagagtttaacatatttcttgatccactagctgcaaaaacagtcctggaatctgatctgaaaatcgcactcattcctcttacggcgcaacgaaaggctgcatcatttcgggctgtccttgcggctttggaagacatccagcatacccatgaatcaaaatttgtccatgaattgttgtcgttgctgcaagaacttcagatcaaacagaagctgtatcatcatttggacatatttctgggagaaattcttggagcagtttacatggttgaaggatcaggactgaaaccttcagtggaactcaagccagtaagtgttattgccaacacaaacaaaagcacggacgggcagattgtcatcagcaagaatagtgcaaagctggtaagggtattgagcgatttcgatggtgaaatatatagcaaacaattggcaaattctttagcaaacaagagacagtctgccgttattgggagttttgaagaacaaaaggcaatttggagcaggccggtaaatagttcagggaatataaaaaaacaaaagtgaacttttgtagtagcattagcgtgctaaaaaaatatattaaagattacatagcacaggtaataagaaagctgacatgataatgcttgaagtggctgaagaacgggtgtcactgggtgctgaagaatcgctccatgagtcgcgaagtaacctggagaattaatcatttatcttttttcttttgattacacaaaaaggaaaattatgtttctttctgaattttgtaccgtagttgagcattgatgtgaccagcaaatctgggatacgtttttcagtttgtgctctgaaccactgaatcattcaagcagtataaataattacagtctgaaattatttacctctgcggcaaatcaagccgtttttaccaaaagaatattcaatagagctacacttgtatg

SEQ ID NO: 16364 - DNA, 1171 bp, Oryza sativa
  ref <308>: DATABASE ACCESSION NUMBER: AK066860
  ref <309>: DATABASE ENTRY DATE: 2001-12-06
tcctgagtcatgactcacctcagtagagatagaaactgactacaaactctccgtcttctccacccagcacagcatcccaccctttcctcccctccgatccagagctctccgtccgcttcccgcgctcgtgtcgcgcttctcctctccagcgtcgcgccgcgccattggcgtatccgtatccttgcaacgcgggcgccgcgcgttccactctctggtcggtgtccggtggccggggggaggctgccggtggcgatgtgggcagcttggtcctgacccttacagccctcgctcctggtgttactgttacctgagctgttcttgctacgctgggaggggaggggtggcgccgcggcgacgcccgcaacctgttcgacggaatgtctccgcggaagatgcccaaggaatcgcctggctcgaccgggggagaccgcataggggacctcccggatgaggtgctccaccacgtgctctccttcctaccggcgcaggaggctgtccggacgtgcctgctggctcggcgatggctccacctctggaagtccgccacggggctgcgcattggcgaggactgcgactatctgggaagcgtgaagaaacagaaggagtttctcgaccgtctgctgctactccgtgatggagcccctctcgacacgtgcgtgctaatgttcgattattacggcgacatggacatcgaggacacagctcgggtgaacctatggttcaggcatgctcttatccacaaggctcggttcctctggctcgacgtcggatactaccactcatttgtgatagatgagatgccacttgtctcccagcacttgacgaggctacagcttcgaaatataaggtgagatatctcgggtacgtatcgctatcccgagtcttgtttctctgcagctggatggcttccatgacagggctccagtgcttgagaggatgccatcattagttgatgcatttgttggagtcctcaactggactaaagactattgcatttggtctgactctggggattgtggtcatgagaactgcgaatcttgttacggtatcaaggacaacaattgtgtgcttttggaaggtttatcggaagctaagacgttggggctgataagtgaacgtggatcgtctggtaaacaggcgcctagtatccctcatgcagctgataaagccc

SEQ ID NO: 16365 - DNA, 817 bp, Oryza sativa
  ref <308>: DATABASE ACCESSION NUMBER: AK066861
  ref <309>: DATABASE ENTRY DATE: 2001-12-06
gacacgggatgagcaaaacggtgggatagattcatagatagatagtagtagtactggatagatagaaagatagatagtccagccagaaaggtgccgtcgcctgtctgtctggtccaagaaacagaaacgttcgtgtcgccgtataagttgcagaactcgtcgatctccagtgtataagcgaatcagtttgtggtttgttccgggaggaagaacagaagaccggaagggttggctgcgatggccggagggaaggcggtgtactcgttccaggaggtgagcaagcacaacgaccggaaggattgctggctcatcatcgccggcaaggtgtacgacgtgtcgccgttcatggaggagcaccccggcggcgacgaggtcctgctggcgtgcaccggcaaggacgcgaccgcggatttcaacgacatcgggcacacggcgacggcgaaggagctgatgccgcagtactgcatcggcgaggtcgacgcctccacggtcccggccaagccggcctaccgcgtcgtctccgaggacgcgagcgccaagccggacgccgcgagccagggcgcctggctcacggcgctgcagctcgccgtgccggttgtgctgctggggctggcctacgcgctccaggacttcgccaagaccaagacggcgtagggctagggcggctctgccgccgcaggctgggggcctcttggaatcgtcatctgaatatttgggtccataggtcgaagtgtcagactgtcaattaagtgtaccagtgctaagtgctagttaattattagtaatctccgtaaagaaaaataaatgtttgccgatg

SEQ ID NO: 16366 - DNA, 2703 bp, Oryza sativa
  ref <308>: DATABASE ACCESSION NUMBER: AK066862
  ref <309>: DATABASE ENTRY DATE: 2001-12-06
caaacccatacgactcctctgcttctcgctttcttgatttctttccttgctgcttggcgccaacgatgcgagtcatgctactccatttccctgtacttgtcaccgatgagtaatttttaattttaaccataagtagttttaaaattatcatattattaagcgtacaacatactttcacaatataagtatttttaaaaaaatttatagacttgtagcttaaatatgagtggttaaatttaaatatgaaacaatatcctgtggtcattagtcatcacctacgtaagcggaactgtaaatgttgctcatatgatttggctacttgcagaagttgacggttttgacagagattggtgatggatattttcaactttaggacactaaagaatatcgttcgcatataccgtcaacaaggagtcgacaagattccaatcaattccgatgcaagctttatatatatttcaaactagaaaagacatatcaccatcgttccatcaatgtgggatatgtttatgtataggcctaggaatacctcatattaggaatttacctatgtgacctatattttttataagttgctggtttttttcttattggtttttcaatgaaatacatataaagcataacaacctcacaacataaaaaggaaagtggattctaatccctcgagatgacgtcccctcatgtatctttgttttcttcaaattcaataaaaatagttatgaaaaattatttagagtatagtgatatttattggtccacaaaaatcaaagaaaaagtggcctacacgttaagtaaaaaaagataaatctgggtatgaataattcgttactattaatttatctttttttatctcggtgtgtgagttgaattcggacctaagattttgtggagtgatatatatacattgtatgagtgttgtcaaattctttgataatttttcgtaactgtttggatgctttttagacaaacaagggaacatcacctttagggatcaaaatagtttatccatagaaatctgtaaatttattgtaaactcactctaacttaaagtttgctgtatttattttttgaaattgatttctcaaatatgcctttttacccttagctcctacgcagttttattttgttatattgtcaagtatgcacatcaaagtataggtgttaagtttaagttgtttaaactctttgagcgaaaaaaaattggcatgttagttgttgatgttgatctaataatttataattagaaagaaaactcgatcacttgagaaatagataatcccaaaatacaatgtatctaccgttcctgtggaaactgaaccatttcccacacaaagttcgtgcaccacaaataatgatacaaaagcggtaggtgtgagagaacacctcacatataaacgagaagtggacgtagctatcgatcgatcagtccaaccatggcacaatctgctctgctctgctctgtttgtttggatatgcagctagctactaaccagctagacactggtacgtataacactttgcctttgtgtctgtatgtctgatacgaatggatgattgattttgtgtcgctgcggtgcggtgcataactttgcaaaatgcagataagggagtcgcggccgaaggtgacgctggtggcgcgcatggcggcgtcggtggccaactacgactatatcgtcgactgggagttccagatggacggcctcgttcgcatcaaggttgggctaagtgggatcctcatggtgaagggcacccagtactcccacatgaaccaggtccatcaaaatgacaatatgtacggcacccttctgtctgagaacgttattggcgtcatccatgaccactttgtcactttccggctcgacatggacattgacggcgccgacaactccttcgtcaaggtggcgatggcacgacagaacaccggcgccggcgaatcccctcgtaagagctacctgaaggctacccgacatgtcgcaaggacggagaaagatgcccaggtccgcctgaagctatatgagccatccgagttccacattgtcaaccccatgaagaagacacgagttgggaaccctgttggttataaggttgtcccagccggtactgcagctagcctgttggatccagaggacccacctcagaagaggggtgcattcacaaataatcagatttgggtgacaccctacaacaaaacagaggaatgggctggtggtctatttgtctaccagagcaaaggggaggacacacttgcaacttggtccgaaagggaccgtccgatcgagaacaaggacctggtgctgtggtacacgctggggtttcaccatgtccggtgccaggaggacttccccatcatgcccacggtgtcgtccagcttcgaccttaagccagtgaacttctttgagagcaaccccatcctagggcagcgtccgacccaggagaacgacctgccggtgtgtgccgccgctgccacgacctcttgagacgacagcggatcaccgacatgtgtgcgtgcatggtcgatgcttcggtgtatcgatctactgatatggattgttcatagtgaaagaatgtatcggtacatctacggatttggagctagccatggctggctatctatgttgctctatatatgtatgagcggatgtatgtgcactgcagtggtatgaacataattgagaacctgaaaggagcaggcttcaaggctgc

SEQ ID NO: 16367 - DNA, 805 bp, Oryza sativa
  ref <308>: DATABASE ACCESSION NUMBER: AK066863
  ref <309>: DATABASE ENTRY DATE: 2001-12-06
gattctcatctctctctctctttcactgtttcttcctcctctgcacttggcgcagcacaaagtcgattcctttccgcctcagcggcgccgcttgtttcgatcgaagcatcgcgagaggcagcccgccgcctgggtttcgtgccgattttgatttcctttttcttggccgcctctgcctctctctctctctctctctctccctttcttggttcgattgttcctggttcttggcctgattggttgaacctgcttcttctggaatcaattaggggagaaatatttgcaggagaggggcggtggcgatggcggagttggttgggccgcgggtgtacagctgctgccattgccggaaccacgtctgcctccacgacgacatcatctccaaggcctttcaggggaggaacggccgtgcgtttcttttctctcatgctatgaacatatctatgggtccaaaggaggacaggcagcttatgacagggcttcacacagttgctgatatctactgccgtgattgccgtgaggtattgggttggaagtatgaaagagcatttgaagaatcccagaagtacaaggaaggaaaattcatatttgagaaggcaaagattgttaaagaaaattggtaatgactggaaagggttggcgtgccaaactttcctgtgaagctaaaattcatacctttgtacatagctgtcgtctgtaaattcgaatgtttagcctgcatgatgttgctcatgccatttgtaatgtgcacttgttttgctgttcatttctgtgaagaagacaggcctctgtttatttctttgtc

SEQ ID NO: 16368 - DNA, 2236 bp, Oryza sativa
  ref <308>: DATABASE ACCESSION NUMBER: AK066864
  ref <309>: DATABASE ENTRY DATE: 2001-12-06
gttctagaattcaacagtacaagaaagcgtcaatcagtggtctgccgtttcccaaatggaaggcttgttctctattgcaagggcgctgacaatgtcgtttatgaaagattagctgatggcaataatgacattaaaaagatcagcagagaacatctagaacaatttggctctgctggcttgcgcacactttgcctcgcttatcgagatctcagcagggagcaatatgaaagctggaatgagaagtttattcaagctaaatcttctttacgtgatcgcgataagaagcttgatgaggtggctgagttgattgaaaaagaccttgtattggtagggtgtactgctattgaggacaaactgcaagaaggggttcctgcctgcattcaaactctttctgcagctggcataaaaatttgggttttaacaggagataagatggaaacagcaattaatatagcatatgcctgcagcctggtgaacaatgatatgaaacaattcatcatcagctcggagacagatgtaattagagaggctgaagacaggggagacccagtggaaattgcacgtgttataaaagaatcagtaaaacagagccttaaaagttaccatgaggaagcccgcggttctctaattagcacaccgggacaaaaattggcgctcattattgatgggagatgcttgatgtatgctctagacccaactctgcgtgtagatcttcttggtttgagtttaatttgccactcagttgtatgttgccgggtttctccattgcagaaagcacaggttgctagcttagttaagaaaggtgcccataagataactctcagtattggtgatggtgctaatgatgtgagtatgattcaagctgctcatgtggggattggcatcagtggacaagaaggaatgcaagctgttatggctagcgattttgccattgctcagtttcgatatcttaccgacttgctccttgtacatggaagatggtcatatttgagattgtgcaaggttatcacatattttttctacaagaatctgacatttacgctaactcagttctggttcactttccaaactggtttttccggtcagcgattttatgatgactggttccagtccctttataatgtcattttcacggccctacctgtaattatggttggattgtttgataaggatgtgagtgcgtctctgtcaaaaaaatatccgaagctttaccaggaaggaatcaggaatacattcttcaagtggagggtgatagcagtgtgggctttctttgccttctatcagtcgatagtgttctattacttcactgcagctgcaagtcggtatggtcatggttcatccggcaagattcttggtctttgggatgttagtacaatggctttcacctgtgttgtggtgactgtgaatctccgacttctaatgtcatgcaactctataacaagatggcactatatcagtgtagctggcagtataacagcctgtttatgttcatcttcatctactctgcaataatgacatcattcgacagacaggaaaatgtatattttgtgatttatgttttgatgagcacgtttttcttctacctcacactattgcttgttccaatcatcgctctctttggcgacttcttatatttatcaattcaaaggtggttcttcccctatgactaccaagtaatccaggagatgcacagggatgaaccccacgagtacagcaggatacaacttccagagacaagccatctaagcccagaagaagcaaggagctatgcgatctccatgcttccccgagagagctcgaagcacaccgggttcgccttcgactccccgggatacgagtcgttctttgcatcgcagcaaggtgtcggtgtgccgcacaagccgtgggacgtagcgcggagagctagcatgaagcagcggcagaaaacgggaggatcataaccctagtagcgcccctaccttcctggccccccccattttgtgtaaagtttttgtacatcacatgcttttgctggcagaccacaggagagtgtgtataagcttgtagctttgtagccatttttcgtgttttgtcaccgatatgttgtgttggcgatgttagcagaggccattgatccagttggctgcagaattacttaggacacgccctttagttaaaaacaaagttggaaactgggaatgcagttagtagtgaaattctttctgacgctattgcaatgtttagtccttttctgctt

SEQ ID NO: 16369 - DNA, 820 bp, Oryza sativa
  ref <308>: DATABASE ACCESSION NUMBER: AK066865
  ref <309>: DATABASE ENTRY DATE: 2001-12-06
ggggaaggaagaagctccgcgaagtccggcgcggcggcgagcacgagatggtggtgctccacgtcaggtgggctgcagcctcctcctcctcctcgccgccgccaccgtcatcgccggaggaggaagagatggagttcctccacgagtgcgccgcctccacccccgtcgaggacgtggcggccgcgctcgccggcgtcgcggcactccaggcccgcctgctctccctctgccgctcccttcgagagaggggcgcggcggcggcagcagcggcgggtgaggtcgagagggcggtggcggaggctgaatcctacgcctccaaggagcaagtgcggtacaacagattcttatcccctcgtgctctaagggagcatatcaagaacatcgaaaagacagctgttaccgctctacaggagtctcctgaagcgttgtgcctgcaacagaaatcatcaggcgacaagcttgagaatgttcaactttggtgggctggaaaagagctggccatgggcaagaagttatgtgactatattggtgttaatgacaaaacaaagattatcatcaggttaaagcatgttcctcaatcctcatgagctttgagtgtgcttcaactacccttcattgttcctgcagagttagtttacttttgtttttgggtagtatgctagtagtatgcaagttatccccgttgtaaattattattcatcttcttcagaaaactcctatttttatctgtgccattgaaaacctgtatagacaccttaactgtaacattttcttttgatatcttagtattcaattttgtcttcaagagatgtgaccattc

SEQ ID NO: 16370 - DNA, 1766 bp, Oryza sativa
  ref <308>: DATABASE ACCESSION NUMBER: AK066866
  ref <309>: DATABASE ENTRY DATE: 2001-12-06
gggtaagtcgagctaagacagccgagggcaccatcaccaagctacataatggccaccttcttcacggcgcgccggcggaaggcggagctcgtggcaccggcgaggccaacgccgcacgagcacaagcccctctccgacatcgacagccagcgcgggctggagctctacgccgccggcgtcgagttcttccgtcgccgccatcacgctgcggccgtcttctccggtggtgacgacgacaatagcggtgacccggtgggtatcatcagagcggcgctggcggaggcgctggtgagcttctacccgctggccggccgcatccgggagctccccgccgccggaggaggaggaggtggaggcggtaagctggtggtggagtgcacggcggaaggggtggtgttcgtggaggccgacgccgacgtgcggctgcaggagctcggccatggccagccgctgggccctccgtacccgtgcgtcgaggagctcctctgcagtaacgacctcgtcggcgaacctgacgtcgtcgttggcaagccgctgatcttcatgcaggtgacacgattcagaaacaacgaagggttctgtatcggctaccactactgccactccatcaccgacgcattcggcatggcccagctgctccacaccgtctgccgcctcgcgggcggcgacgacgacggcgagtccctcaacgatccgccggtctgggagagggacctcctcgccgtcgcgccacgacgctcctcgccacgcatcaggcacgtcgtcgagcatcccgcctacgacccgctgcccgtctcatcggccgcggcgaaggacgtcgtgtggacgacaccgcgcgagcagatggtgacccgctacttccacctcggcccgacggagatggcagccctgcgagcccatgttctgtcgtccgccactgtcttcgagctcgtcaccaccgtgctgtggcggtgccgggcggcggcgctggggtacgccgcggcgcagcgcgtccgcgtcctggtcatgtcgagcgcgcgctggagctggaaacgcaatccgccgctgccgcgcggcttctacggcaacttgctcgtcccgcaggtcgccgaggccaccgccggcgagctgtgcggccggccactcgcccacgcggtggagctcgtgcgggggaggaagttcgccgtgacggacgagtacatgcggtccatgctcgacatgctggcgcggcgcggccggccgttcttcaacctggactggacgttcgtggtggctgacgccggtggcctcggccgtagcctgggcgtcgtcggaaggtgggagcgcgccggcggcggcctcacgccggttggacaggcgactgcggcgagcatgtacagctactacgagaggtgcaagattggagcaggagaggaagccgcagtggtgtccatgtgcttgccggcgccggcgatggagaggttcgtgcgggagatcaccggatgctccaacaccagatcagcgaagagcgccatgtagaggcaagtcgggctttgttgggccatgattgtgctactttgtacgggctattgggcaatatcgtgtttaggcagctctataaagcatggccattatcaattgataggagaagatttataatggttgggtggccatgacgggttgtcgaaaaaactcagcaatcagggtgacttctcgatataccaggagggcatagttaggggtattatctacgtaattgtataatagtaagtgtagactaaaaatgattatataatgattattttctt

SEQ ID NO: 16371 - DNA, 2900 bp, Oryza sativa
  ref <308>: DATABASE ACCESSION NUMBER: AK066867
  ref <309>: DATABASE ENTRY DATE: 2001-12-06
ggcggtcaaacgaagcgagagaaaaaaaaatttcttaaaaacaaaacaaaaaaaaaaaaaatcctcgagacaccgagcgagtgagcgagcggcggcgaggcggccaccgacgacgaccgccggagccggagcccggcggagatggagatggagtccaagtacgcggcgctgcggcgcgcggcggaggaggcggcggcggtggacgcgcacgcgcacaacctcgtcgccgacggctccgcgttccccttcctccgctgcttctccgaggccgacgccgccgacgccctcgccctcgctccccacaccctctccttcaagagaagcctgagggacatcgctgcattgtacaactgtgaagcttcacttgagaaggtggaggagttcagaagggctgaagggttgtcgtctataagctcaaagtgcttcaaggctgccaacttatctgcaattcttatagatgatggcatagactttgacaagatgcttgaactggaggcacacaaggcgtttgctcctacagttggcagaattctgaggattgaaaagctggcagaaacaattattaatgatgaatcattcagcgcatcaagctggacacttgactcttttactgaaatttttgtcactaagctgaaatcagttgccaacaaaattgttggattgaaaagtatagctgcatatagaagtggcttagagattgatccaaatattagcaagacagatgcagaggatggactacgtaaggagttatcaggtcagaggcctcttcggattacaaataagaacctgattgactatctatttacttgcagtcttgaaattgctgtatcatatcacctgccaatgcagattcacacaggatttggagataaggacctggacttgcgaaagtgcaaccctctccatctgcgtgctgttcttgaggacacaagattctctaagtgccaaattgttcttttacatgcctcttatccattttcaaaggaagcatcatatctagcatcagtgtactcccaggtataccttgattttggcttggcaattccaaaacttagtgttcaaggaatgacatcatcaattaaagagctccttgagctagctcccataaagaaggtcatgttcagcacagatggttatgcttttccagagacatattacctaggtgcaaggagggcacgtgatgttgtttatcgtgtactctcagctgcatgtgaagatggtgaccttagcattcaagaagctattgaagcagttgaggacatatttagacgaaatgcattgtatctatacaagttgaatgttgccaacgggtcagtcggtcagataacagcaatagctgacaacggcataccattatctgaacaagatgtgctctttgttcgagtcgtctggattgatacttcaggtcaacataggtgccgcgttgtgccagccggaagattttatgaaattgctaggaaaaagggtattggtctgacttttgcatcgatgggaatgacttcatttactgatggcccagcagatggaacaaaccttactggtgtaggagagatcaggcttatgccggatatgtcaacactattgaggcttccatggtcaagacgcgaagaaatggtaatggctgaaatgcatataaggcctggggaagcctgggaatactgtcccagaaataccttgagaaaagtcacaaaagttctgctagatgagtttaatgtgacaatgatggcaggttttgagaatgaatttttcctacgtaaaaaagtagtaagtggtgaaaaggagctgtgggtcccatttgacaataccccctactgctcaactacagcattcgatggtgcatcatctgtgttgcaagaagtatatacttctcttaaagcggcggaaattgtggttgagcagctgcatgctgaatctggaaaagggcagtttgagatagccttgaagtatgtgttgtgcactcttgctgctgacaaactgatatatgcccgtgagattattaaatcagttgctcgaaagcatgggctacttgcaacttttcttccaaaacctgacttgaatgatattggatccggttctcatgtgcatctgagtttatgggaattcgatcagaatgtgttcatgggatcaagtgaatataattactatggaatgtcaagaatcggagaaagcttccttgctggagtatatctccatcttccatcaatcttggcattcactgctcctcacccaaacagctacaaccgaattcagccaaacacatggagtggtgcatatcagtgctgggggaaggagaacagggaggctccactgagaactgcatgcccacctgggatacctcttgatctcgtcagcaacttcgaaattaaatccttcgatgcgtgcgcaaacccgcacttgggccttgctgctatagttgctgctgggattgatggactcaggagaagccttacgttgcctgaaccaactgaatcaaaccctgcaggttatgcctccaactccaagctcaaaaggatgccgaaggacttgatggaatctgtcgaagcactagctgcagacaaaatcatgcatgaattgatcggcgataaacttgtcactgccgttattgctgtacgaaaggctgagatcgatcactacgagaagaaccctgcagcattcgccgatctcattcaccgttactagggtgaaacactagttagttccacggagcaaagaggattacgagtgaattactacgacccacgaaattgcttattctcgcgtccttttccgctgtacttgcagttgcagtaatttttttttgattgaataactggttttagatttccaaaaaaagggcacttggcaaactcatccttctagagaaaataaagcaattcaccaatcaggttctcggccgcttc

SEQ ID NO: 16372 - DNA, 1118 bp, Oryza sativa
  ref <308>: DATABASE ACCESSION NUMBER: AK066868
  ref <309>: DATABASE ENTRY DATE: 2001-12-06
ggtttccccactgctccatccatctccaccgccacccatggattcctcgccgcgccacctcctccgcatctcttccccgagacatctgatgatgccgtgccacaaccagttgtcctgagatcatgatgcaaccattgtgcagctaagttttggagaccgtctgagggcactccttgtacttgatatggtatgattttcctatgctgagaatgcatttttgcttggtctggtcctgattttgaaatgttttgcttttgtgatttatgagttttgttgtatcagaaaactattttgtgctggcatttagtgtttgcagatgaaggcactcaaggatctagtagaccttgatgtggcgaaagccgaaaggaagtgtggcaactgattcagctgtcacacagacaagttcgacatcatgagattgtgggttaatgccaattcttgttgctttgaatgcaagtgcaacttgttaataaagactaacatatatataatttggaattggagatgcaatgacataattctgttaaacaacaaacagcaagctttccctcagtcttattccttaccacaatgctcacacacaattttagatatgatcctaaattcttgccggttttcctagacatggctcctgctcaaacttatttcatactagcctttcatttcaaactatattattttattctttctgcaactagttctgtggtacgattgaagcagggatttcatttacctttgcatcttgtatcctgacagctttttgctggagtgggtgatggtagtacagtacggcttcttcatgcgtgaagaactcctgtgaaggactgaaactctgcaaaggacgaggcttagtggaggggggttggatcggaggcgtgcgactgatgccagaaattctgatcgagtcagatgatcatattactagtatagctggctaaacagacgaacagtacagtgttttcgcgtccatgatctttgatcgatgagagcaatagcatcatcgtgttcttcgccggcacgtggtaatgggcagaatctcctgaaaaagttgccatgctcatgcacaggtaagaataggattgaaaggaattcacagtggaaaagagtgtttttgagcc

SEQ ID NO: 16373 - DNA, 2580 bp, Oryza sativa
  ref <308>: DATABASE ACCESSION NUMBER: AK066869
  ref <309>: DATABASE ENTRY DATE: 2001-12-06
gttctttgtgcttacatgatactaggtcacccaagtgttgtttttaatgaacgaggtgagcgagagaaactacttgtggagtcagcagaaaactttgtgaaggaattcgaactgctgattaagacaatacttgatgggtcaagtggtgcatgcatactgaaacagccaatactagatgatctgtctcctggatcttctaattatcaggaatcttctgccgttgttgctgatcggaagaaattcagatctcagttggcttcttttgacaaagcttggtgtgcctatctttaccacttcgtggtgtggaaagcaaaagatgcaaagtcactagaggaagatcttgtcagagctgcatgcaaacttgagctatcaatgatgcaaacatgtaaatttaccgctgaaggccaaccagagaaccttaatgataatttaaaggccatccagaaagaggttatggtagaccagacacttctaagggagaaggttcggcacttgggtggtgaagctggtattgagcggatggaagttgctttatcagaagcaaggacaaagttttttgaagcaaagggaaacaggagccccttggcaacaactataaaaaatgtagcagctacatgttcttctggagaatctcctatttctgacatgaaggagaattccaacattaatgataaaaggccaagtcaggctgtccaatctatgttcagagttccctcttcaccatctgaaagtaacacagcaggcatcaccatgagtaatccaatgacagtgagcagcactctgtcagaaaaacggccaacagagaacgagcagatggtcaatgagattcttcatggttttctagctgacagctctagtaatattgggactgttgagggtggtttcaaggaaaaagtaagggaaacaatggagaaagctttctgggatgtggttgtggattcacttagaggagacatgccagactacagctatctggttcagctggtaaaggaagtcagggatacattgtatgagatggttcctaaaggttggaaagaagaaataatcaacaatattgaccttgaaattttgttgcaggtacttgaatcgggcacccaggacatgcaatatttgggacagattttgcagtactctctgggtatgctgcgaaaactatcctctcctgcaaaggaagacgaaatgaagagaagccatgacaaattattgggtgaattaactgaacactctgagtgtaataacagtggttcaaattcatttgtaattgctgttatcaaaggtttgcgcttcaccatggaagaactaaaggctctgaagacagaagtcagtagagcacgtatccaactattagaaccaattataaagggctcaggtggagtggaatacctgcagaaggcttttgctgatcgctatggattcccgtccaatgcatcagttgctctccgttcaactgctcagtggatttccacatcaaaagataccgtggaagtagaatggaatgagcatgtcagctctttttcagctctgccagaaaccgatcatgctcagccatttgttgccaccctccgatcaggtcatggagttccagatcagcgacagtctacaatacctgtgtcagatgatacggggctaccagagtgcacggggcaaaggcttgaccagctaataaggattgggttgttacagctcatcagtggcatagagggtgtgcaaatgcagtcagtaactgagaccttcaagctcaattggttgaggctgaggtctgtacagagtcaattccagcaagtgattgtaattgcaacaagcatgcttgtgcagcgtcaagttttggcgaccgacgacccaaacatcactcccacagagctggaaagcgcgacatcacaactgttcaacactctcgcagagctactggacaacttccccgacgttagcaccgccaagatcatggaggtgatgctccgttcgtcgtcgtcgtcgtcatcaggctcgacaaccggctctccatcagatgaaagaaccgagagcaggaagcagatactggccagggtcttcctcaagagcctccagaccgatgaccccgtcttcaagaaggtctcccggtccgtcgactgtgcgttccgcgcgatcaccctcggtggcagcggtgccaggggacggaagctcgccgacgccgccctgaggcgcatcggcgcgacgaagctcaccgaccgggtggtgagatcggccgaaatcctcatcagggccgcgtccatttcacagcaggtccacggcccttggtacaatcacttggtgtgattcatggtggaaaagctagtgaaaacggcgtcgtttgagcaatctgaaccgctaagcgttcgtgtgaagaaccgaagatctcgtcttgtttacttgttagtagtggcaaggcagatggtagattggtacgtgagcaatgccctgctgctttgtgtgaataaataaaagagatggtactgtactatgcttgtatctgaaatcctgaacaatgtgtgcgtgtgtggtggtgttcatacgtgtgatcaaatctatgcttgtatatatacgaaacttaaaaatggtttcatc

SEQ ID NO: 16374 - DNA, 2136 bp, Oryza sativa
  ref <308>: DATABASE ACCESSION NUMBER: AK066870
  ref <309>: DATABASE ENTRY DATE: 2001-12-06
ggagtatcgcgttaaaagaaaaagaaacctctcgttgtctcctccgctcctcgcctccttgcgccgccgccaagacgagtcgcggctgaacagggggagggccgggcggcgatctccatcgcagcggaggggaggggatcctggtggttcaactattgtatagcagtatgttggattgttgatgttcagaattttgatatcctagcacgattccccctctcgccgcctcttgcccaaggagaacgtcgaccacgccgtggtccaggctctcagcatcggtgccactattatctgcctaacgctacacgtccagggtcatactggatttcaagagaagaaaaaaggttgttcaagaacataaaaaagggatgtgactaggaagcataaatggactgcggtgcaagcagcttaaacttgtcattcttgcttttttcatgatgtttcttctctggaaatgggagagaggaacatactacactactgaaatcctccggccagattcattgattttggctcatccagctaactcaaagtttgtagatcagcatacatcatccgaagaagactttccgaatgcagatacattgacacaatcagtagttaaagtagaacagcaagtaagtgatgcaccaccaccgatgtccatagcaagtgattctgctgatgttgcggatgaaagggaaccaccgccttctgggaagaaagattgtaactacggaaatggaaaatgggtttctgacaacaacagaccactatactccggtttcggctgtaaacaatggctttccgagagctgggcctgcagactaacccagcgcacagattttgcttatgaaaaatttagatggcaacctgaaggttgtgagatgccagaatttgaggcctcacagttcttgacgagaatgcaggataaaaccattgcttatgtgggtgattctttagggaggcaaatgtttcaatcaatgatgtgtatggtcactggtggaaaggagagactagatgtggaagacgttggtgcagagtatggttttttcttagctccgggtgcaaaaagaccagatggctgggcctaccgattcccaagaactaatacaaccattttataccattggtcgtcgacactctgtgatttggagcctctggatccatcagatccagccaccagttatgccatgcaccttgatcgtccacctgcttttctgaagaataaccttcacaggctccatgttctggttcttaacactggtcaccactggaaccgagggaagctaagggcaaacaagtgggaaatgtatcttgggggagcaccaaacactaacaggaatactgctgtcatctggaaggccaaaaatatcaccatccacactgttattaagtggttggatacccaacttcctcaccacccacaactgaaggtgttctacaggtcaatatctcctcggcatttcttcaatggagattggaacaccgggggtcgctgtgataatacaagtcctttggccaagggaagtggcatttcccaaaatcattccgatgacgccgatgccgagggagccgtgatgggaacaagggtgaagcttttggatataactgcactatcacgattgagggatgaagggcatatatcgcggtacagtatcaaagccacgcagggagttcaagattgcttgcactggtgccttcctggactaccagatacatggaatgagatccttgcagcccagttgtagctaagtctctagttgaatgagaagagctaatggtcagaaccaacttagcttgagttgttatatacggcgattgctagtcttcacaacagagcttttgtgctgctgcgagaggaacagcaaagcagcagtggattctttaggaagctttcgttcctgtagctaatgagcttcttgtaatgtagtaaccaccttttgtattttcttactgtgtatggccattgaattgattggcagtaacggagtagtcttatagataagttatttacgctcttggaaatgcgttttgtgattaacattctgcgatgagcactcatgttttgtttctctagcagtattatactaatacactaggtgatacctcgcactttgctacggaatttattgatgaatatatgttaaatattat

SEQ ID NO: 16375 - DNA, 404 bp, Oryza sativa
  ref <308>: DATABASE ACCESSION NUMBER: AK066871
  ref <309>: DATABASE ENTRY DATE: 2001-12-06
gagggcgtgtgtgtggtttgaggagaaggaatctgatggagcgggaaatttgcagagggaaggtgaactatatgtggaaaacctctctgcaaaagagagataaggaggtagggatgcagagaggtgctccagggacccgtatgccgccgggtcaccggatctgcaccccgccgtcttccgtctccgccttccgtttctgcaccgtaatgatgctgcttgccgatttgactgcgaataggagtagatttgactgcccgattgattgatagatccattgtttaccacagaaacaataataatactctactactactcctacatagtaggagtaccttgcctattgtatgatactagaagtagtaaattgatggtacaggataatacagacttataaatttcttatt

SEQ ID NO: 16376 - DNA, 3332 bp, Oryza sativa
  ref <308>: DATABASE ACCESSION NUMBER: AK066872
  ref <309>: DATABASE ENTRY DATE: 2001-12-06
gagagtcgtccatgacggctccacccacctgagcagcacgcaagctctccccaccaccaccaccaccaccagcagcagccaagagcagcaagaacaagagcttggccctctacttcttttgcaaggtcagctgcatcgattcaactgtactcctccctctactttgctggtgcagtttgcaggaataacaaataggaaggagaggaagtgcaagtacctaacatacagactgcacgcaagtacgtactcaactacagaaagggacgaaggagaggggtaatgagcacgcttctttccaagctagcggagctgctcaaggaacaatatgatctgcagaagagtgtgaaggagggggtaacatttctcatggctgagctcaagagcatacaagctgcacttgaaaaggtctcaaaggtgccgctagaccaacttgatgagcaaaccaagatctgggcttgggacattagggagttgtcctatgacatggaggacaacattgataccttcatgctacgtgtggatggtcttgagccagccaagaaacataatttcacatgcttagttgacaagtgccaaaagtctttgtccaagataaagatctgcaacaaaatagccaatgaaattaaagatatcaagagccaagtaaaggaggtgatggaacgacgcgataggtacaagattgatgatgtcgctactaacctttcaacatttgtggatcctcgcatcttaacattatatgggaatgtcacgaagcttgttgggattgacaaggcaagggatgatctaatgaagagattgtctgtgggggatgaagcgctcaagaagctcaagatggtctctgttgtcagaattggaggattgggcaagacaactctttccaaagtagtgtttgacatgcttaaattgcaatttgattgtgctgcttttgttcctgtcggtcaaagccctgaaatcaagaaagtcctaaaggacattctagttgaacttaacaagcaaaagtacatgtcatttgatgttaccgcagtaagtgaaaggcatatgattaatgagcttcgagaatacgttgacaataagaggtacttgattgttattgatgatgtatgggacacatcaaaatggaacattattaaatgtgctctgattgatagtaattgtggaagcagagtaatcacaacaactcgtatttgtcaagttgccagtgaagttgctgaagaatttggtggtgtttacattatggaaccactttctgatgacaactcaaaaaagttattctacagtagaatatttggttctacctacaatggttcaactggtaatcaatcggtcgaggcaaccgaaaagatcttaaagaaatgtggtggcataccactatctataattacaatatctagtttgttagttgataaacctgtaggagactggtctgcaatttacgactctattggttttaggactagagatcaaaatgaggcagttcagaacacaaggaagatattgtcttttagctactatcacttgcccacatacctaaagacatgtgtgttgtacctgagcatatatccagaagatcatttgattggaatggatactttgatatggaagtgggtagccgaaggctttatccaggaggaacaagataaggagttatttgaggtcggcaagaggtactttattgatcttatcaataaaagcatgatccagccaatagaggaagagggcagtgtgtttggctgccgcatacatgacatggtattagatctcatccaaaacataacagccgaaggaaacttcgtaaaaatattcaagaaactacatgaggtgtgcaggctgtcttcacagaggactaatgttcgtaggatagcactgcacgacaattggaaccaactcaaaaacaatgacctggacgttgccctgacacaattgaggtcattcaatgccatcgagtgtactatcagcatgatgccctctcttctgagcttccaggttctacgcgtgctagagctacaaggctgtaacgtcacgggaggtttatacctcaagcatatcggaaagctacgtcagttgaggtacctaggtatgaaagacacacgtgttgctgagcttccgatggaaataggggatctcgtgcacctgcaaacactggatgttcgttacacaggcctgaaggaactgccgtcaaccatttgtaagctaagcaagctgatgcggctgtgcgtcgctggaggaatgagcgtgccgatgggtgttgggaatctgagttcactgcaatacctaaagttgggctgggattccatcaaaagtaacaaatactttgccatggaggtcggcaagctgatggagctgagaatcctcaacatttgtgtagataacgagattgacgagagcatgaagaaggctttgctagaatcactgtgcggcttgcgtaaactccagaacctggtgatagattttgacttgatattttggaatacgatgagcgtctgggaaggctgggaccattgggagcccccgcgtcagctccgtgatttccatatatccagcatgtacctgcctcggctgccggcatgggtgaaccccatgtgcatcccatacctatccgatctgcaactttatgtgatagccatggaagcacgggacctggacatgcttgcaaggatgccagcactccgcacactcatcctaagaacccggcagagaatttcgtggacagttggtggtaccggactgtttccgaacctgagattctgtgagatgaacatagcactcacatttcttcaaggagccatgccgatgctcacggagcttcaattcgagctgtgggccgctgaagatggtgccgccgctggtgatgttggcttggggcaactccctctgctcaattacattgggcttctcctcatgtgcaccggtgcgacgggcaggcaggtggaggaagcagaggtggcgtggaggcgcatggtgaatgctcacccgaaccgtcctgccactgttgtgcatcgaattggaagcacctgatgaaagaaggtgatgatgatgaggagatttcagctagctaaggatcacattgacgagaatggtgacgacgagaattcagcatatttggaccaagaggtgctgcacttgcatgtgtcgtgcatacctattcgatcctggtcacgcgatattacatgatttactgaccattggttaatttgttgcctgtttctatcaaatggtagagggggagatatactgtgaatgttgacacattgtatagagcctttaggggaccggtatatataaggaagcctacgatacaaatcaatcatatcctaataaatacatctctgact

SEQ ID NO: 16377 - DNA, 2630 bp, Oryza sativa
  ref <308>: DATABASE ACCESSION NUMBER: AK066873
  ref <309>: DATABASE ENTRY DATE: 2001-12-06
tcattctatgcatttggtcttggatccgctagctacatcaatggtatcaggttctccaggcccagaagaatgaaggaatatgcagagtgggttcagaaattggaaaatggagtgtggagccatgagtctggcaattctgggataaaggacatggcaatggacgtggtgatgctatcactgagaacagcatggggcctagatgtgcaaagtttcagtaaaaccttcggaaggagtctgacagagtcattgtgcaacacatttaggccttttgtggagagtgggcttgtaattgccatggatatggaacggcgagctttgcaaccaagtgaatttgagttggacttgcaacatgatggtgagaatggaagcagagttgccttcatccgtctgagtgacccagatggttttttgttgtccaatgagttgatttcacttgcatttggaattatttcaccataacaaggctacactttctttacatcggtatcgatctttttcattttattactttcatctgaccatactggtaactatctagtctgatcttagttttccaggtagatattagctaatcgctaaaatgcttagcatttctgttcaagtcagtgcaaactgaaactcatattggttgagagagaactgttacaccatttgcataaatgcaaatagatggttatctagtatgttcttattttgtttaactatatccatgactccatatcactcctcccttcgtgtatatatttctctgcattctcttattatcagttcatttcatacatatgagttaaatctagtagattgttgctatttgtttatttatttttgttcatacaagcatacaacaagtttactgtttgctttttgtatggcagttttgggtgcattggataaactattgacgatgaattaatttttgttttcttagggatgattgtttcagtacttggttatagtttttaggatttattttcctggtgtagatggaaaaatatttggggcaacaattttttgaactgaactgaattgagagcttcagttgtatctcttgatttcgtagtatttttccaggcctactatgtacgttaaatctaagcatttattgaaattggcagtgcatgctcctaaacatttttgtgcttttgatgtgtctgtcactattcaatagtttcgactactgcctcatgaatctcagttcatagacctaattctgtgtgctacttgtgctaagtatttttttttaaaatgatcacctttgaatgaaatgttgtgtctgtgctgatagtttgtgctagatttaaatggcaaatttcaaatactgttttaaattgtcatttggcaagctagttttcactcattgtgcctcatcacgaggagaagtcctcatgttcctctaagttatcgctcaatcctttctttacccctaagtatatcatgattttatacttaacaaaatatcatgattttgtacttacccgttttattagtcgactattagaatttttttagaatttaccatactgcccctctccataacaagaaatgctagcttcaacaaaaccataatccttcaaataaaaatattatcagttatgcaaaaaatcaaggggcataattttagtatttgttttgcctcatatgaaaccgatatctgattttttttaatcaacattatggaaaattgaagaaattactgacggaggtgatgttacacaaatcaccagatgttcagatattttcacctagaatatgaaaaacaaaatcagttttttatttctcagtgaattcgaaccaaatttgtttcccttaaaatttggttgatatcgataataaagttctaatcttgattttaaagtttgtttgaattttggaatctggtgatttgggtaatttcacttaaaaacacatcaactgaatcattttgttgtgaaggttttagttttcgaggaaatcttatcaattattattacaacatagggcaatataggcatttttataaagtctactggtctatgaacaggatggataggtgaagggtaaaaagagagactcatgatatatagagaatgagccaaactcagaagaataaatgaaaggaagcgagtaaaagatcgaagggtagtgtagatgccacatattgacggcaagttcaactcctcatgagctagagttcaagcttgggtctgatcaagatagccaccattaaactcaagctgcagcaggtgctgctgctgcagatggcttggtaagtggcaacgctactgtgctatctgcctgagctgctggcagcattgctggggcatgagtcatagggcgggttggtgtttgagtgactttaaggttaatcatttgaagaacgtcaaggtggcagtgcaagtgcactattcataaacgctaatatcttgcacggcaaatctgatgttttgcaaagcttgataactgttatgagctataattcaccctgagctttgcatgtcaaatattgataaagctagttaattggattatatccttttttggaactaaatttttaatgttgagtaagttgttgccttcactatgctttggatgcgaagtattgttttgacataagctttctaagttttaacactgaagttgccattcacttt

SEQ ID NO: 16378 - DNA, 1154 bp, Oryza sativa
  ref <308>: DATABASE ACCESSION NUMBER: AK066874
  ref <309>: DATABASE ENTRY DATE: 2001-12-06
gacctcaccacggcgccgcagctgcagccagccagcagcgagagcaccaagaagcagcggccgcaagatacttccctccccacgtccaccttcccctcctcctttatttctatattgtcttcttcttcctcctcccttgcttgttcctatctccttctacctctctctctccctggctttcttggtctcctgctcttgcggggcgtttgttggtttcttcgcgggtgaggtgaggcggacatgaagaaggctaaggtggtgttggctcagccggcggcgagggcgccgccgtcgccgctgctgccgagggcgccggggcacagccgtgcggcggcgttggtggcggggaagaggcgtacagggcgagggccaagtacaagaatcttctccaggactacaaggagctcctcgaggaaactgaagcaaagaagaagagattacagatggagaagctcaagaaacagaggcttttggctgaagtcaagtttttgcggaaaaggtacaaatccatgtccgaaaatccatcccagacgtttgtctatagagtaaagaatccggcattgccgcccacattgcggcaacctggttggtctcatggtgaagagtaccacacggttcgggctatcggaagctctagcaaaggcccatcggcgcaccggaggctgaatgctgctccaagagcatctccggtgattgacctcaacgaggcctgcgagccgagttcagaagagatggaggagcttcatggttaccaggaacctgttagggttggcagggtcatgaggtacccaatggagggtgattttgccgccggtcctagtgatgcgaaaatggcggcattctgggatgtccggaacgccgcctcctcccgagctgggaagaggaagatatcatggcaggatcagttagctctcagagtataggttaataataacagtgttgagatagttgggaagaggaactgaatttcgttcatccctgttcctcgagttgtaaaagaatccttaagaggaatcggtggatgggtgtaatgctcctggcacttgttgagatcgtagtcgtgtataatcaatcacttgtctgttttgttagcgtgaatgccatctcaacaactactctagggctaatagtatttgagcaaatgaataattaat

SEQ ID NO: 16379 - DNA, 3142 bp, Oryza sativa
  ref <308>: DATABASE ACCESSION NUMBER: AK066875
  ref <309>: DATABASE ENTRY DATE: 2001-12-06
ggattcaatgtcctcctcctcctcctcttgctccccttccacttcctgggaaaaagcctcttgatctcccactctctctcaccctctccgcttccagccgacttccgccctgcaggtaaaggtttcagcaatgaggcaagatgttgcctccaaatgcgacagccgttctcggtcaggagcagctcctgaaatcatgcgatcccctcgccgcaccatcggagaaaatggctatcgggacacaagacaccaccagttgaaatgctcagatggcaacctgggagagctacgcgtagagagcatcccaaatttccactgcaagagcttgcccacaagaagccgcaagaccaatgcggaggatagtattgtgggaaagcgtggttctatgtaccagagctctagtgaaattagcatgataagaaaactccacgaaggcaggaggaagaaaatagattctgcacttgacggggatgcatttctgtcatttgagattgttgattcatcctcccagcctagcacaagtggagcttaccttttctcgcatcagaatcgccgctcagaagctaagtcttctgtggaatctcgtagaattcatcgagcatcgagggacttcctggatctttcattccgtgagcttcctgatgagaattgtaggctggaccgtccacgcatggattgcaccctgttgaaaaatgatgcaggcgatggtttcttggagatctcacttgaggaagagatgaccaaaggtccctgcagaaatgcagctcctcagttgataggtggagagtcaagtaaaggtacagaagcaaactgcctgcaaaacaagatcagtgtatgtcccagtgagaataattgtagtcagagagagaggaattcaacaaacagtttgcctgagtccatgtcggccaaggtgagcatctctgatggcacccgtccatcagaaagtgttcgtcatggcatagagaacagcactaaagttcgatcaagccccttcaagaagattctggaccctattatgaagtccaaatctattagaagtccatctctcatggaagactccaaccatgttactatgccggttaacaggaaaaattgtgtatcccgcaaatcattgctgagtgatttatcaaggagtgaacaaagccaatcaattaattgccagctgaatggagaaaggcagcatacaactaatgctctatcacctgctcatcttcaggcggttcttaaattggataccaagaatggtattccagtttttgagttctgtgtcaagggccctgaagaatccatttctgctaggagttggaaaacagggaatgacttgaactggatttacactttccacagtggtggaaaacgagcaagtgctactggaagggcctccaaagatgggcgttggtgttcaccgccgattgtaggccagatgcaagcttcttcgtacttgtgctctgaagttggaaaagatggtgttctgactaactctgtcatcactgagtttgttttgtatgatatcgctcatgcaagacagagcttttctgctgaggagaaaactcaatgtacagagactactcaatcgacattgtcaagtgccgtcgagaaatcagcctctggtgactgtccccagaggattaatctgatggaccagcaaaacagtgcaagaaataactctgatgtatcaacatcttgtccgtggtctgaagaagatctttatcctcatttggagattgcagcaacggtcatccaagttccatttaatagaagcaagtccaaagaacttaagagtggtttgtcacctggtactgtaaaagtgattacaccgagtgggctgcatgggttaccaaacgatgatgaaaccagtccatcacctttgctggatagatggaggtacggtggaggctgcgactgcggtggatgggacatggcttgtcccattgctgtccttggcaatgcatatgataataactgggccaattctgtcacaaaggaaggcgagaatcctatggaactctttgttctggtacacttcacttctcctatctttattttttgtgtgaaatcactttgggctatgcatgctctggtttctaagatacttggttgccttcctgctaactctccaaagataacccaaggctgatcgagaacttcttttaagaaagattgatcaaattttccaagtgttagatttgctcctcctagagaactgcccttagacccactttttctttagtgtagtaatcttttgttttcgttgtgagctataaaatcatatatgttaaccatatggctcgctttagtaatgcctatgagtttataggaagaaaatcgatagccttgaggcttattttgaagatcaaggaaacaagacagacatttgacccttaaaaccattgtcagtgacgtatctaggcttattcagtatatcgacgattcatctctgttttcatccatgtattgatcttagtccaaaaatgaacaagttgtcatattcttcgaacagggtggcaaagaagagctccctgccctttccattaagggcaacgagaaaggacagttattggtgcattttcacgcgcggttatcagcaatgcaagccttctcaacctgcatttctctgctgcactgttcggaagcttcgacagccgtaagtattgagaagggcaagcacaagctctactccagttcacttaagatgctgctcgaggaggaagtgagccagctgatcgaggcagtcacggaagaagagaagaggaaaacaaagaagagaagtgagaagccacccagaccagttgtgctcgacccacccttctctcccatgggaagagtgtaggtattgtgaacaactgtgttctcatggtcatggtgtgcaacattatgagtcatatttgggtttcatgtccatattttttgttgtgataaaagaagcacttttatgctgttcataaagatggaaggtgcgtgtagggttttttcttatctctttgtagcttttagcagatcagtagcaaggcaatatatcattgttgaattgccagatagaaggaaggaattctgtagttagtagtagagggcaatggcaggttccatgagagaggacataaataaagggaaacagctggccacttgaaaattttagcctgcttcc

SEQ ID NO: 16380 - DNA, 1005 bp, Oryza sativa
  ref <308>: DATABASE ACCESSION NUMBER: AK098972
  ref <309>: DATABASE ENTRY DATE: 2002-08-28
ggcacaatcggtcagtcgcacagataacaccgtagtatcagacaagacctcatctcagtatccagccgagaggaaatcaaaggaagagaaggggaaaagcaatggcgggcaaggacgacgacgtgaaggtgctcggcctggtgatgagccccttcgcgatccgcatatgcatcgcgctcaagttgaagggcgtgagctacgagtacatcgaggaggacctcgccaacaagagcgagctcctcccagctccaacccggtgcacaagaagatccccgtcctcatccatggcggcaagcccgtctccgagtcgctcgtcatcgtgcagtacgtcgacgaggcctgggcgccctcccccacgtcgccctccatcctccccgccgacccctacgaccgcgccgtcgcccgcttctgggccgcctacgtcgacgacaagatggtccctggtatggttggcgttttgagggcggcgacggaggaggagagggcggcgaaggccgacgagacgctggcggcgatggcgcagctggagaaggcgttcgccgaggtggccgcgaagaacgggaagcccttcttcggcggcgacaccgtcgggtacgtcgacctcgcgctcggttgcaacctgcactttctcgaagcgatccgcaggttgcacggcgtggcgttggtcgacgccggcaagaccccgctcctggcggcgtgggcggagcggttcgtggaggtcgaggcggccaagggggtggtgccggacgcggacgacgccgtggagttcgccaggaaagtccaggctcgtgtagcagctgctgctgcttccaccgctgccaagtgagtggaaaatcgttttcgattggatcattgggtttcttgtaataaagaaaaaatcgtgttattacagtgccattttcaagtcatggttagtttatttgtggggttattaatgtgtaaagtctggacatgtatgcgtgttatgttctctggttcatcgatcataagcagctatacagacat

SEQ ID NO: 16381 - DNA, 2491 bp, Oryza sativa
  ref <308>: DATABASE ACCESSION NUMBER: AK066876
  ref <309>: DATABASE ENTRY DATE: 2001-12-06
gggagatggcggcttcatcggacttaccagcaatctcattcagcagctcttcttattcaatcctgtattcgaggatttatcgctcgccattatttctcagttatcaaagagcagaaagctgctttggtgatacagtccttgtggagaaaacggaaggttatcattcttttccaacaatacaggcaagccactgtggcaattcagtgtgcttggagacagaaagttgcaagaagagaactaaggagactcaaaatggctgcaaatgaagcaggtgcactgcgtgaggcgaagaataaacttgagaaaaagttggatgatcttactctgagactaactctggaaaggagactgcgggctgctggtgaggaagcgaagtcagtagaaatattaaagcgcgacatactgatagaatcattaagtgccaaatgtgctgctgccaagtcggctgctcaaagcgaacacgacaaaaatctgctactccagaggcagttggatgattcattgagagagataactatgttgcggagtagcaagattatgacagcagaagcagaaagggagaactccaatctgaagaacttagttgaatcattgtcaaagaataattcatcacttgaatatgaactcacctcagctcgtaaaggtagtgatgctacgatgaagaaattgaaagacgtagagggaaaatgcaaccatctccagcaaaatttggacaaattgcaggaaaaacttacaaacatggaaaatgaaaatcatgttcttaggcaaaaggcattaaacatgtctccgttgaacaatatgcccatgactacaaaggcttttcctcagaaattcgctacaccgattgggcttccaaatggcgagcagaagcacggatatgaaacaccaccaccagcaaaatatctcgcttcacttccacagagtttaactagatcaaggagaaccaggatgcctgttgaaaggcaggaggaaaatcatgaaatcttattacgatgcataaaggaaaatctaggattcaaggatggtaaaccagtcaccgcatgcattatctacagttgccttttacactggcgtgcttttgagtctgagaggactgctatttttgatcatgtcattgaagccataaataatgttctcaagggggaagaggctgacggtagattaccttattggttgtccaatacctcttcattgctatgccttctgcagaagaatttacggtcaaatggattatttgctacaccatcccgcaggtctggtggaactctagggattggtgacaagatagtgcaaacactcagatctccttcaaagcttatgggacgcagtgataatcttggacaagtggatgctcggtatccagccatattattcaaacagcaactaactgcgtgtgttgaaaagatttttgggcaacttagggataatctgaaaaaggaaatatcaccacttcttagtgtctgcattcaggctccaaaatcatcacgtgcacagcctggaaaagcaaccaaatcacctgggattggtgctcaaccaccatcaaactcccattgggacaatattgtcaaatttcttgacctgcttatggacactttacatgaaaattatgtgccatcattctttatacgtaaacttatcactcagctattctcttttatcaatatacagctttttaacagccttcttcttcggcgtgaatgctgtactttctccaatggggaatatgtcaaagccggtctgtcattgctggagaaatggattactgatgccacggatgagtttgcaggaacatctatgcatgagctaaattatatcagacaagctgtcggatttttggtcatacatcaaaaaaggaagaagaagcttgaggagattaggaacgaactttgcccgaacttgagtgtacgccaaatatacaggatatgctcaatgtactgggacgacaaatacaatacccaaggaatatcaaatgaggttgtttctgcaatgagggaggaagtaaacaaagatactcagaatctcgtatcaaattcctttttattagatgacgacttatgtataccgttttctacagaggatttgtcaattgccatccctgcaatagattatgtagatatagaacttccagaatctcttcatcactatgcatcagtacagctcctactcaagcatcatgatccacagcctgtctaatagtatggttggggttgccttgaagattcgtttatttttattcccaggttttagtggcgttatcttttgaactgttgtatggttgttaggcttgtagtcttaagtttatccgggggtgaaaaggttgtaacagaaatggtaggatgtcatttcaaagcaacaattgtttctaggtgaaaattaaaccaccgtggaccctgggtgtccacctgtcctatgttcagatcatcagatgtacatagtgttgtagagactgttaagcatttgccatggaaaaataactatcttctgctgcgtc

SEQ ID NO: 16382 - DNA, 1063 bp, Oryza sativa
  ref <308>: DATABASE ACCESSION NUMBER: AK066877
  ref <309>: DATABASE ENTRY DATE: 2001-12-06
gatctcctcctacccgccctgctcccgtgctgccaccaacaacgcgatcaccagttcaccaccaccgccacgcgcgcgctgtctccaaacacagacgcataaaccctagcaagccaacacggaggaagagcgatcgatcgagcagcggagaaagcttcgcctcgccaccatgcggcgatcggagtgggaggaccggtggtgcaagcggcacccggagcaccggctgtccaagggcgtgtgcccctactgcctccgcgaccgcctcgcccacctctccgcctcctcctcggccaccaccacgacgcgcgcctcctcctccgccgaatccagcggctactcctccggctcgcctccctgctacggggccctctcggccgacgtcagctccgtacacgtggtcggcgccgccggctcgtccttcgccaacgtcgccgccttctcgcagccgctgatgccgagctcggttagtcggaaaccagccggaggggggcaagaagagccgggaagggaggcatctggtaaggggaagcagcaggaggtgaagaggaagaagagcgggaagaagaagaagattgggaggttcctgtcgaggctcgtcggagcggagaagcggcggcaatcaggggacgccgatggcggcgatctcttccattccaagaccatgaaggagaagacggcgcacaagtgggtatttttctgatcaaacgttgccgccaccgcatgcaaactatggatcgtaaattccatgcttggttgttattcttgcctacctttttttttaaaatttttagggggctttcactctaaactattctcaagtatttttgtgtttgattttgactttttttttaaaaaaaaacaagaagaattttgggatcctgtatgtatacgagcagaagtttataattattaacctgtcaatgatttgtacttgaccacaacgggggattgcaaatcgttactctgtaaagctagaaaaatataaggagacagtgtatacgggtgtaaaattaggcatctgtacagtatcttgtatagtttcaattataagtttcatttctcg

SEQ ID NO: 16383 - DNA, 2936 bp, Oryza sativa
  ref <308>: DATABASE ACCESSION NUMBER: AK066878
  ref <309>: DATABASE ENTRY DATE: 2001-12-06
gaggtgacgacgagaccgggcggcggcggcggctgcgttgcgagttgcgacgggcggcggcaaaagcgagcagcaagggcgcagccgccgaacggccgaaggccggccgcaagcggcggcaccgatgcggcgtgggcactgccgcactgggtaggccataggaaagcagcagcaaggcagcaactagcagagcagcaagcgctagcgatccagccgatccaaatccaagtgccgagcgcgccagcgcgattagcgatggagaagaaaacaacattgttaaactttcaactgatgagagtaaaaatcaaccaaaaaggcctcaaatattcaaaaaaattgatgatgatgcaatcatgaatagatttcaagcattgaaaacccgcagaatatcattgcctcgtaattcaattgcaggtggctgctcactttagatggttgatgctttgatgcaaatatgcaatcactcatttcccgttggcaagattcgccgccactggtaattgatatctccgcctatggagcgttttgggtttgtgcaacagggtaaggttttacggtgggcccgtgcaaccaggttagattatgtagtgctggtttaattttccttaattattcaactatttttgtattatcaattgattatcaaatgctatttgttcaaattagccctagtatactctcgtttgttatatgatatacacttgcatatttggatatttgttatatttgttatgtggcttgttgagtatacaatatgctcctcttataataagctaccatatgctgttcctggttaagctgtccatatagtggagtcgtcgcttatgctagttttttccttccactgcttagaactcttacgattgagaggttatccacatctatcataattaaacacttatacctgttgttaatattgtttattacttatctcgactaattcctgaacgagagttaaatatacatataagtgtttgaaattatacataaaaatttcgggagtgaaaagttgatatgagaggctccttggctttagcctaagccaaatgaaaatatatagaagcctttccaaaaagatttgaaaaattaggaccgcttttctccattcctctttaatagtatatatacatcatttctttgatttcttctttttctgagaaaatattctaaagaaataaaattttgcatttttcttttataaatctggtgccgcgcatactctttccttctaaatagtaatgtacttcttactgtcctgtttatgctttcttaaaaaattaattagaaattggtaccgtacgatccttaatttgcttttagtattatcacgttcttgaaaaaagaactttttttttggttttgtacgtacagtaagacccatcgtttcaaaaaatcaaccagtttgaaaaggacaagatttaatttctttaatctgaaaatgttttattctggaaaaggatttattttattccggaaattgattatttaaaatctgaaaaataatttatttcaaaaaataagaaaactttaaaagatatttctgaattttgtttgatttactttcgctttctggttttagtttttattttcactagttttcagttatttctgtattttcagttaacctaactcaatcaatgagactatccatttgttcgaagttggtggtatagttacggagctgcacataggattcaagctaaccccaagtagaaacgcatcacccctgcccctgacataaatgagaagtgtcatattcatcgtcaataactgttatgttcgtctgacggcgacaattaagtgatcgttaaggcatcttgttcatgatcttcgaaactggaggaaggaacttttgcccatatgtatcaagaggtggcattggtggccatccgagaactttgtcataggtatagtgagctcttgagggacacctattattgttacgatccatctatggcccacaatgatgagtacaacaattactggaaccagagacggagaacaattctactacttcctccgtcccagaatatagcaatatagaactagatgggacatcacctagtaccgtatctggacatgctctactacttcctccgtcccagaatatagcaatctacatgtccagtacatcgtactaggtgatgtccaatctagttctcggttgctatattttgggacggacggagtatgcaatactttgtgaggatgttgagtgcaatggacaatggactgatgtaatgataggctgatagcggctcatgaataggagaattaatgacaagtgtatcaagatctgcagaggacaaaaccagatagatcacttgaaggaggagctggcacaactgtaggtagaagcatcccctagaggagctagctaggatccgcaccacggataggaagggttcatcttcctccatgcttacagctggcatcattgcatcaagacctgcgtgttgaataacaataatgttccacttaggatcatttccccatttatgcacaacattaattgttggtgatgaagaagaagattccaaataggcaagaggacgcttagcttcagatgagccattcagttgtggaattgggtgaaacagaggatgaagagatgtctctctaagtatgactcatattgaagtccttctcctcggtagaacgtgtgcctagtatggttgtgttagtttgcctgttcgtgtgtgtgagttagcatgtggacaatatcagggttgtgatatagctatatgtattaagttgttaatttgagtgcgagagttaaattagagtttgagtgtgtctgaatagttaaatagtaaattactccctttaaaacaactagggaggtagcctgcgcattcgcgcgggcatgtattataaattgtgtttgaaaaacttatatacgtggaatatcaattgaatgacacctgccatatttc

SEQ ID NO: 16384 - DNA, 2361 bp, Oryza sativa
  ref <308>: DATABASE ACCESSION NUMBER: AK066879
  ref <309>: DATABASE ENTRY DATE: 2001-12-06
gagcggaaaaggaaaaaaaaaacttatctcccgtcgccgcctcccggagccgctcgccgcctcctcgcgagcgcccgccggaccgccgggtgccgccgccagctccgagcgctcacccgccggagccgcgccccctaccccgccacctcctcacgcgcgcccgacgctcgccctaccccgctgctgccgcctcctcgcagccgccggtgagccgggtttgccgtctgctggggccttctccaccgccgccgccgcctcctcgcgcgcagcctctggagatctggggtcgccgtcggccagctcctcctcgcgtgcgcccgcccgggatctgtggtgggttacggcactacgtagtatagactccaggttaaggcacagggaggcaacaatccaatctaggagagatgggatgggatcccagctcaagggagccctggcggcagctacgattgggaggacctaagccctacagccaagctctataatcaacccccttttgcttactggcgataagtcaaccaacttccaatgatgcagtcaatagtttctgatcagtttggagtagtctgtgccatgttgctgtgataatgctacaggttgacttcaagcattgggctaaaaactaagattatgtaagttaaataacatatatgccgtcattttcaatttaagtgatattgtgtcaatcttctgatcaactgtttacatcttcggattatatagattcatgtcacctgtgtatgtcttcggaattatctatgtttatgttactgtgtatgtcttcagatttatatatatttaggtcacctgtgtatatcttgagatattccgtaattgcatattattacagatggcaaagatgcttaattctatttttttactggatatccttcagcgatatgcccctgcccggccttgtcagctgatatggcatacattcctccaggctgcactcacttacacttttactgtagattgatagattaatgttcctttgtcaaggtgaaccaatcagctaatgatggttcatatagttctgatttgagtgcaactatgtatccactatgatgtagaattgtgggtatttacagatgcaatttaaaaggtatgccacttaggaatcgacactcaggcacatgcacctaggcttgatgggtaagtctggccaatttacatatggggaacacaaattaatttaatcagttattccaatttattcttctttgtttctatgcattgcaataccaatttgagtgcctatcttgtcatgctattcagcataatgtcttggcaggctatgcatatgttcatgcttatatatgtagcattcatataagtaactattaattggattgcttgctttgtctaatgcagcctcaccatttcatttgtggcgagtaccttaattccatcttgccattatcgagggagtatatcatctgcacctaattctgtatatagagtatttattgactagggtcttggaaatttttgaattgctgtcagatgcaagttcctcagattgatgatttgattagtttcacagctaataccattgatcacagctaaacaccacttatagaagtttaatggatttttatctaaaaaggggaaaaagggaagttaataactgaaactgcatagtagtactatggtctctgaacaaagaaatttgttgagtttcctagcaactgctgggtgcattttcctcttgttatgtgtgcctaaccttccatccattaaatttcaaaagtgcaaattctttgtataggtattactgggactcaaatgtacacctttcagttcactctcaattttgtttctgaattgtgtgtctgctgatgcttgcttctgaattttgtatctgaaggcgaatcattgcttctgttttatgtagtcctcagcttgagtaagccaggaaattatgcactgtgttgtcaaaaagctatgcactttgttattaggagttgtttaaataataatggatccccttttgtttccagccttggagatcatccaggttctcagggggtcaaccctatcaacatatattttttaatcatttcaggaagagaaatagagaattattgcatgcattcctttgatatcaaagattgggattaaatttccagcttaatcctgacagccgcaatgtgtcttgtgcaaaaggaagcaaggctgcaactgaaacacggtgaatagtaaataaaaatctcgcttttaggaaaaaaggtgcagcagcttgaagcattaaaaaagaagatggcagcaaacagatgtttgctttattgtattcaatacttggatattccactgtgcttcccaaattgagctgaataaatagcttgacgaattgttctc

SEQ ID NO: 16385 - DNA, 2858 bp, Oryza sativa
  ref <308>: DATABASE ACCESSION NUMBER: AK066880
  ref <309>: DATABASE ENTRY DATE: 2001-12-06
gacacccacatctcgcctcctcttcctcgatcctttgtcttcttgcttagctagctctgccatggtggggagctacgcggcgggagggggacggggagcggcagtggcggcggtggcggaggggaagctggacgagctgcggcggaggatggggaaggcggacggcgacctgctgaggatcgtcggggtggggggcggggcgtgggggagcgccttctgcgcgctgctgcaggacgcgtacgggcggcaccgcgacaaggcgcaggtgcgggtgtggcggaggcccgggcgcgccgtcgaccgcgccaccgccgagcacctcttcgaggtcatcaactcccgggaggacgtcctccgcaggctcatccgccgctgcgcctacctcaagtacgtcgaggcccgcctcggcgaccgcacgctctacgccgacgagatcctccgcgacggcttctgcctcaacatggtcgacacgccgctctgcccgctcaaggtcgtcaccaacctgcaggaggcggtctgggacgccgacatagtcatcaacggcttgccctccaccgagaccagggaggtgttcggggagatcgggaggtattggaaggagaggatcagaccccccgtgatcatctcgctggccaaggggatcgaggcgtcgattgaccccgtgccccggatcattaccccgacacagatgatcagcaatgcaagtaagttctttgctctcgagtgagtttgattatcatatccatttttactaattagtttcaattacagtatcaaatcgattattcggttgctattttactactattttcgttgatcgttgtacttgtgtccttgtgggaataatggacacataaagaaaaggtagttgctgctgaactgggaccaagatacatacctccagaatattcttgataaaatgtgcaggctattcttgatatgcacctaatgtgatgtccttcatgtttattgcaattattatacccaacacaatgtctattgttgaatgttatgagagctagttaaggccttcagtatgtgcccatgtgctatgtttctttgcaattcctttaggggtaatgcatcttatttttagcagagtttatccaaattagtacccagtactgcacgttccgtgtcacgtttctacccagtattaacttctgatatgctcctaagtttttgtttcactgtataattgattttaccatccactggtcttcatctttcctaccatgttgtagcctttaatgttttttgtttcttatgatgggcctattgcagctggagttccattggagaatattctatatcttggaggtcctaacattgcatctgagatatataacaaagaatatgcaaatgctcgcatatgtggagctgacaagtggagaaaacctctagctaaatttctgaggcagcctcattttattgtgtgggataatagtgatctcatcactcatgaagtaatgggcggcttaaagaacatatatgccattggtgctggtaagttccatggtctcatatctgacgttttatgtccatatcaccttgaaaatttttaactgggaaaataaaaccatcatgtggcttttcttgttgaagctcacacacaatgcttggcaaaagtatgaccagttcaaacaacgaagccataaaattgttatgtttgcataatgctgaatgctatctgtcctgtaggaattgtattcagtatacgttgaattgctattatctcttatgtcaaacgcaatgctgctttgacacttcatcaaacctatcatagattagaaagagtaaatcaggtcatcttgggtaatgaggttcccctatgcatacatattcgttataaccttctgcattaatatagaggatcttgatttaagtcatgttgttaaataccttgttatcttgtaggtatggtggctgcactaaccaatgagagtgcaaccagcaaatcggtttacttttcactttgcacgtctgaaatgatatacatcacccatctcctagccgaagaccctgagaaacttgccgggcctttattagccgatacctatgtaacactgctgaaaggtcgtaatgcatggtatgggcagaaattagctaagggtgaactgactcttgaaatgggggacagtatcaagggcaaagggactatccaggttggtgctaccttcttaatgatgtaaatctttccatacttctgggtgtgtttttggtgccgaatagccatgtgctaagatttgctgtgattttatctttagggtgtctctgcagtccatgcattttatgagctcttgagccagagtagcttaagcgtgacacatccagaagtgaagaagcttgttgctccggtcgagctgtgcccaatactaaaaacactttataaaatcctaatcaagaggttggtcagattacctttgttgctgttcctgctagtactaatatatgtgtacaggcttaagttctttgcacatttcacctgcagggagcttgccactgactccattctccaggcaatacgagatgaatcaatgtatgatccacgggagaggattgagatgtctcagcgccagtgtctttaccgaccatctcttcttggcctacctaaagtagatattacccaggcttagatctattcttttttttttttctgcagatttgttttgagatttgcaggattctttgatgtattctttgcatagtggtcctcaagatccttccttgtgtgccaagtgcatctcgtgttcgaacactgattccattctctactagagaatttgataatgaggtgttttggttttttattgtcagagttccaaatagtttcacgggctgatgccccccacatgtgt

SEQ ID NO: 16386 - DNA, 1662 bp, Oryza sativa
  ref <308>: DATABASE ACCESSION NUMBER: AK066881
  ref <309>: DATABASE ENTRY DATE: 2001-12-06
gacctaaaaccctcgagccatgtcgctctccactgtcaaccacgccgccgccgccgccgccgccgcagcggggccggggaaatccttctccgcggctgcgcctgcggcgccatcggtgcgcctgccaaggacacgggctcctgctgccgccgcggtgtccgcggcggctgtgggggcggaccgcgcggcggacagggtgtcggcgctgagccaggtctccggggtgctggggtcgcagtggggcgacgaggggaaggggaagctcgtcgacgtgctcgcccctcgcttcgacatcgtcgcgcgttgccagggcggagcaaatgctggacacaccatttacaattctgaaggaaagaaatttgctcttcatcttgttccatctggtattctccatgaaggaacgctgtgtgttgttggcaatggagcggtgatccatgttccaggattttttaatgaaattgatggtcttgaatccaatggagtcaattgcaatggaagaatattggtctctgaccgggcacatttactctttgatctgcatcaggctgtagatggacttagggaagcagagcttgctaattcctttatagggacgactaagagaggcattggaccatgttattccagcaaagtcactcgaaacggactgcgagtctgtgatctaaggcacatggacacttttggggataagcttgatgtcttgtttaaagatgccacttcaaggtttgaaggctttgagtacagcaaaagcatgctcagggaagaggttgagaggtacaaaagatttgcagagcgcttggagccgttcattgctgatactgttcatctgttgaatgaatctatccaacagaagaagaaaattctggttgaaggtggtcaagcaacaatgttggatattgattttggaacttacccatttgtgacttcttctagcccttcagctggtgggatatgcactggccttgggattgccccaaggtgtattggtgacctgattggagtggtaaaagcttatacaacaagggttggttctgggccttttccaactgaactgtttggagaggaaggtgatctccttaggaaatcaggaatggaatttgggacgacaacaggccgcccaaggcgttgtggctggcttgacattgttgcactaaagtactgctgcgagataaatgggttttcatctcttaatctgaccaaacttgatgttctgtctggattaccagaagttaagctgggggtttcttataaccaacctgatgggcagaagctacaatccttcccaggggatcttgatactctggagcaagtacaggtcaaatatgaggtgttgcctgggtggcaaagtgacatttcgtctgtccggagttacagtgaacttcccctagctgcccaacgctatgtcgagaggatagaagagcttgttggtgttccagtccactacattggtgttggacctgggagggatgctctaatatacaagtaaaagcaactccatttggtcatcaattgaaccaaaatatttcagccctaacttggccttgagcgacgctcatcagtatttaccgctatttcgttggtacctgtaatacatgggaaaagctactgactggtaatgtgatgcaattgcctgcaataattctaagaatcttccaagacgcc

SEQ ID NO: 16387 - DNA, 1355 bp, Oryza sativa
  ref <308>: DATABASE ACCESSION NUMBER: AK066882
  ref <309>: DATABASE ENTRY DATE: 2001-12-06
gagatgcaccgcctcttactcgctctttctcctcctcctccccgcctcctctccgctttctcctcctcgcaccgctcctctccgccttcttctcgcgtcgcgccgccgccttcctcgcaccgtgcctctccgtcttctcctcgcgccgtgccgccttctcctcctcgcgccatgtcgccaccctctacccacacatctgcgcgcccacgacctgactcctgaggcctcgatgacggaaggctaatgggagacacaagatggatgggatctggaccgtggagtggttgagatcgacgggatcaatggctggattgatttgcttgatttgattttttttccatgaatcatgctctacttgctacttgttgtggcatcatcaaattttagtccttcatcccagttgctttttcattcatcatgtacagagttctttttttgcaattattttttgggctgagttcggtctttgaccgagaccaaaccgaattaaccgaagaccgaaatactctatcttgagttttcttgaagaccgatcagtcttgtgatcgtaaagaccgaatttttcaaaagactgaagaacctaaccgaaattttcggttagaccgaatgcccacccctacctccccctctggtcgacctcccccatgcctgccctactgcagacctgggaagaagaagaagggaaggagaagaaagggaaagaaggaagcggagggaatcgaggtgaagatggaaatgaagggtttgattaccgctgcccatggaggctttccccctgttttggttttctattagggtttagatcaagtgttggaagcgagtaagtttgggatccaccgatttattcctcagccaggttttcgctgatctgccccctgcgcagttctgttttggatgccttttcggccaagataataggatttccttcgaaaagtctctatacaaaagttgtaaataacgtgtagatctatcttctgaccaaatggcatgattttatatcaagtggtttaggaggtatcaatttctgaagttggctgtctgaatgtcgatgcatttatctgtagtcgaggttcagagggatttttagaggatcttaatgatggaatccgagaatcttgtatttacagaagttgtagcatatgttgtgatctacctcctacataaaaattgttagcttttatcttgtagtttgttgtcagtgctcttttgaatggttgttgcacagttttctgggcagatgcacttttctgttttgtgccatgttttaggccagctaaatggaagaattcagttttgttatctaaatgaaagttataactcttgttctgtagatgtcagaaatgatatattttgct

SEQ ID NO: 16388 - DNA, 1042 bp, Oryza sativa
  ref <308>: DATABASE ACCESSION NUMBER: AK066883
  ref <309>: DATABASE ENTRY DATE: 2001-12-06
gccctgggtgctgcaaagggaatcctctatctacacaccgaagcagatcctcctatatttcaccgtgatgttaaggccagcaacatcctcctggactccaaatttgtagcgaaagtcgcagactttggtctttcaaggcttgcgccagtaccggatgtcgatggaaccatgccagctcatatctccaccgttgttaaggggaccccaggctaccttgatccagagtacttcctaactcacaaactgacagacaagagcgacgtgtacagcctcggcgtcgtgcttctagagctattgactgggatgaagccaatccagcatggcaagaacattgtcagagaggtgaacacggcataccaatcaggcgagatcgccggagtgatcgacgagcggatatcctcctccagctcgccggagtgcgtggcgaggttggcctcgctggccgtcaagtgctgcaaggacgagaccgacgcgaggccgtccatggccgacgtcgtcagggagctggacgccatccggagcgcgctgccggagggagaggagctcctgccggagtacggcgatcagtcggccacctccacctccctgacggcgaccgggccgctgtcgtcgtcgtcgaccacgggggccctcttcatctcctccggcagcggcggccacgccaactccaagagcggcatcccctccggcacggtggctccccggtagcgttgcgtgccgggctaacgtaacgtttttttttctccttttcgcgtcgtcgggtgtaaaatggaagggaattttcttccggtgtaaattagctgtatggtagtagcacgtactcctgagtgagtgagtgagtgagtggtcttgctgctgttccaggtgatttcttggtctttacagtgggtgatttggccgctgttgtaattaacccatagatgaatcatgaatcatgaatgcttgcaaccaacgtttagatcctgtttggcgagtttaaattttaagaagcggttgtttggtggtcaactttttgagaacctataagagtgaagttactctg

SEQ ID NO: 16389 - DNA, 2132 bp, Oryza sativa
  ref <308>: DATABASE ACCESSION NUMBER: AK066884
  ref <309>: DATABASE ENTRY DATE: 2001-12-06
gattaattattggagagtgcggtctcctctcctccctccctgctcgcgctctcagtctcccccatccccaatcaccttactagcttagtagctttgtgaatcaatcaaggccagggtttgatcagatcatccttccctcccatttgcccatgccttggctttgatccgaccaggcatggagggcggtggcacgaggacgcgccgtcgcgccgccaccgcgagccctggacgcaacaaggtctgggtcgagccaccgggcaagactcatcacctgcgctcgccgcccccgcccccttccccgtcctcctcaaagagggtggccgtcgtctactacctctgcagcaatcgccatctcgaacacccccacttcatcgaggtgccactcgcctcaccggacggcctctacctgcgagatgtgattaaccgcctcaacgtgctgcgagggaagggcatggcggcaatgtactcatggtcgtgcaagagcaggagctacaagaatggcttcgtgtggcacgacctatccgaggacgatctcgtcctgcccgcgcaagggaacgagtacatcctcaagggctccgagctcctcgaccgatcaccgccagatcgacagcagaatggcgttggcgagcccaaggttgagaccctcaagcaccctccagaagagtcccctcattcgcgaggatcgcaagaagggtgctcctcctcatcatctccatctgctgttacaaaagaggcctccccaccaccccctacaccacagccacagcagcaggcacaatcggccacgttgctgccttcatcgtcagcttctactaaccgtgaggatgaccaatgccggactccgcgctctggctcatctggaaacatgtcccctgaaccggcaggaagagttgctcctccattatcagaggcaagctctccaggacctttagagtacagagtttgcaagcccatcggagcccaggacgcatccacacagaccgacgacagtgagagggatgctcctgagaggaattctcgtatggcaggagtatgtacagagaatagtacatcagattctgagattcaggaatgtcatccaaggagcacacaaccatctccaaagggtcctggagttgttcgagaatcaccaccggtgtgctcctctgacgcttctccaggtggtagagttgagaccttggagtccctgataagggccgaagccagtaggaggagtagctttagggcgctagaggaggaacatctctttgccccaatgggtgtaaagttcaagcctgccaatttgctcatgcagctgatcacttgtggctctatttctgttaaggatcaccggagctttgggctcatcccaacatacaggcctcggtttacacaagttgagtttccttctccaatgttctctactcctttggcattgcgacacctcgacaacattccttgtaatgctagaacaattggaatgagaattccagaatcagaatatttcagtgggagcttggtcgagacaaagaagcaggatgagtcagggaaaggaggaacaccaacacttaaacgctcatcatcttgcagtgaggacagagtctgtagagtatcggattccaacagggacatggaaagtatggctgaatcaggcagcttcagatgtctgccacagacaatcaaaatgatatcatgtaagcaatctagaagtggaacaatattgtctcccaactcggatgtgaggaacagctgtagtcgacaagagtgtagtactagatcctcaccacttggttcatcaaaaagtgcaagcaataggatgactgatttatcacttggtaaactatcttcttcaagggtggaatcattccatgaggaaaaggagaaggtgatcaagatagaagaaagcttgcttctggagctcgggttataatccaatcttcacccttgtgtgaagtgagtgatgacagcactgaatcactgtaaggggctgtgattttgttttccttttgtttttctgtgagctggctcattgtaatttggtgtgtgtctcaatagttctgggagtagcttcaaagtgcaattttattcattttatgacatgtgtgatattcagcaatcaatttattacaccttcacgaagaatttattgcctc

SEQ ID NO: 16390 - DNA, 1225 bp, Oryza sativa
  ref <308>: DATABASE ACCESSION NUMBER: AK066885
  ref <309>: DATABASE ENTRY DATE: 2001-12-06
ggtttttccgaaaagatcgcgaggcaaaagaccaaccgcctgtgctatgagtgaggaactgaagcgcgacttcgagatcggcgaggagattgggcgcggccgcttcggcgtcgtccaccgctgcgcctcccgctccaccggcgaggcctacgccgtcaagtcggtcgaccgctcccgcctctccgacgacctggaccgctcgctcgccgcgctcgagcccaagctggcccggctcgccgccgcgggcaacccgggcgtcgtgcaggtgcacgccgtctacgaggacgacgactggacgcacacggtcatggacctctgcacggggcccgacctcctcgactgggtccgcctccgctgcggccagcccgtgccggagcccgacgccgccgccgtcgtcgcgcagatcgccgaggccctcgcgctctgccaccgccgcggcgtcgcgcaccgcgacgtcgaagcccgacaacgtcctcctcgacgccaccggggacgggccgccacgggtgcgcctcgccgacttcggctccgccgcgtgggtcggcgacgggatcagcgccgaggggctcgtggggacgccgcactacgtcgcgcccgaggtggtcgccgggggcgagtacggggagaaggccgacgtgtggagcgcgggggtggtcatgtacgtgctcctcaccggcggcgcgctcccgttcggcggcgagacggcctccgacgtgttcgccgccgtcctgcggggcaacctgaggttcccgccgaggctgttctccggcgtgtcgccggctgccaaggacctgatgcggcggatgatgtgccgcgacgtctacaggaggttctccgccgagcaagtcctgaggcacccgtggatcgtgagcggaggaggagcacgcgatgtgcagccgacctgaagaatccgtatcagatttccaaataatacggcttcttgtgtatacgcctttgtaaatgcgagtacgcctacgagagaggaagatgcattggtagaagaagtagagagtggagagtagtaacactgtatacatccaaccaggagtggtgaggaggaggaggtcgctagcctctgtgtttttttcgctctttcttaagccctttttagttgccgctttttgcctgagagaagaacgcttgcttgtgtaatgggagtgctgctgtgaatactaaccctgcttgtataattaagatcgttaataaaaatgagagtggtctctcc

SEQ ID NO: 16391 - DNA, 911 bp, Oryza sativa
  ref <308>: DATABASE ACCESSION NUMBER: AK098973
  ref <309>: DATABASE ENTRY DATE: 2002-08-28
gatcctcctccctctccccgccgccgccgtcaatcccgaatcccgagggctcgggtggtcgtcgtcggtccgggatggcggggaggaagcggaaggcggaggcggcgcgggcggcggaggaggaggccgaccgggcgctctacggcgccttccgcggcgccgccaactcgctctcgcagctctacgcgctcgccggtgcccaccagcgcctctccttccacgccggtgagcgccacgccttggaaaaactctaccagtggatggtgcgcagatgaaattggcttgaggctcacagtatctgacatagcatcccacatccagcacgagattgagtatggaggtgacaatgcattaacttcaccgagatcgcaacacgcattccagaatctccaagctccaatgcacatccccaacacaagcacgcagcagccgccatcttgttcaatcacaccatcaaacccttccaaggactctatgatattttcgaaagcgctatccagccctgtccggcaaaacctgcaactgtaccatgtacagcaatgcggtgacacaggatgctttgcagatggcattttttgccctggaaacggtgactcggatcctgcagcatcaaatgattcgtcggtggatatgcattcagatagcccaggtcatgactcatgagccctgattcctgaatgagcaattaccattttccagtttgattccatgaactgcaatcaacaaacttgaagtaaagaagtggattgccctcacgcaatctgggatctcaatttaatccctcacccaagttaacttgtaatttgtaactagctattgcccagttacctcagattataacgtgcacatatatatcatccatgtatgtactttcagattatataatagctgacgtatcagttttttactgt

SEQ ID NO: 16392 - DNA, 930 bp, Oryza sativa
  ref <308>: DATABASE ACCESSION NUMBER: AK066886
  ref <309>: DATABASE ENTRY DATE: 2001-12-06
gggtctcctcggctcccccacccacccatgtctccttcctccttcctccaccacccacgtctccttcctccttcctccactccctcctttctccctcctagccttctccctcccacctctccccagcggcggccggttgtggcaaacggagaaaggttgcggccggctgcgccctctcgccagatatgggggcgacggcagtggcggggaaggggcggcggctggctgcggcaaagggcgacggtagcggcggggaagggtcggccggctacggtggcaggcgatgagtccggcgaagagctctccttctccctcccacctctccctagcagcggccggctgcgccctcttgccagatatgggggtggcggcagcggcggggaagggatggcaaccggctgcggtggcgggcgacgagtccggcagcaagctccccttctccctcccacctctccccagcggcggccggctgcgccctcttgccagatctggggcaacagcagcggcggggaaggggcggcggctggctgcggcaaagggcaacgatagcggcggggaagggacgggggccggctgcggtggtgggcgacgggtccggcggtgggctctccttctccctctccctcctccgctgccgctagctgccgtcgccaccaccgccgtgggctgccgctagctaggggacggccgaatccggtcgccgcgatgtcggggaggccggatccgccgccgccgacgacctgggaggccggatccgccgccgcgacgacctgggaggccagatctgccgctgacgccgacgggggcagcgccgcgacgacttcaaattttttttctgatgcttgaatgcttgggtgaatggaaattttttaatgtaaattgttgatgtaattttctgttgatttttgaatgcgtggttaaatttctgcg

SEQ ID NO: 16393 - DNA, 2348 bp, Oryza sativa
  ref <308>: DATABASE ACCESSION NUMBER: AK066887
  ref <309>: DATABASE ENTRY DATE: 2001-12-06
gatccgtgtgcgccgccccgcacggccgcgccccccgtcctcgcccccgtcgccgcctatatcaccgacgaccctgctttgctttcctcctcctcctccttctcagcgcgagttagatctccacaggagagaatcccaatcgggcccctcctccgcccctctccctctcccccctcaccgtcggcctgccggcgacggtatatcgaatcgagtgctggagcagctctccatgcaggaatcgtgaactgctggtctgttttgctggaccgagacgattgctttgcttcatgattcttgccgatgctgaccgtgttgcattgattggaccggggcatgggaatctctgaatctgaatgagtgccttccattagagtgaacatggactcaagagttggagtggtcctattcttcctgctctttgtccttgtccgcgatgtctcagcggtcgctgagacagaggttggcgttgtgcgcgtcgtgcaggaagcgcctgataggaagcttgagggcgcaggcgggcaggatgggttcaagagcgggaaggtgccggtgtctacggtcgcgtggtcgacgcttgcaatggccgctgccaccggtttgggtgctctgccattctttttcctggagctagaggcccagtgggcgggactttgcaatggactcgcggcaggggtgatgttagcggcgagctttgatcttgtgcaggaagggcaaatgtatggcagtgggagctgggttgtgtttgggattttgagcggagggtttttcatctggctttgcaagaagtttcttgagcaatatggagaagtaagcatgctcgatataaaaggtgcagatgcaagtaaagttattcttgttgtcggaataatgacactccattcttttggggagggctctggtgtgggtgtttcctttgctggctcaaaaggattctctcaaggtcttttagttactatagccattgctgtacacaacatacctgaaggcttagctgtaagcatgttgctatcatccaggggtgtatccccacaaaaggcaatgatatggagtatcataacatctttaccacagccaattgttgctgtccctgcattcctttgtgccgatgcatttcaaaaggtgcttcccttttgtactggttttgctgctggatgcatgatatggattgtaattgctgaggttcttcctgatgcttttaaggaagctgctccatctcaagttgcttctgccggaacgcttgctgttgctttcatggaaacattgggtacagtgcttcagggatttactgatggccacaactcagaagatacagcaggctttttggtatcacttgtatttggactaggtcctctttttggaggaattgtacttgttgcattctctcttactttcagcatgccacaccctcttttgactggtgtagcatcaggcatagccttccgtctcgcagcatggagacctttacaacttctaatgtcatcgaagatgggtctatttaccaccttattcctcctaattggaggttctctcatttaccatgtcgccacatcaaacatccttcagctagttaaccgcaagaaatcttctgttaatgtaattacatcatcctcaggcctctcacttagtgtcctcacactgcaatcgctccttgcttgcggttctgtcttccttcacgcatatgctgaaggtcttcaacttggtgtggctgcgcgcaaggcttatggtctagggcgctacatggttcttccagtttcccttcatggtctaccacgaggtgctgctgttgcgagctgcatatatggtgccactgatagttggcgggcagccttggcagccgctgctttgaccggctttgcagggccaagcgctgccatcagtgcaatcctcgcgaagattgactacagtggactagactactggatggtcattgcctgtggtgctttgattccaagctttggccgagtcttcaaacgctcgctaaggttggacatgcggaagagcatctgtgggcttttgataggtttcgcctttgcctctgtatgcctgatgtcgaccagattcatttgcttgcacactccctactgcaactcagctccagaagcagtcacataacctttcttttctttgctggtacagttgtagaacatgtaatatcagtgtaatgatgatacaggaatggaaaaattattaccgttcaggttgaggaattcccttgtatgaacaaatcaaagggaaataggcatggaatatataccggtttaatttttgtcttttcacctgttcgtcctgaaaccgtggattgttgccaaccttgaaagaaaaaaaaggtggtgtgcaagttctggttt

SEQ ID NO: 16394 - DNA, 1600 bp, Oryza sativa
  ref <308>: DATABASE ACCESSION NUMBER: AK066888
  ref <309>: DATABASE ENTRY DATE: 2001-12-06
gctcctcctcctcctcctcctccttccccaaccactcgcaaccaaaggcgcaccaaaccggagccaatccgagcgctccggcggcggaggcggcggcggccggacctactcgctgccgtgggtgggggctgggagggagcgggctggtggctcgtcccgtccgcgatggactgggcggcggcggggtacacggcggcggcgctggtgtgcgccgcggcggccaccgtcatcgcgctcgtgcacatctaccgccacctcctccactacgcggagcccatctaccagcgattcatcgtccgcctcatcttcatggtcccggtctatgccgtgatgtcgttcctttcccttatcttaccagataattcaatatattttaattctattcgagagatttatgatgcttgggtcatctacaatttcttttcactttgcttggcatgggttggaggtcctggtgctgtggtggtaagtttgaatgggcgaaccctgaagccatcgtggtttctgatgacttgctgttttccagctattcctctagatgggcgttttattcggagatgcaaacaaggctgtttgcagtttgtgattcttaagcctattttggtggttattaccttcatactttatgcgaaaggaaaatacgcagatggaaactttagtgtcaagcaatcctatctatacattactatcatatatacagtctcatactcaatggcactatatgctcttgcggtgttctatgcggcatgcagagatctgcttcggccatataatcctgtcccaaaattcatcatgatcaaatcagtagtgtttctcacatattggcagggtgtcctggttttccttgctgcaaaatctcggtttatcaaaaatgctgaaaaagctgctgatctccagaacttcgtattgtgtgttgaaatgctcatagcagctattggccacctatttgcatttccttacaacgagtatgctggtcccaatggtcgaccttctggtgatttcaagggaagccttctgcatgctctgaagttcaatgatttctaccatgatactgttcatcagtttgcacctacctataacgaatatgtgctgtacaatcacaatgagggagacagcactcaaaggaagtatccttcagtgagtaccgtgccatccgggcgggatgtagaattgtctggcatctctgtgatgcctgcgaacagtgcggtgacatcaagcgtatcgtcaaaccaggcagatcaggaagaaacaatgagcaccccaatcaaggacagagttgataatgtagggctttacgacctgacagacttgcttgatgtggatttgtctaactacccagccaaggttcctgcaatctctgatgtaagaaaacaatgacattgtgatggcctttggcgggtggcaatcggggaaatcgagttttccgtttgatcatagataacgctgtaaaaatgtgtgtattacttcccattgaagggagctattcatgtcagcacctgtcttacggcctctctgactcgctcttttcgctaactgtaaaatgttgtgagcttaaagtgaattgaaagtgagtaataccatatctgcatttactgatggc

SEQ ID NO: 16395 - DNA, 1524 bp, Oryza sativa
  ref <308>: DATABASE ACCESSION NUMBER: AK066889
  ref <309>: DATABASE ENTRY DATE: 2001-12-06
atggggttttgagagagggaatgggttaggtgagtgctgttcctgcccccaagccgacgactttcgtcctcgatgcttgcgtcgcatctcgaatacaccgagtgtacgttgggagaagtacagatatgcagagggatcgcggagttgacccgtattgcatgcaggcagctgctgcttttcttgcggcaaccggagctggtgctggcctcgccaggttcaggttaatggtcaaccaccaccaccactagttgcgctactgagacagagcaatggaggagggggcgaagatcgggagggagcacgagcagcagcagcagcagcacgggagggtgaacggtagcgggagggtcgcggccgtcggtggcggcagcggcggtggcggggacgagattgagattgaggtcgccgcagccgcaggggcttcgccgtcgcggcaacacggcggtctgcacggcgatgtccaggttagtttgttcttcttcctttcttcctcctctgctaggctgcctgctgtcaatttcttcttctctcctgctgtccgcacaagtaggaagcaaaccatgtgtagcacgattgcctcagccaattcagacatctgaggaatatccgtttgattgatttctgaaatgaatatgtacggttgatgatctctatgtactctgctttgtaaaattagcacagacttttcctcaaacggggatagaaacaggcactaatcaaaatttctgataacaatgaggacttttggctttgctagaatattttgtataggaaatctgttggctcgaccgtagatcgtatcatctcttcgtctggttacaaaataatagaccctttttgtggtatattacttagttttgccatggtttgattattcttcgagtagttggcaaggatgttttcttgcaataatgattatcaaccgacatcggttaggcatgtttctcttgggcttcaatttaggagtaagccgtattccccaaaaaaaaaatttaggagtaagccaattcaactcactcgcgtattgccgagttgagattttagtgtcattcctttcacgttggtgtagctgactttgtattatgacttattctacaatatgctatcaacaaatgttgtgttctacaaaataccatcgacgaacatgaatttcacaatataatatcagacaatggcttttctttccttttataccgtcatttgtcagtgacatgttcttttctctatttagtgccgcaaaagtacagttcacccctactataacatgggttcaacaaaaattgcgagggtgtctcggtcttgcaagtggtagaaaacaagagtaatctttggtgttccgcaggagctttggcacttcaaaagctcctcagtgggatggctaacctaggcagttagcgctcctcggtgtggtcttgggtgcgtgggtctcggtgggagggctcgggtcctcctactttgtaaatattttctactttgttttttcttccccttaatgaaatgaaacacaattctcctacgttttcg

SEQ ID NO: 16396 - DNA, 2358 bp, Oryza sativa
  ref <308>: DATABASE ACCESSION NUMBER: AK066890
  ref <309>: DATABASE ENTRY DATE: 2001-12-06
ggtcttcttcgccgcaaaaaccacgccgccatcacagcattcgtgcatcccacgaaacccccgttgtcatgtccagataagagctccacctctgactcacacacacatcaccgagaagcagagcaagtgcatctccctctcccaccatttgattcgattcccctaaacccccgagtcgtcgacgccacaaaccccggcgaccaccatggcctcctccctcctctcctccccaaaaccctcctccttctcctccgcaaaccccacctccactccacgcccacgcgcccaaactctctcccccttccgcgccgccgccccacgcttctcccatggcctcgccaccgccgccgccgccgcaaaccctagcgcctcccgccgctgctaccaccgcgccttcgcccgccccgtccgggcgtccatggcgcagccgcggcgcccggagtacgtccccaaccgcatcgacgaccccaactacgtccgcatcttcgacaccaccctccgcgacggggagcagtcccccggggccaccatgaccagcgccgagaagctcgtcgtcgcgcgccagctcgcccgcctcggcgtcgacatcatcgaggccgggttcccggcctcctcccccgacgacctcgacgccgtgcgctccatcgccatcgaggtcgggaacacgcccgtcggggaggacggccacgtgccggtcatctgtggcctctcgagatgcaataagcgagacattgatgctgcctgggaggccgtgcggcacgcgcggcggccgcgcatccacaccttcattgccaccagcgagatccatatgcagcacaagctaaggaagacgcccgagcaggtggtgaccattgccaaggaaatggtggcctacgcccgcagcctaggctgccctgatgtcgagttcagccctgaagacgctggcaggtcaaacagagagtttctatatcatatactagaggaagtcataaaagctggagcaacaacactcaatatcccagacactgttggatacactcttccttatgaatttgggaaactaattgctgatataaaaaacactccaggaattgaaaatgccattatttctactcattgccagaatgaccttggtctagcaaccgcaaatacattagcgggcgctcatgcaggagcacggcaattagaggtgactatcaatggtattggtgaaagggctggaaatgcttctttggaagaggttgtgatggcaattaaatgtcgtcgagaactcttaggaggtctgtatactggaatcaatacccaacatatcactatgtcaagcaaaatggtacaagagcacagtggacttcatgtacaaccacataaagctattgtcggtgccaatgcctttgcacatgaaagtggaattcatcaggatgggatgcttaagtacaaaggaacttatgaaataatttctcctgatgatattggtctaacacgtgcaaatgagtttggtattgttcttgggaagctcagtggaaggcatgctgtgagatctaaactagtggagcttggatatgaaatcactgacaaggaatttgaggatttctttaaacgctacaaagaggttgcagagaagaaaaagcgtgtaactgatgaagacattgaggcgctgttgtctgatgagatatttcagcccaaggttttttggtcccttgctgatgtacaggcaacttgtggaacacttggtctgtctacagcaactgtcaaactgataggtccggatggagatgagaagattgcatgtgcagttggaacaggtccagttgatgcagcttacaaggctgttgatgatataatacagatcccaactgttcttcgagaatatagcatgacatcggtcacagaaggcattgatgcaattgcaactactagagtggttgtcactggagatgtcagcgactctaaacatgctttgactggtcactccttcaaccgggcattcagtgggagtggtgccgcactggatattgttgtttccagtgtgcgagcttacctgagtgccctgaacaagatgtccagttttgttggggctatcaaggctagtagtgaagtatctgaaagccaaagagttcaaaccacagaatgagtcttgacgctccttggttttcatatcggatggttctatgtttcacattcccagcaaggagtatgtgcttgttgaaacatggtttttccgtttagtgcatctggaggatgttctgggtttctttggtggagcctgacttaaggttgaacatccaggaagttttggggtatgtagtgtataattcatatttgaaaattgtatttccaataagacaataataaataattgtttgacatatgagtattgct

SEQ ID NO: 16397 - DNA, 1102 bp, Oryza sativa
  ref <308>: DATABASE ACCESSION NUMBER: AK066891
  ref <309>: DATABASE ENTRY DATE: 2001-12-06
gtcggcctatccgttccaggcttccagcttcctcacggagaactcctcggataggcgatggcggccgcggtcaccgcgccaccgtacgcggcgggggcgccgcgccgccggcttctcgccgctcgtccgcgcctacctcctcaaggccgtcaagaacaacaacggcaccggcgtgctcctcctctccgacgtcttcggcttcgaggactccgccacccgggacttcgcctaccgcgtcgcgtgccacggctacaagtaaatcacgccgcgccgcctctctctctctctcgcttctttcaactctcgttgctcgatcgttgcacgcagtgttcttgtgccggacttgttccgggggagcccgtggaagaaggcggagaaggacggcttcgacgcgtggctcgccgggcacgcgccggagcgggcgtcgggcgacatcgacgcgtgcacgaactggctggtggacgagttcacggcggcgggggtgtcgaggaagctcgggataatcgggttctgctacgggggcggccggctggtggagacgctggcgcgcgacggcggcggcggcggcggcgcctacagcgcgggggtctgcttctacgggtccaggatggacgcgtcgctggcgccgcggctcgccgcgcccgtgctgttcgtgtgcggcgacggcgacccgctgtgcggggtggagacggtgcgggcgctggaggcacgcgcgaggggcgccagggccgccgtgtacgccggcagggggcacgggttcgcgcaccggccgcagtcgctggaggacgacggcgacgccgaggacgcgttcgcgctgatgcgggggtggctgcacgaccaccttctcgcctgatcatccttgttccgtttcaaactgttcgctcgtagacattggacagggttctatttatactattgactatgttactgcttgtgtaaatgtgtaatgcacatgggcattgcattgcacttgagaaatgagtagttgagtattgtaagttcaatagtttcgtttcatgttttggagtcggagctttcaatgtgtcactctggctgtgacatatttctctccaaaaataacacgaaacctttttagttgtcc

SEQ ID NO: 16398 - DNA, 2936 bp, Oryza sativa
  ref <308>: DATABASE ACCESSION NUMBER: AK066892
  ref <309>: DATABASE ENTRY DATE: 2001-12-06
ggtcttcttcacgcgcacggcgcacccagatccaagcgtccatcgccgcggccgcatccgccatggctccgacggcgcccacggcggcgaagtccgcctccccgtcccagccatccgggaagagcgaggtggcggatctgaagcagcagctgcggcagctggcggggagccgcgcgcccgacgccgacgaccagcggagggacgtcttcaagcgggtgatctcctgcatgacggccggcatcgacgtgtcggcggcgttcggggagatggtgctctgctccgccacctccgacgtcgtgctgaagaagatgtgctacctctacgtcggcgtccacgcgcgcaaccacccggacctcgcgctcctcaccatcaacttcctccagcgcgactgccacgaccaggaccccaccatacgcggcctggcactccgcagcctctgctccctccgcgttcccaacctcgtcgagtaccttgtctcgccgctcgccactgggctcaaggaccccagtgcttacgtccggatgatcgctgctgttggtgctgcgaagctgtatcacatatctgccaccgcctgccttgatgctgacttgcctgcggcgctcaaagcgcttatgctctctgatcctgatgcacaggtgagttgccattccacaaacaatgttgtgattatcatgcaactatgatgctgctacctgttgcaatgattcattatctgtagattatagtgctcacaataccgtttaattaccaccgaaaagtctatgacatctgtagtgctgatttaaagttggaactggtagacaatcagtaaggatttaatacttcttgcatgccaatgtgagctgtaacttgaaatttggttcagcatgcagccggccaatcgttttctactttgcagtttgtctaatagaacaggtggagggaaatgcctaatgaagctgcatgctagtgatattaatcttcattgataatagtttgattttgatctgattgatcatataggttgttggtaattacttggaccgacatattttgtgatggaaagtatagtgacttaacattgctgaagtagcttgaagccttgaagtgaaaccacaatgctagtcaagacaaaactactgaacctagatacaccctattcttttaaggttacataatggaagaaatcaactctgaaccaatctgatcatgcatctatgtgggtttgatttctgggaaggatttggaggctattaggtgaattcatatatttttgctcaaaacattcttgttttggcttaggcttttaagatttcagccacaagttgaagggtagagtcataattttcttctggttattagttctatcatgatctttggcttttaaaagtccctgtggtaaagctgtctgttacttaaggcttagaatttttggtttataagccagcgaattagctgaagcaagcagggctcaacatatgaatgtggttctgggaaaatagataccatggtactcaaatataaccttgcaagaataagagtctgaacacaggtaaaaatggtactgagaggatagataccttggctgcctttattggttctgtttctaactcgctatccccattttctaccgctcttgtccatttttcattgttgcatgctgttgccaccttgagagtccctgcctcaccatgccgccacacctttgaagtgtacttttgatattctgtttgtctgctacattttacatgcgtatgatttataaattttggaacaattgtttcagtatttgccaacataaattcctacaatactattgatgtatatttctattatgtgcttaacatttctggaatgttcatgcataatatccacatgtattcatgaccatattcatattaaatctatctgcatgtaatttgtatttgatattatacgaatccatatcccaaactgaaagaaacattatataggatgtgaaaaacccatacatggccacattttacaagattgcagccctacattcagtattgttcctgactgcctgtataagatgctattcttctatacaccttttgaataaagttacacaactcttaatattattcagatgtgtacaacttaagaaattggtcacacactttaagtctcaaatgattgtaccttgtgagagtagtgtcagtcgtctcagccgtatgctgttttatatctaacaaatactccgcctttccactccaaatgcacgattggctatggattttctcacatgaacatataggagaaatactaaacactgcaatttgtttttggaacaacacaggagagctgcatgttatttcattaaggaggaaaaaacaaagtacacatggtcaagaaggaaatcctgacctgaatatacatattcacacacactaaacactgcagtttgtgcaattattctagattcaacagcattttgcttgtacccttgggttcttgttttctcacaatgccttcaacagtataatacaacataataggtttacatagtgttcactagccaaactagatagggtacttcagagatagtatttaccaagaattatattgcagttttttagttatatttaatgtttaaagacatctcaattttgccatttatgatttatcactagaacatattgtaattctttttgttccacgagtaatattggtgttctacccaaagtaattgaaaccacagtaggtgttgaactgcccaggtgtttggcttgctagtttgctggccaacagctggttcactatttaaatcggtcattggtggtcaagtgagtggtaaactcatgttatatataatactaataggagagtagccaggagcccaggacaataagccatggttggcaacttccacagctcctaggtggtcggacctcttggtatactagcatatttgtccatgcattatctcaattctc

SEQ ID NO: 16399 - DNA, 1460 bp, Oryza sativa
  ref <308>: DATABASE ACCESSION NUMBER: AK066893
  ref <309>: DATABASE ENTRY DATE: 2001-12-06
ggccgtgagctcgtgggaggagcaggcggcgcctgggcgacaacgaagccgccggaccggaccgcggaccacatgctgggccctctccgccgcgccgccgtggccgcgggcgcggcgtccgcgtcggcggcgagcctccggcagttccagtgcgcttaccatcgaagcaatgagagattactgccctgtcgagaccaagaagtttcatatggtcttaattgggctattgctggaagaggtgttgttgtaaaagataaggtcttctataacctggagaaatcggaacttcagaaaggtggtgctgcttacacagagtgcctgtctggcattccacttcatgttagaggaaatgtcattagcgggattcctgatgtttcaagagctcaattcgcaaagcttcttaaactggtgacctttcatctttcatcgatctcaagtctgtatgtccaagacggtgctgttggttcctctgtggagtgtgatgcaaaggtccgtgttattagcgataacccctctgctgttctgttgctctccaatatcctttggaaaacaccagatcgttctatttcccatgacacatgcccattgactatatatgttgccagctcgataagtgctaatgtcaggaattctcttggttctggatcacaatacgccaatggatttgcagcagcagacatagaacgctcgtcacttatcctatgtggtaaagcatttgctgattccgctatgctcaaaggtgctcttagtgctttgactgcccctgtattatcagcaaggggaggactaccatttcctgggtgtactgatgccctaccagcattatcaaagctttctccaggccaggctgcttaccatttcttagcaggatattgtgatggtaaatttatcccagcttacagcaaggacccctcccctcttgaccccattgccctagcaaattccttattttctcatctgaaagaagataatacacctacttatctgataaatgccaagagctctggaaagtacatagatggcaaggagttcgtgaggctaatagaggtgttattatcgaacaatctgccagaccgcaaatctgaagatattagagtgggggaattgaagggaaagtacaagagctttttatccagcaaattcggcaaatatttacctaaggagttctctttctgagaatcattatcaatgctttagtgtacatttaccacactggataggtttactgtctacatttttaacttgatctgggattgtcacccctttctccctcatctctcaagtctcaaccacaaaatacgttactaatacgttatgattttttttctttctcttggttttggcatggttaattaaaactgtgcctgttgtaaacgaattccaatgttgtgcacaggcatgcttgcttttgtgcacaggcaagaatttagtaccagcaggactgcagaagctttctgtgt

SEQ ID NO: 16400 - DNA, 1705 bp, Oryza sativa
  ref <308>: DATABASE ACCESSION NUMBER: AK066894
  ref <309>: DATABASE ENTRY DATE: 2001-12-06
gcctctcgctctttccgccgccctctctgctgcctctgcccggcgaggggcggcgcgatgaagcgcacgatggacgcgcggtgggcgcacatcgtgtacgcgttgttggtgccggaggcgttcttccgcgaccccgacggccgcgacggcgtcgcctctcgctctctccgccgccctctcgctatctccgcggccacgctgctttctctgcccggcgaggggcggcgctatgaagcacacgacgaacgcgcggtgggcgcacatcgtgtgcgcgctgctggtgccagaggtgttcttccgcgaccccgacgaccacgacggcgtcgactgcttgagctatctcgctctcttcgctgccctctggctctctccgccagcgtcaccgccacgtcatcttcaccgttgtcgccacctccctctattccgccggctctccctatttcacctccgttgctgtctcctctggtgtcaccgtcgccgccgccgccgcttgcctcatgtaggtaggtgccgtcgcctcacgatccttcaccagtcgtcgccacgacgagatcgttcctccctcctattcagccgccacatctcccagcgaggagctcgggaccaccaggtccggcgaccccgtcctccttacaggcggatccagaaacccggatgaggatgacagccgttaccacccttttctcctctttcatcttcacatgttagaggatccctctccatcttcctcagctcgctggcatgggagtcgcacatgataaggggtttcacgggagccggcagcgaccactgcttctgtgagaggaccgaagataccaccgctcaaaatagtgcatggctacctcgatcttggttttaatggctgctaactgtctttttctggtttattcgatgtggatggcatgggcttcaaactaatggttgtatgtgtgtttgtgtttcttgcttttccccctcccaattagccaagtgagacctattgtttcccctacatttggatatagcttctcatatatttcttcctgcggttagaggaaataggatgcagacaactgagcagattttctccaccatgttatatctgaagaggcaaataggtctgtacatgatctctgcaggttatcgactctgggaataccaactcaagtttgcttgccaacagcattgtggaacaaaatactatatttatctgtatatgttcattgacttattttttccttgaatttcagttatgcttattcattacaaaaatgtttgcatctcccttttctctaccgaataggcacatttaaataaaccatatctaccattgatccatgatggaaataatgtattgaaagttcattttgtacgctgcattttttgttgtttaaaggttataaatttcattacattaatcattatcttgcactaatatgttgcagaaaaatatccgttgttgagaagatttaacacagggtcttattccaagaggtgtgttctgctgctgtcagaagaagtattgccgatttataagaattgacttctcatacattccatcttaatttcatattgagtagatcgttgccaatgagcgtgctattaaattggagtactcaaagtaagtttaataagcctccagttttattttttcctatctatgcgtatgatgtggcaatgtttcatttggcctaaataaagagaaggtagacagtgatccagttgg

SEQ ID NO: 16401 - DNA, 2260 bp, Oryza sativa
  ref <308>: DATABASE ACCESSION NUMBER: AK066895
  ref <309>: DATABASE ENTRY DATE: 2001-12-06
gagttttgtccacctccccgcctccaccccccgccgcaaaccctagctcgggaaaaaaccctaaccctagaggcctcgccgaccacccagccatggagcccgacggcgacgccgcgttccaccgtaacgaggccatctccgccgtccaggacgtggaccagtactacggcgacgacgacgacttcgacgacctctacaacgacgtcaacgtcggcgacggcttcctccacaactcctcctcctcccagcccccgccttcccagcaactccctccgccgtcgctgccgccgccgctgccacagaagcagccaccgtcccagcagctccctccgcctccccagcagcagcagccaccgccccagcactcgctgcccccgccgccgccgctcccgcaggcgccgcctccgcagcagcagaaggtgcacatccctggcgtggccgccccggctccgaatcaccctccatctcagcccaatctcccgccgccggccgccccggcgccgctgccgcctcagcaacaccagatccagcaaggcggtggcgacggattccaccgcccgggaggcaattatggcggtggtcccatcgtggtcgggaacggcgggccagctgttgttgggggtgatggtcctggcggcacgacgctgttcgtcggggagctccactggtggacgaccgacgccgatcttgaggcggagctcatcaagtatgggccggtgaaggaagtgagattctttgatgagaaggcgagtggcaagtccaagggttactgccaggttgacttctatgatcctgctgttgccactgcctgcaaggaggcaatgaacgggccacctgttcaatggtcgtccgtgcgttgtggcctttgcctcgccgaattccgtccgtcgaatgggcgagggcgcaggttaagaaccagcaatccatgtctgcacagacatcgtctatgcagcccaagggtgggagaggcggcggcggtgctggaagccctcaggttggtggtaattatggtggtggccgcggaggtggaccttgtggtggtgcaggcggaggtggcggaaattgggggagaggtgtggagggatggggagaggacctgctgggaatatgaggaatcggatgggaggaccagcaggcggccgagggatcatgggaaatggtggaatggttgcaccaccacctccaatgctgcctccaggcggaatgatggggcaggcttttgatcctactggttatggtgcaatgggaaggatgggtgctgggtttggtggattccctggtgcaccaggggcagggccattccctgggttgatgcagccattcccacctgtggttgcaccacatgttaatcctgctttctttggaaggggtgggatgggtgctggcggagttggtatgtggcctgaccccaacatggggggatggggtggggaggaacaatcaagttatggggatgatgcagcgtctgatcagcagtatggggaagggggaagccatggtaaggagagggccgagaggccacctgatagggagtggtctggtgcatcggagaggaggcgggagagggagaaggatatacccccagcacaggagtggccagataggaagcaccgggatgaacgagacatgggccgagagagagatcgtgactatgacagagagagggagagagatcgtgatagggagagagaaagagaccgtgacagggagagggacagagagagggacagggaaagggagagggataggcacagggatgacagagaccgctatggcgattatcatcggcacagggaccgtgattcagagcgtaatgaagattgggacagaggaagatcatctggtgtgcgcagcaggtctagggaggttgatcattctaagcgtaggcggatgacgcctgagtagcatagctcgatgcgctacttctcatatagaggcaataccaatccagggcatcttcttctttttgcttacgagcatggacaattaccaactctttactgcttgtagctgtggtggttcttactgcttgtgtctccggcgatctgttgtagcattatttgagatctaaaagcggttggagactttggatctgttctgctacatgaagatcgcctaacctggatgatagttgtttcttgatgtattttgatgtgtctgggagagcatacaaacataagaatctataaatgtgtaagatgctttgtagtttggaccaatttttggaaaacattactctgaggtgtaccgttttggtagt

SEQ ID NO: 16402 - DNA, 2881 bp, Oryza sativa
  ref <308>: DATABASE ACCESSION NUMBER: AK066896
  ref <309>: DATABASE ENTRY DATE: 2001-12-06
gggtcttcaactcttcccacaccacgccgaattgccgaaaccctagccacccctcttccccctcaaagcggcggcggcggcggaggccgctgcatcgcctgctaagatgtcgggcggcttcttccgggggacgtcggccgatcaggacacccgtttctccaacaagcaggcgaagctgctcaagacgcagaagttcgcgcccgagcttgaacacctggtggacatgactaaggtgaagatggatgtgatgaaaccatggatcgcgacccgtgtcaccgagctcctagggttcgaggacgaagtgctcatcaacttcatctacggcctcctcgaagagaaggaggcggatggaaagaagatacagatacagctgacaggattcatggagaagaacacagtgaagttcatgaaggagctgtggagcctcctactcagtgcacaacagaatgctagtggggtgccccaacagtttttagatgcaaagggagctgagattcagcagaaaaaggcagaggaaagtagaattgctcaggagatccagaagaaacgggagaaagatggaagggagcaagaactagagaaacaaaaattgatggacggggatgccggtaattctagattaggtcctgatcgtgctgatgctgaggaggaaaaagaactggattctaagcatagctcaagagcaaagagccgggaaagccttaggtccaggagcatctccttgtcgcctcgcggtaggcggcgatctgtttctcctaggaggcgttctccatctccttccagaaattccatttcttttgggagacagcaacgatcttcaaggcgctcagtttcacctaggcgttctttttctccacgaaagcgttctccaagaagtaccccttcgatgtcgaggcggagatcaccgtattccagaagatcaccttcagtaccaagacatcgatctccgtcacctcatcgtagatctcatattcgcaggaaatctccaccttttgtgcgtcagagatcaccatctccacaccatcgccggtctccaggtcgtgcaccaagatcaccatctcctgcacgtcatagatctcctcggcgcaggtcatctctagacaggcattggtctccatctccaggaagacgtaggcctcggtccccttcacccggacgacgtaggccacggtccccttcacccggacgacgtaggccacggtccccttcaccaggaagacgtaggccacggtccccttcaccaggaagacgtaggccacggtctccatctccgggtagacgcaggccaaggtcacgatctccaggaagacgaagatccccctctcctcgaggctctccgcggttgaggtcaccaaaacgccctaggagatcgccaatttcacccagaagtcgttctgcaaaccgtcggccctctccacaacgaaggaggagtaccagtccacacgataggagcccaatccattctcgcaggagcttgagtagagacattgaaaaaggaacaaacggcattccctccagtaacgatgtagatgtgcttcaaaggaacaaagaatgatcacacgatgacaataggaatgatacagaagtgagtggccatctttcatcggattctgagcatcgtaagctgacaaaatccttgaattctccaaacaagccagaaaggaactcgacacgcgatagttctttgaagggcactgataagcacttgcccagtcaggtcagaacagatagcagtggagaagaggagggcagtcgtgcaagagagaatgcacgaaaagcaaattcatcacgcagaaaaattaaggatttctcagcagatctggaactaaagaaagcacacgatgatttgagccctggagaaaaatctccatcacaacatagtggcaaggagacaaggaggaaacagaacaatcaactgtcagagtcatcagaagatgagcgtgatggtagaagaacgaaacacacggttgattctcctgatgattcccaacagaaacagcacactcctagtagagttggaatgcacaactcttattcaaaggatggcatgaacagtgaggatgcaataaagggtttacgtgacggtatggcttctaagaagtatcctgctaaaatcgatgatgattctgagtcagaagatggaagtccttttcgaaaagataagagaaaagcacacggtaataacaacattgattctggcagttcaggttcagaagaatcagggaaacatagatcccattctgagaagcgaaagcataaaaagagccgtaagcataagagacgttatgatgacagttctgatgaatctaattcggagtcagatgacaaagagtccaagaggaggagaaaggaagagaagaggttgcgaaaagaggaaagacggcgcagacgtgaagagcggcaccgtagaaaggcagaccgtcaggccagcaaactaaaactgaagcatgctgaaactgttgatatggcttcagatcttgagaaggatcgtgaatctgactcagatgctgatgctaggaagaaaggttcatataatggaagagacgaatcggatcagcagaaacttgaaattgagcttcgcgagaaggctctggaatctcttagagcaaagaaagccatcaaccactaggctgaggaatctcttgctatgcatttacatcttttaaaaacttttcttttgcttatatcatgttctggaagtgtgcttatatgactcctatttaatgttctgtatgtttacgtggcagttgacctgagtaattgaggattcctgagctgtttgcttgatgcagctgtattcaggcttagctgctagttatctggtaatgtttgcttttataagtctgtacaaccataatactgagaaggaaatatttatgct

SEQ ID NO: 16403 - DNA, 1704 bp, Oryza sativa
  ref <308>: DATABASE ACCESSION NUMBER: AK066897
  ref <309>: DATABASE ENTRY DATE: 2001-12-06
gcctcgcgcctcgcgagccgcgtccacctccgcgcgggcgccacgccacgccacgcccacccaaacagcttcgctcgccttcctcctctcggccctcgccgcgtccacccccccccgatcgagccgccctccccctccgcctcccgcctccgcgcgcgtttaggagggggtcgggaggcccgaagctgggccggcgtctccgccccgcagggtccgggaaggagagatagggagaagggtcctcggctcctcgcgccgcgtgctttggactgggagtagctggtgctagaagtaatttttggaaatggttagtgggaggtcagcaaatggggaattggatgcatgcttcagaagcctcatgctttcgatcagcagcgggagggggcaggctgaaggtggtggtgcaatgccaaccttgtcaggctggaaggaccttcctattgagctgcttctgcggatcatgtcgataattggagatgaccggatgcttgtcgtggcatccggtgtttgcactggctggcgcgacgcgctgggatgggggcttactaatctttccctctcacggtgccagcagaacatgaataacttaatgatatcacttgctcacaagttcacgaagcttcaagttctcactcttcgccagaacatacctcagcttgaagacagtgcagtagaggccgtttccaactactgtcatgatctacgtgagttagaccttagcagaagttttaggcttagtgaccgttccttgtatgcattagcccgtggctgtcctcagcttacaaaattaaacattagtggatgttccaacttcagtgacactgccttgacctatcttactttccactgtaaaaattttaagtgcttgaatctatgtggttgtgggaaggcagcaaccgacagagctttgcaggccatagcccgtaattgcggccagctgcaatcattgaacttaggttggtgtgaggatgtcacagataagggagtgaccagcttggcatcagggtgtcctgatctcagggctctggacttgtgtggttgtgttcttataacagatgagagtgtgatcgctcttgccactgggtgtccacacctgcgatctttaggcttgtactactgccagaacatcaccgaccgagccatgtactccctcgcaaacagccgggtcaagagcaaacgcaggaggtgggacagtgtgaggagcagcagctctaaggaagaagacggtctcgcaaacctgaacatcagccagtgcacggccctgacacccccagcggtccaggcggtctgcgactccttcccggccctccacacttgccctgggaggcactccctgatcatcagtggctgcctcagcctgacgtctgtccactgcgcctgcgccctccacccgcaccgtactggaagaaccatggtgcctagccacgcatactgatggtgttttgggcgcttggtcctggtgaatgccctattgcctggtggatgatgaggtgttccttcctggcctagaggaagaagctgtgtgaataaactcagaactcaaataatgtacagtaggactctatatctgtaggaatgataaccatggagtggagaatggctggagagttgcgtctcccctgccattcaggccactgactgcaaactactacaaagatgtgtgtgtgtgtgctatgtagcggacttctattaagtggcttgtct

SEQ ID NO: 16404 - DNA, 941 bp, Oryza sativa
  ref <308>: DATABASE ACCESSION NUMBER: AK066898
  ref <309>: DATABASE ENTRY DATE: 2001-12-06
gattccaacccgcgactgcgagcgaggcgagtagggcggcttcgtcgttcgtcctgctgcttccgccgcatccatcctgatatgacttgttgagtggaaagaatcaatatagtacaatctattttcttctcaatgtgtagaagaaacagtctgtaaccatacatacttattaatacgactagtgaaatctagacatggacgatgagaatggccttgagcttagcttgggtctctctttgggtgggacatcaggaaagtctaaggctagagatgctcctctagaacctaaagcagagcctcaagtggaagagagcagtagcaaaggtgtttcacaaactcctgaggctccttttgtgcattactatcaaacaaatgcagagaaccaagaacacagtagcaagcagagacacagccctgctgcaccaccgtttgggaacttttggggacagccagggagttcttctgttcctgtggcagatggatccaatgaacagaagccagtctctagtaaacggaaattactttctgaggagataagttttcagaagaaacctaatacagctgctgagcaacctgatgcatttagtaagagctctgacggtggtgtaaaaaacgctcctatttcaattagcacggatgatggttcaacaggtgaaaacgaggatgttgcagaatcagaagcagaaggctcaaactcttggttggttgcacagcgtgaagacagtgctaagggatctgttgtcaatagaggatctgacagaaaacgatccagtgatgatgctgcagttggttttcaaggaaagaggcagccaagtttctcaggaagtgaatccagctctggaaaattgccacaaggaaatcctttgtcattgcaagcatcaaatgttgttgctgtgccatatcaagtcccgtctcaggtttcagctcctcccagtattacc

SEQ ID NO: 16405 - DNA, 1182 bp, Oryza sativa
  ref <308>: DATABASE ACCESSION NUMBER: AK066899
  ref <309>: DATABASE ENTRY DATE: 2001-12-06
gcttcgcgccgccactctctccgagctctcgcctctcctcctcccccgtcttcccttcgcgcgcgccacccccacacacgcgaccatggcggcagtggcaggaggcgcagcgcgggcgctgtcgcaggcggagcaggacgtgcagatgatgctcgccgccgacgtccacctcggcaccaagaactgcgacttccagatggagcgctacgtctacaagcgccgctccgatggtatctacatcatcaacctcggcaagacatgggagaagctgcagctcgcggcgagggtgattgttgccattgagaacccccaggacatcattgtccagtcggcccgccattgctggaaggcatacgcctggtacatttaccaatcagctccagacctccttcagcgagccccgtctgctcatcctcactgacccaaggaccgatcaccagccaatcaaggagtctgctctgggaaacatcccgaccattgccttctgtgacaccgattccccaatgcggtatgtcgatatcggcatcccggccaacaacaaggggaggaacagcattgggtgcctgttctggctcttggctaggatggttctgcagatgaggggtactatcctccctggccacaagtgggatgttatggttgatctgtttttctacagagaccctgaggaggccaaggagcaggaggaggaagctccagcacaagactttgctgccatcactgattacaccgcacctgaacaatggtctgctgaccagtggacctctgatgtggctgctcccccagctgctactgttggtgattggggcgcagctccagctccagttgctgctgccgaaggatgggatcaagcaggagcacccgtagccactgaagccgccgtcgttccaccggttgcgcctactggatgggacccggcagctcaaccagctgctcaaggctgggattaggctaggcaatcactttgagatgtcttccgcagcttaagttaaatatttcccgaggcatgaatgaacacccaaaatccaatgtgatcatctatagctacaccatgaactcaactgtttttaggaatttctagctgaacctgtgttgtttgtccgtccctatttcgaacaacaatgctgtgagggtgagctcggcaagatgtgtggtatatgttaagctttctacttttgtcct

SEQ ID NO: 16406 - DNA, 3402 bp, Oryza sativa
  ref <308>: DATABASE ACCESSION NUMBER: AK066900
  ref <309>: DATABASE ENTRY DATE: 2001-12-06
gattgctatgccttgcctaggagcaaattaatccaaaacctgtgctctagctagctggagctagttaggtggccattcttctccatctccggcgagttgattggctgactgactggcggcggccatgtggaggttgaaggttgcggagagcggtggcacgccgttgctgcggtcgacgaatggcttccttgggcgagcggtgtgggagttcgaccccgaccacggcacgccggaggaccgcgccgacgtcgagagggtgcgccgtgagttcaccgaccaccgccttcaccaccgggagtcagctgacctcctcatgcgcatgcaaggtttcgttcatttcatacggtgttattttcatttccttttgtgttgcaatttgcatagcaaaacaagcatcaacgtcgtcgttatcgtattccacccgtcaataataagcttggagagaaggaggaggtgactgaagaaatcgccatggcttcgttgagacgagctctcgacgagttctcttctctgcaagcagacgacggacactggcctggagacttcagtggtgttatgttcatcatgcctggcttgatatttgccttatatgtcactggatcactggacactatcatatcaccagagcatcggcgggagatatgtcgctatatctataaccatcagaacgaggatggtggatggggcagtttgatgttgagctcgagcaccatgtttggcacatgttcaaactatatcacccttaggcttctcggtgaagagacaagcaatgagcaattagccaaagggcgcatatggatcatattgcatggcggcactacctttgttccacaatggggaaagatatggctctcgatacttggagtgtacgagtgggcaggaaacaaccccatcttccctgagctatggctgaccccacaatttcttccttttcatccaggcaaattctggtgcttaactcgcatggtatacctgccgatggcctacctatacggcaagaagttcgtgggccccaccgcgccgaccatcctggcgctgcgagaggagatttactcggcccactacctcacaatcgattgggcccaggcccgcagcgcctgcgccaaggtatggcgtacgacacaccggcgctgttgaaccgtgggattgacaggaaccaccgctcgttcctgtcagcagtcgagggtgcacagctcggcaccttccgtccacgcacgtcgcgcgagtggttgcgtgtcgacccccgtcacgttccttggttgcgtgcggcaggccttctaccactttgtaggcttgttgaggcggcggcggacgaccgtgacccagcgaagcggtgggatgcagaccggtcactccttgccgctcttgtagaccgctagagacctgagacgcacacgttccaccttccctgtggggagatggctccgacactgcaggacgtgtcgtacctgctcgggctaccgctggcgggagcaccagttggtcccgtggacggtgtttttgggtggaaggaggatatcactgcgcgcttcgagcaggtgatgcgccttccacacctaggaccgaccaacacccttcctccgtactctacagtcgggcctagcaaggcttggttgctccagttcactgcggaccttctgcaccctgacgctgatgattactcggtccgacgctcccttgaggcgtacctgttgtggttgttcgggtgggtgatgttcactagcacccacgggcacgctgtggacttccggctggtccactacgcacggtccatcgcggatgctcagccacaggacgtgccgcagtggagctggggttctgccgtgctagcagccacgtaccgtgccctctgtgaggcgtgcacgaagactgacgcgggagcgatcatcgctggctgccctatgttgcttcagctttgggcagccgagaggtttgccataggtcgaccagtggtggacagcgcaccctacggggttggtcgcagcgcgcagtggccagaggacggtcccacgatggggacttactggtgtcgacgtgggcgtcgttacgctcacgtccaggtgagacgtggttacccggacttcgtgttcgagtttgaccgtctccagccgagcgacgtcatctgggagccgtacacagaagaggccgtcgctgcgagagcaccgctaggactttcgtccttgtgcacacgcgaccaggcttactggctcaccatcctgccgatggtgttcgacattttcgttgagcctcactgcccgcagcgtgtgatgagacagttcggacttaggcaggtgtttccgggcaacgtgcagccgaccgtcctccctgccgaccactcgttgactcgacggggacagctagcaggcgcactttgggctccacgtgtacagcagtacgttgacgactgggtgttagctacagaggaggtgatcaacgagctcttcccacacacggaggagaactaccgtgactaccttcgttggtaccttcctcgcactcgtgcgcgtgtgaccttcactccagacgccccagagccgcacgttgccgctgtcacggacgcgtatcccgcgcaccgtgaccgagactacttcgtggcggctgatgacgcacgggatatcagtgccgatatcaccgcagtccaagtgaggttgaacagaggtttgcacttgactgacgttgagcagagggtgatcttctcctgtcgcagcgccgtggacgtcgtacctccagctggtccggtacaaccacggcctcgcgcgcctaccgtcggagcaggacctcgacctacggcacctgtttcgcacggacctcgtttgccttcaagcgcccctagcttcggagcagtgcgacctacagcaccggtttcgcacggacctcgtctgccttcgagcgcgttcgcaggcacgaccggcgcttccgcgagctccgcaggggcgttcgccacctcttcgggcgcgttcgccagctcttcctctcacggagcgtcgatccctcgcccacacggatttgcagccgggatcttcggtactagggcctcttcgtctcacgccggtaggactggtcctactagccagttctacgacgacgacttgcacggtgcacaccaccacgacgtactaggctcctctcagcttggaggagctccagaggcgcacactcaggagcagccagaggtcacacctgtacaggcaggacgggttggccgtgccgtacccccggaccgactcacgtactcccaggggcacattagggcgcagggtaggagggacaggggtaagaggcctcgtcagtagtgttctacctcttcagtccttatgtgaccgtttcttttgtcttacaaacttgtaaagcagtactacttttgctattactactgcagtactacttgtgtttgtctcgtcc

SEQ ID NO: 16407 - DNA, 3106 bp, Oryza sativa
  ref <308>: DATABASE ACCESSION NUMBER: AK066901
  ref <309>: DATABASE ENTRY DATE: 2001-12-06
gacctgtcagctcccccccctccctccagtgagaagatcttctcttcttcgccgtcgtccgccggagcgccgccgcagaacgaccgccatctctccccggcgacctcgccgttgcgtgagaggcggccgcgctacgtcttgcccggagcagggagcgctacgagtcacgacgacgtgggggaatatcgcacgtcgccggctggtttgtcagtcgcgatgcaggtggagctcgctgaccgcgcggcagcccggcccagcgagacgggggaggctccgccgtcatctccagccgccgccgccgctgcatcagcagcagcggaggacgcgccgctcttgccaggtggaggtgggggtgtgcggcggcgggtggtggtgagcgagcggttccggcagcgcagcggatccttccggcgggaggtccgccgcgcggccgaggagacctacctactcacgcgcctcacgctcatcctcctccgctacctcgggataggctacagatggatcaggcagttcctagccctctgttgttacaccttcttgctcatgccaggtttcattcaagttgtatattattatttcttctcgagccaagtttgtagaagtgttgtatatggagaacaaccaagaaacaggctggatttatacatacctaccgatagaactgggttgaagccagttgtggcatttgtcacgggtggagcttggatcatagggtacaaagggtggggggcccttttgggcaggcgcttggcagagaggggcatcttagttgcatgcattgattacagaaactttcctcaagggactattggtgacatggtagaagatgcatctcaagggattgcctttgtctgcaataatatagctagttatggaggtgatcctgaaaggttcataacttacaatgatatcaaactttcaaacttttctgttgcaattacaaaatggttcctaccaacgtatgcccttctcatgcgctgatgtgcacaaattgttactgtattaataattaggataccttcagtggaatgtgagttagattgcgtcagagacatatttcattttggctatttatatattctagggttctagtaataggcactgcatggtataaagatcttacatatggaacttctgaagcattatgaatacaagaaacaactcagcgttctgattttggtatggcatatattgaggcatcttgtccgtatctgctctatctaaatgatacttacaggatttatcttgttggacaatctgctggtgctcatattgctgcttgtactctcttacaccaagctattaaagaatctggtgaaggagatgcttccacttggagcattgcacagctaaaagcttattttggtatttctggcgggtaatatcctattctctttacacttacagtaggtgacatgcagcaaggcttgcattttttataatgtgtatgagaatgcgcatgtacacactactttcagttttcagttgtttgtatcgtcaaatatttgcaacagtgtgcagtggaatatatcatgtagtctgctgagcttctttgtgagcagagctgtaatatgctgctccagatttaagaaatgagaagttccctttttaagaagtgacgtggcaattgggctcactctataaatattattgatgattcatgttcagcctttgtaatttatggatcattttggtacctttgttgttaatatgagattatattacatttttagtagtttcattaatggttcacatatacaggaattctggtgtatcggacttgacagttgatttatgatttctacagctataatcttcttaacttggtcgatcatttccataaacgtggcctgtaccgatcgatctttctcagcataatggaaggcgaggagtcgttgcaaaaattttctccactggtgatggttaaggacccagctgctaggtctgcagtatctctattacctcgaatattcctttttcatggaacaagtgactattcaataccatcggctgagagcgaggctttctttgatgctttacaacagaatggcgctaaagcagatctgttcttgtatgatggaaagacgcatactgacttgttccttcaggatcctctccggggtggtagggataagctgctcgaagagattgttactgtgatacacaatgacaatccagatacatctgcccagcatcttgctgtacctgttgcacgccgccttgttcctgaattcatgcttatgcttgctggaagagttagtcctttctgattatgttggcgaccagtgatggcagctatgtatatattcaatgcaaggattgagcccagagaaatctgctgctcccggattagctagcagctagtcagttagtgtagtgttccaattaagatgccaaatgtaccccttcgttgagtagctacccgccagtatgtacagatcttgcctcagacgtctgtcattgactcattgttgtattgtatcttaaggtctagctcattatgctttagtaacacataacttgatatcttatgaagctctgtttggacaagggtcaatctgaggagagagcttgttgtgaattggaagaatattgtgaagacaactgttctgaccgaagaaaatcgtcatgagatgtctcctgcctttctgtaattcagtagtcagtaaattcagctcccaatagagttgctcgcagtactggaatggaggggtgttctggaagacgtttcatctgcgcacttgaagatgtctgtgtgtcttgtaaaagagtgtgtggctcagttattgatcaattagacaagaaaacattgcatgcgaaaggtgatgcttcttgatctattagcacagctctttttacagaggaacagcacatgataaccttcacatgccattggttggaaaatgaacatgctcacatggtggaaaagctggccagtcttcattcctccatggaccagatctaatctaaatatctaatgttgcatgatttgcatctgaattgagtaacatgatggtaagagtagatgaacgtgcattgtgcgtgggcataactcataagaagtggcaaaacatctttggacgactgtttgcagtgtccaaagttc

SEQ ID NO: 16408 - DNA, 1835 bp, Oryza sativa
  ref <308>: DATABASE ACCESSION NUMBER: AK066902
  ref <309>: DATABASE ENTRY DATE: 2001-12-06
ttggggataggttcccactatatgggtttgtataactatataaaagatatacatagcgctgagctctagctgccgaaactagaggacaccgagttctactcttgcgtatattaggagtgctgtttttccgatcgatcaagtgaagaaagtaaaataagtggatcattccgaagagtaagtgatcctaagatctgtgcgcagacgaaacgggaaacaaaccattcgatcgacgatgcgagaggaagcgcgcacgatggtggcgacgagaagcaccaccagccgccgttgcttgacgtggtggtggctcgcctgctgctgcttcgtttcttgggtggcctcgtcgtcgtggacggcggcggcctgtgtcgccgtgtcgagcctgcccgggttcgacggcccattgccattctccctcgaaaccgggtacgtggaagtgaacgagagcactggcgtgcagctcttctactactttgtccggtcagagaagaatcctgatctagacccacttttgctctggctaacaggtgggcctggctgctctagcatctctggcctagcccatgagatagggccatttcaattcgctgcaaaacgatactatagtggaggattgcccataattatctaccgaccagagacatggactaaggtaagcaatataatctttgtggattctcctgtaggggcagggttctcatatgcagccacagaggagggttccaagtctagtgataccaatgctgtgaaacaacttctaattttccttagaaagtggcttcatgaccatccccggttctcactgaatccactctatattggaggtgactcatatagtggaatgattgtacctacacttacacttgcaattgacgaaagcaatggttcagaagaaaaaccattttttaatctcaagggatacattgctggaaatccagtgacagattacaagattgatgaagatggtagaattccatttctgcatggcatgggacttatatctgatgaactttacgaacatgcaaaggagacctgcggagaaaaatacagtgctccgagcaatgctcaatgtgcgcattccgtccaagcaataaacgatgacatcaacaggggacacattcttgagccattatgtgaagaactccagagccccatccataacactgcagcgagagatgtaatgagtaggctcatgctggagtctcgtcctgctgctgccgatgatgacattattatatttgagtgtagaaaagcttcccacgtgttattaaaaatatgggcaaatgatgaaacagtaagggagagtcttggtgtgcaaaagggaacagttggagagtggaaacgatgcaatcgcgatatagattacaatagcgatgtccgtagtacagtggaatatcatttgacgctaatgagaaagggataccgagcaatcatatacagcggtgatcatgattctagagttccctccattagcacacaagcatggattagattacttaacctttctattgctgatgattggcgaccgtggtacgttgatggacaagttgccggattcacacgaagctttgcgagtaataacctgacatacgcaactgtgaagggcgctgggcatactgctgcagagtataaacccaaggagtgtcaagagatgtttgcaagatggatttcaggcactcctctctgacgtatattgttcaagtcacctgtaaaaacataatcaaacgatcatatgagaggtaaaataaagatttgctgcttgtaataattactccgttcgggctgataatacttgtcgttttggacaagagtgaagttaaactctagaatctttgatt

SEQ ID NO: 16409 - DNA, 3111 bp, Oryza sativa
  ref <308>: DATABASE ACCESSION NUMBER: AK066903
  ref <309>: DATABASE ENTRY DATE: 2001-12-06
gatctctcatctacctcgccatggtcgcacacaagcctgcgccatgccctgagcagcagcgctgctcccccccccccccccccccccccggcttcaccgcgaccgctgggactgctgtcccagctccaaatccttgctaggtcaggaccggatctgtagcgagcggtcgcgcgggcatggtttcccccttcgtgccttgcctgtgaccgcggtccgccgaatcccagctctggccgtccatcggccactcgcctggactggatggtgcgacggcgctctccagggatcaacgcccctcgcggaaccgcagattgtttgcttggtctgctacttgagttcttagttccttttcatttgttgcgatgctggtccatgcacaccaactgctcgatgcattgcccaaataggacatagagcttcctgaggtacacagcataagaccaagcattttgcatccgttgcatacaactcgtagccaggatttcctcggattggactacacccaatcagctggtttactgcatgatacaaactatggagacagcgtcatcattggaattatcgattcaggtatctggccggagtctccaagcttcaaagatgatggtctaggtcctttgccttccaagtggaagggcaaatgtctagccggccaagcatttggttctaaccaatgcaaccgaaagataattggggctcgatggtatgacaaacatttgaatccagacaatcttaaaggtcagtacaagtcagctagggatgctgatggacatgggacacacgtcgcgtccacagcggctggtgttctggtgccaaacgttagcttccatgggctagctgttgggtatgccagaggtgctgcaccacgtgcacgtcttgcagtttacaaggcgtgctggggatcgccgccaagctgtgatactgcggccgtcttgcaagcgtttgacgatgccatacatgatggtgtcgatgtgctgtccctttctattggtgcaccgggccttgagtatcctgctagcctccaggctgtcaagaatggcatatcagtcatcttttctgcagggaatgaaggtcctgcacccaggactgttaagaatgcatccccctgggccatgtcggtagcatcggccacaatagaccgtgctttccccactgttatcacactttccgacagcaccagtagctttgtgggtcaatctttgttctatgatacagatgataagattgacaactggtatgaagtctatcagtctagctgcctttttgggactccggaaacgtcaaatgtaactcttgctgtggggaagattgtgctttgcaacagtcctaactctgtgagcctaatttcaccaacaattcaaccggtttggaacattttgcttgctgtaaatgctttgaaggaggctggagcaaagggaattatttttgccgcatatgcttttgatatattggacgttgttgaaagttgtggcagcatgccttgtgttttggtggactttgaagttgcacaacagataaaacaatctgctgatgaaaacaccgcactggtagttaaggtggctgcagctcagacttggattggaggtgaagtgctcgctccgaaaatctcagccttctcctccagaggacctagcccactttatccagaattcctcaaggtgcatgcatactgagtttgatccattcccaggagtagtacattaatataaatataatttctctttcacctaattaattaactatgctatattgtatttttattacactattctaactaatattgtatctataacttctttggagcgtttattagcgcataaaaaatcgatgggctagcaacattgatttagcatttcaaccaaatacagttaggaagaactatcatagtatgttctcaccactgagcctgtaaaacaagtaactgaaaaacggaaattaaggaagcgcataagtgtcaggaggtaaaataattgagaaactgaaaatatagtaagatctctttcagagcacatactctatacaaggcctgagaagagcataccgataagagccagtaaattctgtcaaggtggtcagtttaatcacatatacatattttcccttttgtgacttaggactttataagttcattcaattatttatcctctgctggctctccttgcctcacataaactttcgtgttccaatagcctgacattgcggcgccaggatctaacatcttggcagcagtccaagactcatacaagttcatgtcgggaacttcgatggcatgcccacatgtgtcaggtgtagttgcattgctcaaagcattgcatccggattggtctcctgctattatcaaatcagcactggtgactacagccagcaacgaaaaatatggtgtcccaatattagctgatgggcttccccaaaagatagcagatccatttgactatggtggtggcttcattgatccaaacagagccgttgatcctggcctagcatatgatgttgacccaaacgactacaccttactccttgattgtatttctgctgccaactcaagctgtgagtttgaacccataaatatgaaccttccatcaattgcaattcctaatctaaaagaaccaacaactgtgctgagaacagtaacaaatgttggccaagctgatgcagtttacaaggctgttgtgaaatcacctcccggtatgaagatatcagtggagccatctgttctacaattcagccagagcaaaaagaagcagagctttaaggtcattttcagcatgacccgcaaatttcaagggggctacctatttgggagcctagcatggtatgatggaggcactcactatgtcaggattccaattgcggttcgaccaatagtatccgataattatgcagatctctgaagaagcatagaactacagaatgttcatacttcaaaaggttctgtggagcaggcctcatcctatattatcccctcaaagttgagtttgtcagcctcaccaaaactgttgtactactttacatgttttgtttttctgtctgtaatttgtgatttcactacactatatgatacctcctatcatatggacagaggtccgaaaaaataatggaataaacgagggt

SEQ ID NO: 16410 - DNA, 1788 bp, Oryza sativa
  ref <308>: DATABASE ACCESSION NUMBER: AK066904
  ref <309>: DATABASE ENTRY DATE: 2001-12-06
gatccacgaacagggagacgagccgagacctcctcgcgagtcgtcaatccatggccgcctccgcgtcggcgtcgctgcgccaccacctcctcctccgccgccgcccgcgcttccccctcggccctagccccactttccgcacctcctccctaccccgccgccaccagcggctcttcgcctctgccccatcctcgtcgacggtggagaatggcgagccctcctcgccggtggagccgtccgacggtgcgtccgtcgtcgacgtgaatccgccgcgcgggaccagggatttccccccggaggacatgcgcctccgcacctggctcttcgaccagttcagggaggtgtcccgcgtcatggcgtttgaggaggtggacttcccagtgctcgagtctgaggcgctcttcattcgcaaggccggagaggagatcacgcagcagctttataacttcgaggataaaggagggcgccgtgttgttctgaggcctgaaatcaccccttccttggcacgcctagttataaagcaaggaaaatcagtctcccttccactgaaatggtttactataggacaatgctggcgatatgagcgtatgacaagaggaagacggcgtgaacattatcaatggaacatggatatttttggcatgcctaaagttcgagcagagtctgagcttcttcaagctattattctcttatttgaacgtcttgggattacatcttcagatgtggggatcagagtgtccagccgaaaggtccttcaggctgtgttgaatatgtactccattccagaacatttgtttactgaagtttgtgtgattgttgataaactgggaaagctgactagagaagaaattgagaagaagttggttacaattgggctgtcatctgaagctgtgctgggtatcattgaggttctttctctcaagtcgctacccaagcttgaagaggtgctaggctctgatgttgaagctgttgctgacttgaagaagttgttctcgtttgctgagcagtacggttatgctgattggatttgttttgatgcatctgttgttcgtggccttgcatactacacaggaattgtttttgaggcttttgatagagatggaaaactgagagcaatttgtggtggaggaaggtatgatagactactttcaacatttggtagtgaagacataccagcttgcggctttggatttggagacgctgttatagtggaactgctgaaagaaaagggtctgttacctgatctgtcacgccaaatagatgacattgtcttcccattggatgaggagcttgaagggccagcatgtagtgttgcttcctctctgcggaggcaaggcagaagtgtagaccttgttgaagacaagcgtcttaaatgggtatttaagcatgctgagaggataaatgctggtaggctgatattggtcggaaaatccgagtgggagcgaggtatggttcgtgtgaagatattatcaaccagagaagaatttgaggtcaaggctggcgaactacaataagagaatttgtgaaggttttgcttctaatcctaggcctttttaccttctttatgacttcatccactaaagctctgttgaaacacagcgattcatgtcattcacacataggaggggtacaactcgtaggcactccattattttactgatagaatgcctttatttgctactagatgatttacacgtttgccgaaggtgattgtatcttcgtttgcagatacccttacactatagagttcaggagtaaataaactgcagaatacataactgtcatacg

SEQ ID NO: 16411 - DNA, 925 bp, Oryza sativa
  ref <308>: DATABASE ACCESSION NUMBER: AK066905
  ref <309>: DATABASE ENTRY DATE: 2001-12-06
gatcatccaagtttagggtttcatcctcctcctcctcttgtttcgcatttttgttctcctccaattccactctccattccaatggtgactcatacgcagataagctagaagcgctaatgtcgcgcggatggggtgttcttcgcggagctgaacgagatgctgacgcgcgagctcgcggaggacggctactccggcgtcgaggtccgcgtcacccccatgcgcaccgagatcatcatccgcgccacccgcacccagaacgtcctcggcgagaaggggaggaggatccgcgagctgacgtccgtggtgcagaagcggttcaacttcccggagaatggcgtcgagctctacgccgagaaggtgaacaaccgcggcctctgcgccatcgcccaggccgagtcgctccgctacaagctcctcggtggcctcgccgtcagaagggcgtgctatggtgtgctcaggtttgttatggagagtggtgctaagggctgtgaggttattgtgagtgggaagcttagggctcagcgtgctaaatccatgaagttcaaggacggatacatgatttcttctggttatcctgttaacttgtatattgactctgctgttagacatgttcttctgagacagggtgtgctgggtattaaggtcaagattatgcttgattgggatccgaagggcaagcaaggaccaatgactcctttaccggatcttgttaccatccatgcccctaaggatgaggatgagttttcaaagcctcttacagctgagatcccagttgctgcttaaatagaataagtttaggtgatctgatgcatgcgcttcatgtttttttcagttatgtaatgttcattattaacattattactagtaaagagttctagtttttaagttgcaaacatcagcaactaatacaagattcgtcactatt

SEQ ID NO: 16412 - DNA, 2651 bp, Oryza sativa
  ref <308>: DATABASE ACCESSION NUMBER: AK066906
  ref <309>: DATABASE ENTRY DATE: 2001-12-06
gtgcgctgttcctgcctacgagcgagagagagaatctcatctcgatgctgaacaagtaattttcccggttctgaatccgttcaatcatccaggaaaaatgtccggaattccaggtaagtaattttctctaatttcttatcctgatcagatttatagtgagattcaggggaatagagatctgctggctttttcatcggaaaatttcgctgaattgcgttcgcgaaaaaaaaaattcgctgaatttcgtacagcggatgatgaggattgaaaaggttgggtgctgcaaaagcgagagggggtggggaaagaagggcgcaagaccaatcaagccaaaaggaaggcaatgccacgaaggaatcggctagggttagccatccgcagccacagccgaggggttagcgggtttagccctagcccaccatgactgttgcggcgcatttcatctcctcctcgccgaggggaagaaaaaaccgcatcgcgacggcgacatcgggggggcctctttaataatgcttccatcagagagcatggccatggccatggccacgaccttgatcttgaggttagccggggtcgaaaggttcttcttcttttgcgcctttatggcaaaggggaattcttcgtcgtcacgcaccaagcgttacgcaattcgcaaaagaggagggagggcagctgtggctctttatataaccctgcatcacttcttctggctaactggtgtcctttggagctgagctacatagcacatccgtggagtctcttgtgctaagcaatttaccgttccagtgctctactttgtaggccatccatattagacggaagaactttatcagtattattattggaggagaccaattcaagaatgatataatggagctttaccctggctatcttgaagaccattttaacatccacaagcttagtatcagcagcgcctctcctccggagtacatgacctcggcgtcgacgcagttcgcggcaccggtcagaatgggggcgtacgaccggcctccgccagttggcatgtggagtcacgagcagttcaaggttgacaacggccaggccacgagtgcatccacgatcatggaggcagagatgaaatttgagaataggctagaagaaattccccaagtagttctggaggaagggagaaatgttgatcaggaggcaagcaagccgccagacaaggtcctcagaagacttgcacaaaacagagaggctgcacggaaaagccgcctgcggaaaaaggcttatatccaacagctggagacaagccggttgaaactagcgcagttagagcaagagcttcaacgggccaggcagcaggtacacggataacaatttgttgtgcagccacttcagcttacacttgtgtcactgactccattgcaaatttgcaactgctctgatgcaggctgtgtatgcaaatgggagccttcgagaaccaaatcttggatttacaggaccgatcgatccaggtgccttaggttttgagattaagtacagccattgggtggacgagcagaatcgcaacactggtgagctgaggaatgcgctgctgcaggggcagacgacggaccaggacctggagctcaagttgctcgtcgaggctgggctcgacaactacaaccgcctcttcgagatgaaagaggaagccgccaactccgacgtgttctacatcatgtcgggcatgtggaagacccccaccgagcggttcttcctgtggatcggtgggttccggccatcggaggttctcaagaatttgagaccgcagctggagcctctgacggacaagcaggtcgtggaagtgggcggcctgcagcaaacctcgatgcaggtcgaggacgccctctcgcagggcatggacaagctgaagcagacgatcgcggactccctgacggcggccgacccgttcgactcccccgaggcctacatggtgcacatggccaacgccgtggagcagctcagatccctcgtccagttcgttacccaggcagatcatctccggcagcagacgctgcaggagatgctcgatcctgacgacgcggcaggcggcgagggggctcctcgcgctgggggactacttccagcgcttccgagcgctgagctcgctatgggcagctcgcccgcgcgattcagggataagctaaacaccgtaatatggtcacggtagaagctactgatatcagtagcaattcgtcgtgttagttcgctacttcagtgtcaggtcaatggccagtgaaggatgaagagatctttctacctgtgcttcgtcgaagaagaacaactcgtgatcgactttctgcagcgccgctgcaactgcaatccaaggaatggtgtatgttcgcctgctgagatgaagaaataaccaaaattaactttggtctttctgatgtgggcacaagagaagatgtaatataatatgtaaatatatacatgttttgggtatcattgccagaggcctctacagctggttttatagacatgtgatgtaattatctgtaactagtgttgctcggttcctcctccctagtacggcagacataggtgacatactgccattgtattgtatgggagaacaaattagttcacttgagaactagaaaaacatgcagtgatgttttgctgaagttgaagtagtttctgccacc

SEQ ID NO: 16413 - DNA, 1549 bp, Oryza sativa
  ref <308>: DATABASE ACCESSION NUMBER: AK066907
  ref <309>: DATABASE ENTRY DATE: 2001-12-06
gggagcctggacctggaggagcggtgcgttctccttctccctccccggcccctagccgccgcacccccaccctcgcccgcctctcgccgtcgccggaacggaaaatcatgggcgcggaggcagagcaccgcatgtctccctcccccgctcccgctcccgctccccctacccctgttgggaggaccgacggcgacgcccctcccatggtgctgggcctgcagctgtcggcgctcatcgaccacgtcgcgcgcgtcgactggtccctcctcaaccgcatccccggcgacctcggcggttcacagcaggtctgtattgaggagttgaatcatattctggctgaagtgaatgctcaaatcctcccttgccgtgatgacctttcttcaataaggactatagccggtggtagtgtcgccaacacaattcgaggtctctcagcaggttttgggatatcaactggaataattggagcttgtggagatgacagccagggcgttttgtttgtcagcaacatgagctttagtggagtagacctcacaagattaaggacaaaaaaggggcacactgctcagtgtgcatgcttggtcgatgcaagtggcaatcgcaccatgcgcccttgcctatctagtgcagtcaagctccaggccaacgagttcaaaaaggaggacttcaaaggctccaagtggttggttgtacgatatgcaagacagaacatggaacagatccttgaagctattaggattgctaaacaagaaggtctctcagtatcattggatttggctagttttgagatggttcgtgactataggacacaactcattgaccttttggaaactggcaacattgacctttgctttgccaatgaggatgaagctagagagcttctagggggagagctgacatttgatccagaggaggcacttgctttcttggccaagtactgtaaatgggccgtggtgaccctagcttctaagggatgcatagcgaagcatgggaagcaggtggttcaagtggcggcaaccggggagagtaatgcggtggacgcgacgggggcgggggatctgtttgcgagcgggttcctgtacgggttggtgaaagggctggcattggaggagtgctgcaaggtaggggcgtgcagcggtgggtcagtggtgagggctctgggcggggaggtgaggccggagaactggcagtggatgtacaagcagatgaacgccagtggcctgctgctccctgacctcaagaactgaagaaaaagaaaaaagggcttgccttttacttgtcaagcttccaagaaagaaacaaagattcagaccatggtcattgatggcttgattgtttgttagttagacctcctatgctcggtttctttctttgtttcttaatttgtgagatgagatgaatggaatggatggtggtaacctgcactgcactacaagtctcgctgattattcaatttgctcgagaaaactcatatatatatatatagtataataaagtaacataaaagtttggatgtatgaaaatctgaacgtgtttgttgtcagctgtc

SEQ ID NO: 16414 - DNA, 3403 bp, Oryza sativa
  ref <308>: DATABASE ACCESSION NUMBER: AK066908
  ref <309>: DATABASE ENTRY DATE: 2001-12-06
gactctttcttttgcagaattgcaggtcaagcttcgttcagatggcggttgccggggcagtggcgatgtccggcggtattctcctcctcctcctcctcctcctcctcctcctagctgccgcctgcgtcgaagccggcgagctgccgccgattagccggagaagcttccccaaggggttcatcttcgggacgtcctccgcgtcctatcagtgcgagggtggagcagcagaggggggcagaggaccaagcatctgggacaccttcacatatcagcatccagataaaatcgctgacaaaagcaacggggatgtggctgacaacacctaccatctctacaaggtattagcaattaccatttttaagtagccgtcctgggcattttttaacaggcattttgtaaggactttcaataaatatgcactccatgtttctgttagtttctttgtttctatcagataaaagatataccacatgtcagtctgcctatggcgcgatcgcttcagagatcaattctaagtttcattggaaggactagttcagtactcacatcctgaaaaattgcaggaagatgtgcacatgatgaaggagatgggaatggatgcatacaggttttccatctcatggtcaagaattcttccaagtgcgtgatacacctaatatatactataatgcactgtcacgcataacaaatatatagcttatctgaagatgttctcatttttcttcgaagtacaatattttgcatatctttttcaatctccaaggtgatcccacaaggaattaaaatctcactgtcatggcagatggaagtctgaatggtggagtcaacatagaaggcatcaactactacaacaatttgatcaatgagctattattgaaaggcattcatgtctaatcttcactgtttagtttcaagttcagtggctagatgcaacttgtggaaaccattagctccatcccttggtatgccagatttccttttccaaaatgcaaaataatcttaatacatttgcaggggtccaatcatttgttacccttttccattatgacacacctcaggcactggaagataaatacaacggatttcttagccctaatatcataaatgactataaggactatgctgaaatctgcttcaaagagtttggtgaccgagtgaaacattggatcaccttcaatgagccttggatcttctgctctaaggcctatgcatctggcacctatgccccgggccggtgttcaccctgggagatgggaaaatgcagcgttggagattcaggaagggagccttacactgcatgccatcaccaactacttgcccacgcagaaactgttcggttgtacagagagaaatatcagttcactgaagaagttgtcaggcagtcgcagttcatccatgataatgatttacatcgaagatccgcaaagttaagtttcataatccaaaattacttattgcttggcattcactttcagccaggtcctggtggtagagtttgccagtacagacattaacctttactagtagtagttgataaggaaaaaaaggaaagaaattctagaattcacaaaaaaaacaataaaaattggcacttaatcccaatgtgttatgtgccctagttagagaggtcaaaataggtcagagaaaatatttatgtattatacaagaccttctcacataaaaacaaaacatcatgccttaatctcggtcctcctaatacaaaggtctggatctgttggttaggttaaagatatactcctattattttattattttcatgctaaattcaatgaaagactttagagttgataagaaaagcaataaattcataaaaagcaaaacatctcccattaagttatcttcaaattcaaacacatatcagtatccaacatcacaaatgtttctgatagctagctcacaatttctgcgggtaacttgactagctaattactttattaactgcagcgctaatttatatcctgcatattatgaaatggagacatgcatattctagtccagtgatatattcaaagcttctgcaatttactgctacatgataatacgttcaaggccttataatttgaacatgattgttatacatttgttgttaatattatttttagggaacacaaaacctttgaccatgcatgcagattgaatgcttagtagaatcaattctgtttttcaaatcaaaaggaacaacaaaatgcttgacaaatgcaggccttacaaaaggggaagattggaataattgtgaactcacagtggtatgttcccttctccccatccaaaaccaacaaggatgcagcaagacgtgttctagatttcgtgcttggatggcttatggatcctctcattagaggggactaccccctaaacatgagagaattggttggaaatcgcttgccaaagttcaccaaagagcaatctgaaatggtcaagggtgcatttgatttcattggacttaattactactcttcaagctatgctgagaatgttcttccatcgtatggtcttaagaacagctacaatactgatttccacgctaggattaccggtgagtcaacatattctgggatcagtcaacttcttttgtgcgtttgaaccatgaaatataaacatatggcaatttttttggaattttggatacatgcattttgtagcttttttttttgctactaggtgctaaccttgcccaattatgctaggtagtcgaaacggtactctcattggtcctcaggtgacctacagctttgttacccacaaaacaaattattagtaaaagtgcaaaacaatgatcaggtgacatgattgaactctataaacaatatgtgtgtaggctgcttcatcttggcttcatatataccctcaagggctccgtgaattgttgctttatatcaaggaaaactacggcaatcctaccatctttattactgaaaatggtgttgatgaagtcaataacaagaccatgccactcaaggaggccctgaatgataatacgaggatagaatattatcacaagcaccttctcgccctgcgaaatgctatgagggatggagcaaacgtgaaggggtactttgcatggtctctgcttgacaactttgagtgggcggatggctacacactccggtttgggctaaactttgtggattacgatgatgggatgaagagacaccccaagaattcagcccattggttcaagaagttcctccgagaaatgaaacagggatgaaaagagtcgcacgcattgccttcttttttttcattgaacatcgaaattgagtgtcacagatgaaatgagtttgagatgtgcttctttgtttaggctatacaagagtaaacttcacaaaactacacgttttgttgtccaagttacaataaaaccacacaaattattagaagc

SEQ ID NO: 16415 - DNA, 3145 bp, Oryza sativa
  ref <308>: DATABASE ACCESSION NUMBER: AK066909
  ref <309>: DATABASE ENTRY DATE: 2001-12-06
ccctcctcgtgggtgggtgggtgggggtgggggtgtggtgctcccttcccttgtagttctctttctccccatggttggatgattggatcgacatcgacttccagacttccagtggcaaggcagccctagccctagccatgccgcccgccagccttgtctcctcccctcccctcgcgtgctgccttcagctccatcgactcctccgccccgccgccctactcccctcgccaccacgcctccgcctccgcctccgccccctccgagccgattcctccccctcgccagacgccttcgctggctggtcggatggggacgaacaagacgaacaagacaagtcccctgggccatttcgagggcttctaggacctggccttgctggactcttctttcttgctggcctcaccttcgctgcaatttctttcagaagcaacgccgcaaatggacctaaggcacaaatcgatacctcgtctacaaacagtcaggaggcaccttactccactgataatacctgtaaagaggatggtctcaaggatgctcaagtttcgttaccaagtgatagcaaaggtgaaacaagcttggatgatgaagcacatagtagcactgacccactgcctgtacaagtaaatgccactgcggagggatcaactgaacatgagacacagcatcccttgcaaaacagtgagctagttcctcctgacaaatatgttcctagtgaggatgcaggtcaagcgcacaatctcgttgcttctgatggggctgaaagcctggtgtctcctttgtcaaactccacggaaccttccatcgctgcttatgactcgcctgacaaactttacggtgtaggtccctctgagggaactccttatgtagaagatacattaaactgcgaaattactttgccagaaaaccagcatctgggtgaaaccttaacgtcagatacaatgctaggttcaggtgatgcttcgcttatccaggaaatctctgacactgcagcttcatctgatgcaaaggacaaagatactgagcagaatcctgaacttcatagaaaaaatgggatttcaccatcaagaatgcctgattatacagaatatggacatgctgatcagttgctttcatttggttcaaatgatgtgtccacagaagcaaataagccaggaaatggggtggagactttagcatccaatcaaaatgaaggagcagacgaattagaaaaccaaaacagtttatacgagtctacaacacccgacaaatcttttgcctcttctggaattcctgctcccacactgctctctgcagctttacgggtgcgtactggacagattatggttccagcggcagttgacccagcccaggcaagcgcattggctgcactacaggtcctaaaggtgattgaacctgatgcccaagctggtgacttatgtacccgacgagaatacgctcgatggttggtggtcgcaagcaattgtctatccaggaacacttcctccaaagtgtatccagcaatgtatattgagaatgtgactgaacttgcctttgatgatatcacacctgaagattttgattttccatttatacaaggcttggcagaagctgggttgatttccagcaagctttcgagatctgatatgaacgttcccctagatgttgacaatttgcataatttgttttctccggaatgtcctgtgtcacgtcaagacctcgtgagttggaagatggctttggataaaaggcaattacctgaagtggacaaaacttctatgtacaaagcttctggatatatggacgttgataaaataaatgcagctgcttggcccgctttggtggctgacttggatgctggagaccagagcattacagctcttgcatttggttttacaaggctcttccagccggataaacccgtgacgaaaggacaagtggctcttgcactttcaactggtgattctgctgatgtggttatggaggagcttgctcgtattgaagcagagaaaatagctgaagatgctgtaaatgcacatggtgaactcgttgctcaggttgagaaagatctgaatgccacttttgagagagagcttacaaaggaaagagaaaaaaatagagagacttgaaaagttagctgaagaagctagggttgaattggacaagttgagagcagaaagagtggaagaaaataatgctctgattaggggcagagcttctgttgaatctgaaatggaagttctctcaaaattgaggagtgaagtagaggaacagctgcaaagtgtgctgagcaagaaggtggagatctcgtttgagaagaataggattgagaaactccaaacggaaatagagaatgacagacaggctgttgtgcagcttcaatatgaacttgaagttgagaggaaggctttatcaatggcccgggcttgggcagaggatgaagcaaagaaggccagggagcatgccagggcccttgaggaagcccggaaccaatgggagcgtcatggaatcaaggttgttgttgaaggagggcttgaagatgatgcatcagctggagtcacatgggccaatgctggcaaagaacatcaagttgacgaagcaattaaccgagctgggtctttgctggagaagctgaagtcaatgtctgctgagataaaagtccggtcttgccattccctggagagagtaatacagcatgtgaggtctttcatctcaattctaaagcagggagcagaagaagcaacgcagcgatttacagatctaggggctgctgcagctttgaaggcaaagaagttgtcatccgaagcacaggacaatgtctacgtgtttggttcaaccattggggataagtcgaagagggtggtggaggactgcaaagagggcctggagaagtttgtacacagattcaagacagactagccagtaactattagtgtctacaccaacagttgatagttcctgtcaaacttgagaaagaggaaccgtattagtttcttggaataaattcctccatgagtgctgctgctcaggtgtggtggactggtggtgttgtaaagtattgaaactgaaactagcacagaaggttccatagaataagccttgttctgtaatgtaatggaatccaaaaagagcaaggcagacagtgagtctccttgaatgttacttagac

SEQ ID NO: 16416 - DNA, 1824 bp, Oryza sativa
  ref <308>: DATABASE ACCESSION NUMBER: AK066910
  ref <309>: DATABASE ENTRY DATE: 2001-12-06
gacttgcataaaagaaaatcccccgtctcgtctcctccgctccttgtgcctgcgcccatcgactccatctggcgactcgcgagagcagagcaggggagggggaggggaagggcgccgtcgtcctgttgttcactcctgacctgcatcacatctggagatgtctttccgcagcatagttcgtgatttcagggacagtttcgggactctatccaagcggagtttcgaggtgaaaatttcaggcttttcgggccgtcacagagggaaatccattggaccatcaagcgagctggatgacacgcccgtggtagctcagcaaagcaagtgggctggtcttcctcctgaattacttcgcgacgtgatgaaaaggctggaggaagatgatagcaattggccctcccgcaaggatgttgttgcctgcgcttcagtttgtacgacttggagagacatgtgcaaagatattgtcaggaaccctgaattttgtggaaagcttacatttccagtgtctcttaagcagcctggacctcgagatggagtaatccaatgtttcataaaaagggacaaatcaaaactaacttatcatctctacctgtgccttagctctgctgtgcttgatgagactggaaagttcctactatcagctaaaaggagccggcgaacgacacacactgactacatcatttctatggactccaaaaatatctcccgatcaagtagtggctatattgggaagttgaggtcaaatttcctcggcaccaaattcatcatctatgacacgcagcctccatacaatgctcggacactttgctcacaagaacggacgagccgtcggttctcctctaggaaagtttccccaaaagttccaacgggttgttatcccatcgtgcaggtgaattatgagctaaatgtgcttggaacccggggaccaagacggatgcaatgcgctatgcattccatcccagcatcagcagtagagcctggtggcattgtgcctggccaacctaaagagctcctcccaaagttatttgaggagtccttccgcagtatggcaacttccttctccaagtactccatcacagatcattcgacagacttcagtagttctcgcttctctgagtttgggggaggggctctgcaagggcaagagcaagagcaagatggcgatgatgtgaacaaggagaggcctttggttctccggaacaaagcaccaaggtggcatgaacagctgcaatgctggtgcctcaacttccgtggccgtgtgacggtggcttcagtgaagaacttccagctgatagctgctgcacctcagccatcttctggagccgcctctgaaccttcacaggcagggcaggctgcacaacagcaaacccaaccttctcagccatcgagttcgtcgtcgtcgtcatcatccaaccatgatacggtgatcctgcaattcggcaaagttgcaaaggacatgttcaccatggattaccggtacccattgtcggccttccaggcttttgctatctgtttgaccagctttgacaccaagctggcatgtgaataaatgagtagaatagcgatcagaaagcactccagtgtacctgaggacctaagccactccaggcgtatggtattttaggataggagaattctgtgtctagtcacttgtgtgtattcatgtgcagttctttggttgaatccttgtgttcctccggcgtgcgtgtttgttagaagtgtaaaaaggggattgaagtgtagatgtctgtaagatagaacaagatcttgtttcttgtatgttgggcttaaaaagttttgagcaagagaatgaatgaatggttgagg

SEQ ID NO: 16417 - DNA, 2522 bp, Oryza sativa
  ref <308>: DATABASE ACCESSION NUMBER: AK098974
  ref <309>: DATABASE ENTRY DATE: 2002-08-28
ggggatatttatgagcgctggtggagtggcgtggcgaggtgaggaggtggctgatctctctcatcaatctcctccgtcgcggtcgcagctgcgggagtgaagccgccccgcggagctagctaaaccctagccactgcccgggcggagagttggggtttgggttggtggcggtgggccggtggcggctcggtggcggagctccggtgtggggtggtgtggaatggaatggaagttattcgatgatttcccaggattttgactaggccacagatggttacaagttgcattcatggtcaaaattgtgtctgaacatagagattctttggagttcatagacgaagtgatttgttttgttcaatacttccacacttataatgggtgctgtctgctcaaggaagagaagccaattagtgcacgaggatgactctttccagacatcttccaggttctcaaagaccagcagcttgaaatggctgctgcttacactgccacgcagcaattccgatgtctcccgcaagggccagggaaagggccctggtcgttgcccatctctaatggagctttgtgtggccaaagcctgcgaggatattaacaagtattctagtttttctgtattgccgagggatctcagccagcagatttttaatgaattggtagcgtcgaaccgtctcacggagacattgcttgaaacttttcgggattgtgcactacaggacattgatttgggggagtatcctggagtgaatgatgcttggatggaagtagtggcttctcaaaggcattcattgttatcagttgacatttcttgctctgaaataactgatagtgggttatatcttcttagagattgtccaaacatgcaaagcttggcatgtaattactgtgatatgatctcagagcatggcctaggaatcttgtcaggtctttcaaacctgacatctctcagtttcaagagcagcgatggtattactgctgaagcaatggaagcatttgctaatttagttaatttggtaaatcttgatctcgaacgatgcctaaagattcatggtggccttgttcacttaaaaggcctcaggaatctggagtcactcaatatgagatattgtaacaacattgcagattcagatatcaaatacttatcagatctcacaaatttgaaagaattgcaattggcttgttgtagaatcactgatctgggtgtttcttatcttagaggcttgtccaagctaacacagttgaatttggagggctgtccagtgactgctgcctgtttggaagctatatcaggattggcttctctggtggtgttgaatttgagtcggtgtggcatatacggtgaaggctgtgaaaactttcaaggtcttaaaaaattgaaggttttaaacttggggttcaataatatcacagatgattgtttagcacatctgaaagagttgatcaatttggaatctctaaacttggactcatgcaaggttggagatgaaggcttattacatctgagaggccttatgcttttgaaaagtttggagctatctgacaccgaagttggaagcagtggactccagcatctatctggccttcggaatttggaaagcatcaatctctcgtttacgttagttactgataccggtatgaagaagatatctgcactgaattcactgaagtcagttaatcttgacaatcggcagattactgatgttggcttagcagcacttacaagtctcactgggttgactcatctggacctttttggtgctaggataacggactatggcacaagctgcttcagattttttaagaatcttgaatctcttgaagtctgcggtgggttaattactgatgctggagtgaagaatatcaaggatctcaaagctctgaagcaactcaatctttctcagaacgttaacctgacagacaaaaccctggagctgatttctggcttaactgctttagtctcgctgaacgtctccaacactcgtgtatccaatgccggcctccgccacctgaaggatctgcagaacctgcgctcgctgtcgcttgattcctgcagggtcacgacaagtgaggtgaagaagctgcaggcgacggtgctccccaacctgataagcgttcgacccgagtagctggacactacatgatcacctgtaaataatcatctggatggcttcatgtagatagctttgcaagggcctggattgaagccagattaataagtaaagtctatggtagcatttgttggcctaaaaccgggagacgttggcccaaccgggagaaagcctttctacaccccaaaagctagctcatgaggtgagggacccctccccttttaagttggtgccactccccctaaactttcaatgtgggactattctcaacagcatttactaggtccttcctgctccgtttatcgggatcttttcgttttcaagtactgaaaaaattacttgtatttccttcactccgtgtaccctccaaggcgtgacgggaaggaacaaaattgtaaatattgcgcttcctcgccg

SEQ ID NO: 16418 - DNA, 1926 bp, Oryza sativa
  ref <308>: DATABASE ACCESSION NUMBER: AK066911
  ref <309>: DATABASE ENTRY DATE: 2001-12-06
gtgccgcaaagcaaaagaaaaagttagatcagaggagagctcagagctcaaagagttgggaagccatggcgggagggcagctcaacgtgctgagcacgctcgaccaggcgaagacgcaatggtaccacttcatggcgatcgtcatcgccggcatgggcttcttcaccgacgcctacgacctcttctgcatttccctcgtcaccaagctgctcggccgcatctactacaccgacgattccaaggacacccccggcgcgctcccgcccaacgtgtcggccgccgtcaccggcgtcgcgctctgcggcacgctcgccggccagcttttcttcggatggctcggcgacaagctcggacgcaagagcgtgtatggtttcacgctgattctgatggtcgtgtgctcggtcgcgtccgggctctcgttcgggagctcggccaagggcgtcgtgtctacgctctgcttcttccggttctggctcggcttcggcatcggcggcgactacccgctcagcgccaccatcatgtcggagtacgcgaacaagaggacgcgcggggccttcatcgccgccgtgttcgccatgcaggggttcgggatcctcttcggcgccatcgtcgcgctcgcggtgtcggcggggttccggcacgcgtacccggcgccgtcctactccgacaaccacgccgcgtcgctcgtcccgcaggccgactacgtgtggcgcatcatcctcatgttcggcaccgtcccggcggcgctcacctactactggcggatgaagatgcccgagacggcgcggtacacggcgctcatcgcccgcaacgcgaagcaggcggcggccgacatgtccaaggtgctgcacacccagattgaggagagcgcggaccgcgccaagacggtggccgtcggcggcgagagctggggcctcttctcgcgccagttcctgcgccgccacggcctccacctcctcgccaccaccagcacgtggttcctcctcgacatcgccttctacagccagaacctgttccagaaggacatcttcagcaaggtcgggtggatcccgccggcgaagaccatgaacgcgctcgaggagctctaccgcatcgcccgcgcccaggcgctcatcgcgctctgcggcaccatcccgggctactggttcaccgtcgcattcatcgagatcatgggcaggttctggatccagatcatgggcttcgccatgatgacggcgttcatgctcggcctcgccatcccgtaccaccactggacgacgccggggcaccacaccggcttcatcgtcatgtacggattcaccttcttcttcgcgaacttcgggccaaacagcaccaccttcatcgtgccggcggagatatacccggcgcggctccggtcgacgtgccacggcatctccgccgccgccgggaaggccggcgccatcatcggagcgttcgggttcctgtacgcggcgcagtaccagcacaagcccgagcctgggtaccccagggggatcggcatcaagaacgcgctcttcgtgctcgccggcacaaacttcctcgggacgatcatgacgctgctcgtgccggagtccaagggcatgtcgctcgaggttatctcgcaggaggtcgccgacggcgacgacgaggaggcggcctacccgaagtaatttgaccgcgcgcgtgatcacgtagggagtggttgccgctaaccattggtgtcatctcttttcccaactgtaacaactctagtcgtcgcttccgtacgagtggtagttttttctttttcttggataagtttgtagaaatttcaattagtgactagtttgtagtatatgtgagtgagatgtgtgtatatgttcttgaagaattggtgaacttttccctggatttgaaagaaccgtgtagtttgaaaaaagaatgcaatggatatgctagtagttcagg

SEQ ID NO: 16419 - DNA, 1128 bp, Oryza sativa
  ref <308>: DATABASE ACCESSION NUMBER: AK098975
  ref <309>: DATABASE ENTRY DATE: 2002-08-28
gtcgaagcttttcctcctcctccgcgcatctcggcgccgcgccatggccgctctcagctcgcgccgccgccatggcagcctccgcctcctcgccgtggccctcctggtgctcgccggagtggcctcctccgccgccgcggcggcggagcggccgcggcgcatttgacccatcccgcgtcgtgcagctctcgtggcgccccagggcgttcctgcacaaggggttcctgacggacgcggagtgcgagcacctgatctcgctggcgaaggacaagctggagaagtcgatggtggcggacaacgagtccgggaagagcgtcatgagcgaggtgcggaccagctccggcatgttcctcgagaagaagcaggacgaagttgtagctaggatagaggagaggattgcagcttggacgttccttccaccagataatggcgaatccattcaaatattacattatcagaatggcgagaagtatgagccacactatgattacttccatgacaaaaataatcaagctcttggaggacatcggatcgccactgtgctcatgtacctttcagacgttgggaaggggggagagaccatctttccagaagcagaggggaagttattacaacccaaggatgatacatggtctgactgtgctaaaaatggatatgcagtaaaaccggtaaagggtgatgcccttctgttcttcagtctccaccccgatgcaacaacagactctgacagcctgcacgggagctgcccggtcattgaaggtcagaagtggtccgcaactaaatggatccatgtgaggtccttcgacatctctgtcaagcagggagcttccactgacgggtgcgaggatgagaacgtcctctgccccagtgggctgcagtaggggagtgtgccaagaatccgaactacatggtgggtaccaatgaagcacctggcttctgccggaagagctgcaatgtgtgtgcacagtaagttactgatccacccttgtgatacatagcagcacgccctcgataattgttgccgcggtaccgggtgtatataggactgagcatagcatgtgtaacctggaaggagttaagatgtactaagatccatttcgcctatatgcacctagaaaaattatagcc

SEQ ID NO: 16420 - DNA, 1496 bp, Oryza sativa
  ref <308>: DATABASE ACCESSION NUMBER: AK066912
  ref <309>: DATABASE ENTRY DATE: 2001-12-06
gaggcgttgttcaagtcaagatccctcttggaaggtcaccgagcgtgttagggcagccgggttcccctgcatgaatggcaagctgctgatcgctgtgtgagttgatgcctttgcctcatcctttgactcaaaaacctttgcaagcttgcatcctctgccatgatctgctcccaccttgtcacccttgatcccaataagcgaccagatagagctcctggccacctcgtcgacatcgtcgatccgaaccgtcttcggcacccacaccttgccattacccttgctatccagttcctcatcaccatctctagggtgctttcctaatctgaagcagttggtcattgtggatactggagaagcagcacttgatgatgaaaccgattgggattgggactgcggtggccatggagcgttccaagctcctggaaccatgcagccccagtatgcagcaacagcagctgctgcagctggatagaatggaattgcaatgcttgaagtgtaataagcaggtggtggtgccacgccaaatggccacatggctcctccgttcatgcatgggtgttgtgcaacatttggagatctatctgctgaaactttctcctttaggttcgtttggttcgattcttctgttttcgacaatccttcagcacacaaaccgactggcatctcgtcggtgttcttgataccggttgttgggataaacttatcttttagatgcttcatttgttctgtgaggtctaaggtggacaggtcggagccgaagctgagaacggtgccattagtcttcactggggcatagagaggaggatcaccgggcagagcagccctgaccctctggaggaaatgggaagcggccgatacgctcttgctcttgcgtcggcctgcacccacaggcacgttgcgcatggcaccacccgctgtccagtacctctggcagttcttgcagaagtggcgcggctggttgatgttgtagttgttgtagtagcagaacttggtgtccatgctgctacaccgggggcacggcaggatcttgtcaggcttcttcagcttctccttctggttggccgtatcgccctgctgctgctgattctctgatgagttcttatcagctgaagagtcctcggtgtcgacgacctctggctgcggaggtggacttgtggagtcttgaacggtgttctcttgagttttcggttcagtcgtgctgctgccactgtgttgaaggtcctgcaagcatgtgaagaaacttgatgagtttttgggtgttaaatttgcaattttgttcagttggaaactataagcccacatggacagttttgtgttcaggttattgtaccaggaagatctgtgacagagtttgttcattgtttcagtttgttcagttgatctagtaaaacactggaggatatgattatgtaactgatagcttgtaaggccacatgttctgatctctagcttaggaaatgaaaataaagttgtgcaatttgtgttggttaaatctg

SEQ ID NO: 16421 - DNA, 1139 bp, Oryza sativa
  misc_feature (437)..(437): "n"=any one base of a, t, c, or g
  ref <308>: DATABASE ACCESSION NUMBER: AK098976
  ref <309>: DATABASE ENTRY DATE: 2002-08-28
gaggcgagggaggaaggaaggaagaagagcaggaggagccaaacgcccgcgaaaccctagccctcgcgctcgcccaccgccttcctctccccccctaccctaccccgagctcgccacccgatccgatcgaagatgcataagctggggagaggaagccgcgacaaggtgcagcagttcatgaccataactggtgcgagtgagaaggtcgcccttcaggccctgaaagctagtgattggcacttggaaggagcttttgattttttctacagccaaccacaaatttctctgacgaactctcggcatcttgaagatctgtacaacagatacaaagaacctgatgttgatatgatcatggtggaaggtgtatctcagttttgcactggtcttcaggtggatccccaggatattgttatgcttgtcatatcatggcacatganagctgccacaatgtgtgaatttactcgccaggaattcattggtggactgcagtcaattggggtggattcaattgaaaagctccgtgagaaattgccatctttacgggctgagataaaagatgaccataatttccgtgagatatacaactttgcttttgcttgggctagggaaaagggtcaaaatctctcgcactggagactgctcttggaatgtggcagttgctctttgctgaaaggcactggccccttatcgaccattggtgccagtttttacaggtgaggcataataaagccatttctagggacacatggtctcaactgttggaatttgtcaagacgatcgatccacagttatccaactacgacgaagaaggtgcttggccctacctaatagatgaatttgtggagtacctaaccgagaatggattcgttcagcttaggaagtgaacaatgggaggcccacattctcactacttcaaatacaatcatgattgggctgtacaaacgtgtgagattcatctcggtctatacagtgttcagggcttggccttggcgttcttgcgcaactgatcgcaaacagtggacatgtatccttacgtgatgacatttgctcgcgcaaggggacgatttgatttgggaagtggtgactgccattgtggaattatcacttacggtttatttaatatatattgtggtcggcgc

SEQ ID NO: 16422 - DNA, 1126 bp, Oryza sativa
  ref <308>: DATABASE ACCESSION NUMBER: AK066913
  ref <309>: DATABASE ENTRY DATE: 2001-12-06
gctctctctctctcgctctcgctctcgccgcggagcttggaggtttgggtgagatcggagcagcgaagcggaggcagccgcagccatggcgttggccgctcgcctcgtctcccgctcccggcagctatactctgctcaagctgccttggcaaatggaggtgccactcaagtccgcttgtatgccaaggaggcagatcgtactcccgtcaatggtgatgacctattgaagggcatattttttgaggtaaagaagaaatttgagactgcccttggtgtacttaagaaggaaaagatcactattgatccagatgatcctgcagcagtttctcgttatgcccaagtcatgaagactgtaagacaaaaggcagatcttctatccgactctgagaggattaaatataccatcgacacctttacaaagggcatccctgatgcacggacttacttgaatactcttcaggagatcaggataaagagtggccttatagatgatatgggtgctgaggctatgatgatggaagcccttgagaaagttgagaaggagattaagaagccacttctgaggagtgacaagaagaatatgggtctcctcttggcagagtttgagaagataaacaaaaagcttggaatccgcaaggaggatcttcccaagattgaggaagagcttgaattggaaattgccaaaagtgagctgacggagcttaagaaggaatgtgttgaagcaatggaggttcaactaaagagggaggagttcaaagacgaggagatgcctgatgtcaagaagttggacatcagaaacttcctgtaggccataaatctctcaaggcattttgaaatgctcggacactccataatggttttcttttccagtgacagccggcgctgtaagcataccaatgaatgttattcttgctttttgtaataaaaactgcaccgaagtacaaagacaagtcaacggttgagttggattgcttgttaccttcctgcgtggagaattttgttttttgtattggcaatgtgaacgccaagcagcttactgtctccctgatgatgcacctgtgttggtttctctgatgatatggacacaccaggttgaggcttaggcaatggtttactgttttcgatt

SEQ ID NO: 16423 - DNA, 1683 bp, Oryza sativa
  ref <308>: DATABASE ACCESSION NUMBER: AK066914
  ref <309>: DATABASE ENTRY DATE: 2001-12-06
tttgatcattatacaactgcatacatgaactcaccttgttatccccttccggatatgtctcatgttaacggtaagaacaggaaggaattgcttgctatggctaaagtacaaggcgagagtaaaaaaggaacttcagtgttaccaggggatttgacccctaaggacgagtctccattttctcccccaagggtcaaggtggaagatgcacttggagaaggtttagctggtcgatcaccttcacacatagctgggggtgcaaataagaaagcatcaaatgttggacaattcaaagatggtgctaatgtagcaaaagttgaagatggtcatgtggatagaagtataggtgtgaaaaaaccccgatattctgcagatgaagggccttctttgactgaactgagtggatacaattcaaagagacatgaatttgacccagagtatgataacgatgctgaacaggcactcgctgagatggagtttaaagaaactgattcggaaactgatcgtgaactgaagctaagggtattgcgtatttacttgtcaaggcttgatgaaagaaaaaggagaaaagagttcatactggaaagaaacttactatttcctaatcctttggagaaggatctcacaaatgaagacaaggaagtttaccatcgctataaggtgttcatgcgtttcctttctaaggaggaacatgaagcacttgttaggagtgttcttgaggaacggaaaattcgaaggaggattcaagagcttcaggaatgtcgttctgctggatgccgtacattggctgaagcaaagattcacatagagcaaaagaggaaaaaggaacatgaggtgaatgcccaaaaagctaaggaaagtggtcagctcttatccaacactaaagtggtgcataagacgaatcgacctatgaaaatcgagtcagatggtaatttggatcagaagaaaggtggtgccagcttggattctactggcagggattctccaaaaaccacagggcatgcaggcactaaacattgggatgactgggatattgttggttttcctggggcagagctattaagcaccagtgaaaaaaatctatgctgtcagaacagattgctacccaaccattacctgaaaatgcaggaggttttgatgcaggaaatattcaagggtagtgtcgccaagaaggaagatgcccatgtattatttaaggttgaccctgccaaagtagataacgtttatgatatggtgacgaaaaagttgggtaccaatgaggaggccccgactgtttagccatgtttttgagttcctcaatcagcgcgtggtttttgatttgcagcatgactactgagacagctaaaatggaggctatacttgaattaaattggctgtagttgaaatttgtgtgaggtgtctgaagaagcacaataaggcatttcagccaaattgtaaaattatcgccccgattggaatgtgtagcatgagtttaccataccattactctccattttaagaggatggtttgccctcgttcgaagtgtaacgtgtaacgtgttgcagagccactaaaagggccttgacagtatagtgcctgaaatgatgtatgtaaacattgccacctttttcatatgtgacatcgttccgataccagacgctatttaattgttgtatttcactgcctaagaggtttcctttgtgttt

SEQ ID NO: 16424 - DNA, 987 bp, Oryza sativa
  ref <308>: DATABASE ACCESSION NUMBER: AK066915
  ref <309>: DATABASE ENTRY DATE: 2001-12-06
atggattctttcccccaatctcgctgcttctctctcgagtctacaggcggcggcggcggctagagcacagctcctcccaccggcgagcaggagaggggtcggcggcggcgagagggctaggctggggggagagggctaggttgggcggcggcggcggtggctgatagggtggttggaggagcgaggcgatcccgtccacctcgccgcgccatccctcgctgccgccaagcagatccatgcgcgggcgctccgggccggtgtgcccacctcccacccgctcctcgccaagcacctcctcttccacctcgccgtcctccgcgcgccgccgctccgctacgccgtggcggtactctcccgcctcctcccgcacgggccactagacccgttccccctcaacaccgtgcaccgcatcgctgcgggctcgttccgcccgtgcgtcgcgctcgagctccaccgccgccgcctcgcgccgcccgacacgcacacctacccgtcgctgctccaggcttgctcgcgcctcctcgcgctccgcgaaggggagtgcctccataccgaggccgccaagaacgggttcgtccaaaactcgcccgttcatctctacggcgcgtgtggcctgttcgagagcgtgcacaaggtgttcgatgaaatgccggtgcatgggcagaacctcgtctcgtggaattcgatgctcaacagctttgcggccaacgggcgccctaacgaggttctcactgtcttccgggagatgctgggcgtcaactttgcgccagatggagtcaccatagtcagtgttctaaccgcttgtgcagagattggggcgcttgctcttgggaggagggttcatgtgtatgcggaaaaggttgtgttggtggacaattcgcatgtgagcaatgccctgattaatctgtatgccaagtgtggtattgtcaacgatgcaaggctgatatgacttcatatgattgtgtaaaatgttgttgaaattttgcc

SEQ ID NO: 16425 - DNA, 4050 bp, Oryza sativa
  ref <308>: DATABASE ACCESSION NUMBER: AK066916
  ref <309>: DATABASE ENTRY DATE: 2001-12-06
ggcgtctctcctccttcccccaccaccaccgccaccgccactccattgatgctagatagggagcaggggcgagaggtgggcagccgcattaccaaaccgggagacgccgcctcgagctagtgctcgttgcagcagcaggaggaggtggtggtggtgggattccagagggaagaagaaaaggttgcgggagcaaaaggggaggagggaggcgagggccgaggggaaaaagggagaggagtgggggtgaatcatccaatccacagtccagctcctggtgtgcagtgtggcgctgatcggttgaggaggtgtgagcggcaaggtacgcgtggccgtcgtcgtctccgccgccgccgaagccaccgacacgccggccgggtcgatcggagccgcgggtcagatccagttcacgccggaattgcggcggattccggcgaccgtgaccccgccggatctgcattccgcgtggagcctccccgagccgcgccctcgcctcccatacattgtgcctgatggatcgtcgcagctggccatggaagaagaaatcatctgacaaatcatctagcgcagatgcttctcaaaattccaatcaagctgagcaggatgacaaagctccaaaatatgtgcagatttcaccagaaacatatgcacaccttactgaatcagaagaacaagtgaaaaccttaaatgaaaaggtgaaggccttgaatgaggacctctctgcggcacagtctgagatcactactaaagatgccctagtgaaacagcatgctaaagttgctgaagaagctgtatcaggttgggagaaagctgaagcggaggcctcagcactgaagcttcagctagaaactgttacattggctaagctagcggctgaggaaagagctgcccatctggatggtgctctgaaagaatgcatgaagcaagtaaggactgtgaaagaagaaggtgagcagaagctacatgatgtagtctttgcaaaaaccaaacagtgggagaagataaaggccgagtttgaagcaaagttacttgagtttgaacaggagctcattagggctggtgctgagaatgatgcactctcaaggtcactcgaggaacggggagaccttttgatgaagattgatgaggaaaaggctcgagcagaggctgaaatcgaagtcttgaaaaacacaattcagtcaggtgaaagggaaattaattcactgaaatatgaaattcatgttgtttccaaagagcttgaaatccgcaatgaggaaaagaacatgagtgtgcgctcagctgatgttgcaactaaacagcacatggaggatgtaaagaaaatatcaaaactggaagctgaatgccaaagattacggggtcttgttcgaaagaagttaccagggcctgctgcattagctcaaatgaaaatggaagtggagagcttgggcagagattatggagaaagcaggttgcgacgatcgcctgcaaagaattccagcttccatcgtcctatgtcccctatgtcccctgttcctgattatgcatttgaaaacttacagcacatgcagaaagagaatgagtttctgactgcacgtttgttatccatggaagatgaaaccaaaatgctaaaagaggccttggccaaaaggaatagtgagctgcaaacatcaagaaacatgtatgctaagacagcaggcaaacctccgtggcttggaagttcaaatgttgactggtagccaacgtaagagtacttcgaatcccaacatggatatccactttgatggtgcactgagtcaaaatggaagcaacccacctagtatgacctccatgtctgaagatggtgttgatgatgaaggaagttgcactgaatcttgggccaatgctctggtctctgagctctcacacatcaagaaagagaaaggagctaagagcagtgtgacagaaggctccaatcggttggaactcatggatgacttcctagagatggagaaactagcctgtttgtcatctgaagcaaatggacatgtcagtactgttgaaaaaatgaagattgatgatacggaagcttctttgtctggtattactgaaagagatggtgttaaagattcgcagtcagttttggcattgccagggactccatctaataaactgcagctgtctgacagctctccactcttgaaactacagtctagaatatcttccttgcttgattctgaatcaccacagaacaatgctggaaatatactagatagtatcagaaatattctaaaggatattgaagatgaggcagattcatcaaatgatagcaagactcatcatggtgacatggttgaagtagctgacaatggatcactaatgaagcattcaagcagcgggagcaagcatgctatggatcaagaactagtcaatgccattttaaagattcaagacttcgttaagtcacttgaccaagaagtgtccaagttccaagggcagtcttcagattgtgatggtttatgtgacaaaatacagcagttctctgcactagtagagaaagctctatcaaatgagaatgttctaaatgacattgttatgacgctgtctcttatcttgtcaggaaccagtgagattaagttcatgatgttgaaagagaacaccaaagaagctgacgataataatttggattatgttgataaagtgactttacttgaaaataaagtgcagcttgagccactaaaggacagcatttctggtccttgccttcctcgttcatcttctgatccggagattgaaggtcctactgactctggatgtgatgtcaagactgctgtgcagatatgctcatcagaggaattcgagcaacttaaatctgagaagttgaatttggaggcagaattatcaaagtgcaatgaagttatagaagagacaaaatttaggtttaaggagttggagaagagccttgaagagttgacatccaagttggttgccagtgagaaatcaaacagcttggctgagacacagttgaagtgtatggctgaatcctacaagtcacttgagtcaaggaaagctgaattagaaaacgaaataagtgctgcagtccaaaatagaagttttgacagctgaacttgatgatgaaagacaaaatcatcaggaggatataacaagatatagagatctcgaggagaagattgaaaggtatgagaacgagaggaattcaatgtgtgtggatgaggatgcagataccaaagcaaagcaggagaaagagatcgcagctgcagcatagaaacttgcagaatgccaggagacgatattgattcttggtcgccaactacaatctatgcgtcctccagcagaatcaatgggttcctcgccaaaccagcgaatggaagatttcctgcaggacgcggctggaacaaccgaaggtgttgaatactcacagaagccaacaggtcaactggatacagaccaggaaatgcatgcatcaggaaatgaatccccagtgaatgggtacaagacacacaatgccccctctgaagcggacggaagccctttcctttcaccaaacggatccaagcgcccaaagcatagatcgagatcatcttcctcaatttctaaccaattgcccgagaaacaaaaccggggtttcagtcggttcttcgccaaggaaaagatctaaaaaaagctgcttgcaagatgctagcgttggcctgctgattctttactgtgaatgacgggatgatgcaagccacaagttttctgtagagctacttgtgtattcttcgaggtgacgccttcagttgctggaataattcttcttcgctcgaagtcgagcggttaaggccagatttatttgtgagaatgtttagccatccgtacctccgtcccgctagagtgttctgggttgccgtgtgtttgaaacctcactgagacctcactgtacatgtgcttacttgcatgaagataatcgttgttggtttgtgtgtcagtgtcacacacctcttgtgaattaacctgtgtagtttgctcaaaccaagcttgctgtacagttaacctggattaatccgaaggttatttgttgtgcttgttgaccattgt

SEQ ID NO: 16426 - DNA, 1439 bp, Oryza sativa
  ref <308>: DATABASE ACCESSION NUMBER: AK066917
  ref <309>: DATABASE ENTRY DATE: 2001-12-06
gggggcaccaggaaggcggagagagaagaagttttccgcatcgcgaccgcgcggacgaggcaggctggccgtcggatcgggctgaccgcgtctcgtttagaaatatcctcgtgacttctcctcctcctgagtcgtcgtcgtcgtggtggtgctcgtcctcctcggcggcggaggcttcggggggcgggagatccgggcggcggagatggcgaagggagggggggcgctgctgccgatgtccgcggaggcggggaagggcaacgggggcgggggcggcggcggcgacgatgccgcgctgttcaaggggtccgccatgacgcggcgcggcgcggtcgccgcgctctcctacatggcctgctccgtgttgctagtgatgtttaacaaagcagcactgtcttcatataatttcccctgtgcaaatgtcattacgctccttcagatggtgtgctcaacaggccttctttatgttctgaggcggctaaagataatttcatttacaaatagcgagccatccgtgccttctgatgcgttattcttcgttccgttcagaatactgttgcgtactacacctctttctttggcttatttactctatatgttagcttcaatggaatctgtgcgtggagtcaatgttccgatgtatacaacactgaggcgcacaacagtagtctttacaatgacaatggagtatttcttggcaaaacagaagcatacgccacctataatcggcagcgtggctttgattgtatttggagcattaatcgctggagctcgagacctgtcgtttgatgctcgtgggtatgctattgtctttgtggccaacattacaacagctgtttaccttgctactataaaccgtataggaaaatctagtggtctaaatagcttcggcctgatgtggtgcaacggacttgtctgtgggccttcagtactttttctgacatatattcagggtgacctgaagaaggctatagaatttccctacctctattgcccctgggtttcaggcggtgctgctattctcatgcatgctagcttttctgctaaactacactatcttctggaatacaatcctgaattctgcactcacacaatcgatgtgtggtaatttgaaggatttcttcaccgtcggaattggctgggttctgtttggtgggcttccttttgatctgcttaatgttatcgggcaaggtcttggctttcttggctctggcttgtatgcctactgcaagatcaaagggaagtagatacggatgtccagtgggggtctgaaggagagtagatattgaagtttattttggaggggccaatgtgccatactgaagtagagttcgtgctgtttgctcctgcatatgggagagaaattttgtaggttttcctgtatgtatttaacacttcagtcctcctgaatacaatttcgagtgaacagccattgtttt

SEQ ID NO: 16427 - DNA, 1625 bp, Oryza sativa
  ref <308>: DATABASE ACCESSION NUMBER: AK066918
  ref <309>: DATABASE ENTRY DATE: 2001-12-06
ggacgcctcgtctgaacacaaaaccccgtaaaaatctccgcctccgcaccgccaccgtcgccgtcgccgtcatgatggacaccgaggggagcgagatccacatgggggacctcggcggcgcagccgccgccaaggcggaggatggagaaatatggacatttagcgtaagatcctttgaggcacctcccccagaacgaactattcatgtgaactacgaaggcttcgctgaagatgtgagagttggtgatgagcttcttgttgatggtggcatggctcggtttgaggtggttgagaaattaggaccagatgtcaagtgccgttgcacagatcctggtttgttgctgccacgtgccaatcttacattttggcgggatggtagtattgtccgtgagaggaacgctatgctacctaccatttcatcaaaggattggcttgacatagactttggaatttctgaaggcgtagattttattgcagtttcgtttgtcaaatctgcagaagtaattaaccatctgaaaagctatatagctgcaaggagccgtggcagcgatatagcagtcattgccaagatcgagagcattgactctttgaagaacttggaggagataatccgtgcttcagatggtgccatggtagcccgaggggatatgggtgcacaaattcccttggagcaagtcccctcagtacaacaaaagatagttaaactgtgcaggcagctcaacaagccagtcattgttgcgtcgcagcttcttgaatcgatgattgagtatcctacgcccaccagggccgaggttgctgatgtttctgaagcagttcgtcagcgtgcagatgcgcttatgctttcaggtgagtcagcaatggggagatatccagagaaagctcttagtgtcctccggagtgttagcctaaggattgagaagtggtggagagaggagaagcgccatgaggaactggaacttaaagatgtttcatcttccttctctgacaaaatatcagaagaaatctgcatttcggccgctaaaatggccaacaaattggaggtagatgccgttttcgtctacacaaacactggccacatggcctcactgctctcgcggtgccgtcctgactgcccgatcttcgccttcacgacctcgacatctgtgaggagacgattgaacctccaatggggcctcatccctttccgcctcagcttctcggacgacatggagagcaacctgaaccgtaccttctcgctgctcaaggccaggggcatgatccagtccggcgaccttgtcatcgcgctctccgacatgctgcagtccatccaggtcatgaacgtaccttgagaatcatcatgctcccctctcgtgtttgtttgttctgcccaaaacggaacacggctttagttgacatcatcttaagggcggttttctggtttgaaatttattcgtttgttctccattgtgttagacgacagaaccagagaatgttacaacaataatgctgcaacttccagcgcgttgtaaactctatgctatttagcctgatgtataaggccatgaactgttttgtcgcttactatgataggctatgtatttaccaataaacccttctatttaagctatgtacgaattttcctcatc

SEQ ID NO: 16428 - DNA, 2907 bp, Oryza sativa
  ref <308>: DATABASE ACCESSION NUMBER: AK066919
  ref <309>: DATABASE ENTRY DATE: 2001-12-06
ttggagcttagctgctgcgaagttacacggctacgcaccgttcttgctaactatatacgatttcttatacacttatttcttttgaggcatagcgtgctggctaagtataggtaggtagctagctctgccgctgcttataaaaaggcagtgctgcacggtggtgagcgtacctagctagagcatagagaagcaggaaagttttggagatcgatcgatggcacagcagcaagccggtgcaagaggcagcaagctggagatcgtcgccgcccggggaggaagtggcggcagcagcagcgccggcgatgcggaggcgccgccgttggacgtcctgaggcaggactccctctaccgcgacgcgacgcggccggcccacggccaccatggacaggagagctggatgaggacgctgcggctggggttccagtgcgtgggaatcctgcacgccgacctcggcacgtcgccgctctacgtgtaccagaacacattcaagtacggcatcaagcacgaggacgacatcatcggcgtcctctccctcatcatctacagcttcgtgctattcaccatggtcaagatcgtcttcatcgccctccacgccaacgacgatggcgacggtgggacatttgctctgtactcgttgatctcgcggtacgccaaggtgtgcctgatcccaaaccagcaagccgaggatgagctggtgacgaggtacaacgaccacgggaagccgccggcgacgctgcggagggcgcagtggatgaagagccagctcgagaagaagcccgccaagattgccgtcttcttcctcaccatcttcgccaccgcgctggccatcagcgactgtgtgctaaacccttcagtctctgtactttcggcggtcaacggcttgaaacttagagcacctcatctgacaacagacgaagtggtctggatcacggtgggaatactggtggtgtttttcgcagtgcaacggtttggcactgacaagattggctacacatttgccccggttgttgttgtgtggctgttactcatctcagggattggcatctatgacttggtcaagtacgatgtcggtgtcttgagggcgttcaaccccaaatatatcatcgattatttccgacgaaataagaaggacggatgggtccagctcggtgaagttcttcttacatttaccggcacagaagctctctttgctgatttaggatacttcagcatcaaatcaattcagttaagctctacctttgtcttgctcccatcagtgttatgcacctacattgggcaagcagcatacctaaggaaacacatggatcagcagcacatacaaaacgctttcttcaattccattccaagacctctgttctggccaatgttcgttctcgctatcatgacgtcagtcatcggttgccaagccatggtgtcttgtgcctttgtaaccatgtcacacttgcagacactgaattgtttcccacggattaagatactgcacacatcaaggcgttattcaggacagctgtacagtcctgaagtgaacttcttcctctgcctactttcctgtgtaatcaccttaagtttcaggacgacaggtttcattgtcaaagcacatgaaatttgtgtggtccttgtgatggttatcacaactatcctgatgactatagtcatgcttctcgtatggaaagtaaatatttggtggatcgttctattctttgtcgtcttcatgtcaacggagaccgtctacctatcagcagttctctacaagttcacaaaaggaccatacatgcccttggctatgtcagctgttctaatggtgatcatgttcgtgtggcactacgtgcatgtgaagcgatacaagtttgagcttgaacataccgtatcacctaataaggtcagagagctccttgaacggcgtgatctaaagagggttcctggtgtggggctcttctacactgaattggtgcaaggcatcccaccgatattccctcaccttatcgagaaaatcccgaccattcactcggtgatcgtgttcatctctatgaagcacttgcctatccctcatgtcgatgtctcggagcgcttcctcttccggcaagtggagcccaaggagtgcatggtgtttcgatgtgtcgcacgatatggatatcgggatactctagagatggctgatgactttgtcaccactcttgtcgagtacctccagtactatatccgggacctaaatctatacaacacggttgagccactcaagatgagctgcccaagcattagaattgatagtttttcctgggatagacgaccctcagggcatggcatttatgccgaggagatgcttacaccaatccaatcattttctgagctcacaatgcatcctgttggtatgagcagccgattagcgcaattccaaacaactaagatgagccttgaagagatgttgaagattgaggaagaccaaaagttgatccaacgagaagtggacaatggtgtggtttacatacttggggagagtgaagtggtagcgaaaccacattccaacttgcttaagaaagttgttgtaaactacatattcaactttctgaggaaaaactctcgaaaaggagagaagatgttgtctattccacgccgcaagttgctcaaggttggaatcacgtacgaaatataaacatgccaacaatcagtaagatggtggcttatacacaaggggtgtagatttgtcgagcaagcatatatcatgcatgcagggtttgcttacttgcaaatgtacttggattttgtttgcttgcgtgactctccatgataggaaaaaaaataaaagaattacatgcaaggaggaaaatatgccagcaaaatgaaaacagtcataatcgagaatatcacaatgcgatatatgggttccatatatatagaatttcttttttc

SEQ ID NO: 16429 - DNA, 2047 bp, Oryza sativa
  ref <308>: DATABASE ACCESSION NUMBER: AK066920
  ref <309>: DATABASE ENTRY DATE: 2001-12-06
ggtggaggagagtgaggacggcccacgcggagcagcagagagtggcgggctcagtgtcgggctcgccggagtccggccaatccggccggttcatgcttcattctctcggttctgtcttctcagtccgtgtgagtgtttcatcatattggctaccaagatgatcactcttcgtttatcaagagagtagggtgagatctcaatccgttgcaactgatgagtacttccttcgtctcagaatgacattaacctggtttacttgtaagaaagtaaagccatggactcctcataccagcatgacaagcctctgctggatgaagagaactcctcgcaagtgacccttgaatatacaggtgatggatctgtttgcatccgtgggcatcctgctttaaggaaacatacagggaactggaagggttcctcattagccatcgttttttcattctgctcttatctggcctttacttcaattgtaaaaaacctagtcagttatctcacaaaagttctacatgaaacaaacgtggccgctgcaagagatgttgcaacttggtcaggaacaagttatcttgcacctctggttggagccttcttagctgattcatatctggggaagtactgtacaattctgatcttctgcacgatcttcattatcggattgatgatgttgcttctgtcagcagcagttccattaatctctactggtcctcactcatggatcatatggacagatccagtctcttctcagaacatcatattctttgtcggtttgtacatggttgctttagggtatggtgcacagtgcccctgcatatcatcatttggtgctgatcaatttgatgacactgatgaaaatgagagaacaaaaaagagttcttttttcaattggacctatttcgtagccaatgcgggctcattgatctcggggactgttattgtgtgggtgcaagatcacaaagatttcagaaacctggaggaagccctcttgcgagaatatgccaggttgttgttgctgctattcacaaacgcgataaagatttgccatgtgattcctcagttctttatgagtttctggggcagagttcagcaatcgaaggcagccgaaaattggagcatacaactggacttaagttctttgatagagctgcaatggtgacaccatctgattttgaatctgatggcctactaaacacatggaagatttgcacagtcactcaagtggaggaactgaagattttgatcaggatgttccccgtttgggcaacgatgatattatttgctgcagttctggacaacatgttttcgacattcatagaacaggggatggtgatggagaaacacatcggctctttcgaaatacctgcggcgtccttccaatccattgatgtcattgctgtccttatactagttccagtctatgaaagagtccttgttccagtgttcagaaaattcactggcagagcaaatggcattactccactgcagcgaatggggatcggcctgttcttttccatgctctccatggtatcagcagcattggtggagagtaatcggttgcggattgcgcaggatgaaggtttggtgcacaggaaggtggctgttccaatgagcatcctgtggcagggaccccagtacttcctgataggcgtgggagaggtgttctcaaacattgggttaactgaatttttctaccaggaatcaccggacgccatgagaagcttatgtctcgcattctcacttgctaacgtttcggcaggaagttacctcagctcgtttatcgtttctcttgtgccagtgttcacagccagagaaggcagtcctggatggatacctgataacttgaacgaagggcatttggatcggttcttctggatgatggctggcttgtgtttcttgaatatgctggcctttgtgttctgtgccatgaggtacaaatgtaagaaggcttcctgaaccttgttaacattagcaatataatggtggtggaaaaggacaattgtgttgcaaaagcatgcacccgttttcatatataaaagtaagaaaatcttgctgc

SEQ ID NO: 16430 - DNA, 757 bp, Oryza sativa
  ref <308>: DATABASE ACCESSION NUMBER: AK066921
  ref <309>: DATABASE ENTRY DATE: 2001-12-06
gaccagcctggcctatcttcctcgtcctcttcctcctcctcctcctgcctagcctattttgctttggtcgattgctgctgctgtggtggtggtggactggtggtggcggctagcgagataataagagtgactggataggatggcgacgacggtggcggcgatgtgcggggcggcggaggagcgggtggtggggacgcacaaggcgcccggggcgtgcccgcggtgcggcggcgcggtggtggccaccgacgtcgagagcgagcgccgcatcctctgcctcccgctctgcgtcaagagcaagcgcaagtactcctgctccaggtgcctccgccgcctcgtcaccctctacagctagacaaaacttcttgctactttcatcacagtggttaatttcttgattaggttcatttgcccttgattaattaaggataatccatccttccttccttcctagctctcgtctcggctagctagtgtgtgctcttcttgtctagcagtacaactagttgatagggactagctagctgatcatcggcagatggattaatgtttcgtctggtgcgatcaaccgtgtgtctaatcttgcgatcagcggacagcagatgtgcctacatgtgcatcacgtgacgctgtgcgtgcctgacgctttttgtgttggtatgtttgtaaaattgtaaaaaatgtaaatcaggtgtgtgtaactatgtgttcccagtgtcttgtatttactcctccagttagtgaaaactgagtgact

SEQ ID NO: 16431 - DNA, 1632 bp, Oryza sativa
  ref <308>: DATABASE ACCESSION NUMBER: AK066922
  ref <309>: DATABASE ENTRY DATE: 2001-12-06
gacccttccacttccactcgctggcgatagcaccgcaccggagcatatgctctccgcagccgccgccgccgccgccgacgcgagcttccatggcggagctccccgacgaagaagaccgcggctacgctcctgcctcgcgtccccgccggcatccggtggaggaggaggagactgccgcgagtccgaaaaagcgagacgtttgctcgtggagagataccaggatggggtttccaagaggtatatactggatggaaactctaagctacagattcaccaggagaagaatgaacatatggcgaacacattggaagaagaagaaaaagaagaagcaaattcttcgattccccgtgctattaaggattttgtacttcccgcggggtttccagggtctgtgtcagacgattacctggaatatatgctatggcaattaccaacaaatgtaacaggatggatctgtcacacgctggttacatcaacccttctaaaggctgtaggtgttaggtcctttacaggaacttcagcagctgcttctgctgctgctataagatgggtatcgaaagatggcataggggcttttggacgtcttctaattggtggacgattcggaactctttttgatgatgacccaaagaagtggcggatgtatgccgatttcattggaagtgctggaagcatcttcgagctcatcactccgctctatcctggatacttcctcccacttgcgtccttggggaatctagcaaaggctgtaggaagaggatttagggatccatccttccgtgttatccaaaatcacttcgcggaatctggaaatttaggggaggttgctgcaaaggaggaagtatgggaagtaggagctcagttgttaggcctttctatcggtgtatttattatggatacatcaggtataaagtcatcatacccaacacttgctttgacatggcttggtgtccgtcttctacatctttggtttcgctatcagtccctatcagttctcaaattccgcacagtaaggtaaacttgaaacgcgctcggattctcgtgagatcacacgttgcaaagcacacagttcctgattatgtgacttgcaacgaggaggagaatattttaacatgggaaagattcttgcatccacaaatttcttttggtgttcccatggagagaatgcttggtgaagaggaatccagtgacgtggtggatagactattgaagttgtacagaaatgagaaatacatcctctttctcaatccgattggaacaggccgagcagcattttttgttacattcaaggaggctgcaacgagcatgtcagtcctcaggagcctatggcaagcgcattggcttgacaaaaatcagctaaggcaggatgatgttttctcttggctagaggagagcgttcttgcgttggagcacggattccctgacttcctcaaacagatggaaatagctggctgggatcagaaccagatcatactgaaggtgccaaaagaacccatcatggtgatggaacaccctgaccaagaggtgtaagatgacaatgccaactaactaatccattctactccctccgtgttttttaaatgtaaaggcgtattgacttttggacatggcgttagaccattcatctcatgc

SEQ ID NO: 16432 - DNA, 965 bp, Oryza sativa
  ref <308>: DATABASE ACCESSION NUMBER: AK066923
  ref <309>: DATABASE ENTRY DATE: 2001-12-06
gacgcgccggctacgtcatcgccccacccaccccgctctcctctttgcttccgctcccccgaaagaagcgttggggggagagaaggcgcggcttggggatttgcagaggctgttaaggatgaggcagcagagtatgattggccaggttgctgcattgtaccctgtgaaggtattccatgatctgccgcatgggcgaaacctcaattccaatactaatggagcacataggtctctttcggaagaaaatggaacacttccagaagagaatggaacacatctactcaatgttatcaaactaccacaaatacatgctttggcatttttgggttggcaaattggtaagcaaagaagaaaacaaaatgatatatgtgagaaggatcttcagcggtccgcagctgttctgggatatgcagcgcatgcaattttgctcatagcctcctatcttcatgttcccctccgataccctttgcactttggaggatcgcgatcttatgtgagtgattgtttgccttcagctgaaacagcatccattgcttcagcagagcgtacatgtatcaacatgaccgacccaaaactgacagtttacccccttttcgtggaatgtcaagaagatgaccccactaaggcatcctatgcaatctacttgttgcacaaggatacagagcagcttttgaactacattggagctgagagctctggaaggcgcgtatttgataatctgcaagagcttattaggatcatacaatcggatgagtatgtatacagttgatctattctgcggtaactgtattcttggagtctttgcgatgtagagatggtgttcatacacatgtaaaaatagggtttcttcgtgttcttttattgtgattcttgccttctttcggtgtgccgagtttttgtatgcacaggaaagaggtgcattgggtgtttttttgctagatgaaaatgaatgaaatgatatttac

SEQ ID NO: 16433 - DNA, 1188 bp, Oryza sativa
  ref <308>: DATABASE ACCESSION NUMBER: AK066924
  ref <309>: DATABASE ENTRY DATE: 2001-12-06
ggccaggagaggagttgggttgattcgcagcaaaggcacggcacggcacgcacgcactcgaattcaccttcaccttcagcgcgagccgcgagcgagagaggaaaagggaagcgacgatctctgcccttctagaagggtttgggatttcttgactggacgacctcgtgcgatttcgggaggcaggagccatgaacggcaataagcagtccctgatatacagcttcgtggccaagggctccgtcgtgctggccgagcacaccgccttctccggcaacttcagcaccatcgccgtccagtgcctccagaagcttccccccaacacctccaagtccacctactcctgcgatggccacaccttcaacttcctcgtcgaccgcggcttcgtgtttctcgtcgttgcggatgaggccgttggaaggagcgtgccgtttgtgttcctagatagggttaaggaagacttcatgcagcggtatggctccagtatcgacgaggagggtcaacacccgctcgccgatgatgcagatgatgatgacttcctcttggaggaccgatttagcatcgcctacaatcttgaccgggaattcggaccgaggctgaaggatcacatgctgtattgtattaatcatccagaggaaattagcaagctctccaaagtgaaagcacacctcacggaggtcaaagggattatgatggacaacattgagaagatattggaacgtggagagaagattgagcttttggtcggcaagactgaaaccttacaatcacaggctgacagcttccacaggcatggaagagagctcaggcgtaagatgtggcttcagaacctgaggtttaagttgatggtgggtggtgctgttgcggcgttgattctcttcctctggctgattatttgcgggggcttcaagtgctagaacattgaaagcctttttctttgttttgcattcgatgtgtttaccgtgtcgtgtgcatatataacgaccagcaaatcctgctttcgatatgcttcgtgcagagttaaatctccttatggacctttattccttgtagcctgttctcatgtttcatagtattacaataggggggctctggaaatggaatacttgtgtaaacaaaccttgtgaaaggagacaacttagctatctgtattatgtacattctgaaatgctaatagcttatttcaatctc

SEQ ID NO: 16434 - DNA, 1622 bp, Oryza sativa
  ref <308>: DATABASE ACCESSION NUMBER: AK066925
  ref <309>: DATABASE ENTRY DATE: 2001-12-06
gctcgaacccaccaaaactggccatacataggcacgtagccgcatcgaaccggatccgatccgatccgacccaaccgcgaataccttctcgtcgaagaagcatcgaatcgatcgagagagaccgcgtgaccatccgcggagttcgtcgtcgtcttcgccttcgtcttctccatccaccaccgcgctcggcgaggcgatccaccggcggcgaggagaggcgcgcgggagcggccggagatggcggagaacccgcagctgttcgggaacgggatgctggtgcccttctacggcgagatgttcgtcctcgcccgcgacggcgtcgagttccacgtcgacaagatcccctcgtacgtcccctccctcctcctcctcctccgcgtgtcctttccggtttctgccgcggcgaggcgaattgaattgagatgctggggcttcgatggcgatcgggcgagggatcgtggtgtcttagatggggggaattaggggattaggttaggcacagcgggtgtgatattggcgcgccgaaattgagcattgggctgtatgatttttgtccgggtggaactcaacgctgaaattgagcttcgcatcgagtctaattggcggttactttgttgatctgtacgggttgataggttacaaaccgggacgcttaatcttgctttggttggaaattacaaatgttatctccttactgagtacagcaactatgggaacagttagggatttagtgtcacaataatgagcattattcaccatctcattaccacgaggaatgcattttttttcattacattcaagtgttacgtttatgttccgtcttgaaaagttcatcttcgttgtaaattaatcactgctttggggcgtgggctaattagtcttctcttgtggctgctatgcttgtcctcagagctcctggtggtcatgcgaaaacaaagggcacaatttacctgtcaaacataaggatggtctttgtcgccagcaagcctgttgggaacttctttgcttttgatatgcccctgttgtatgtgcatggtgagaaattcaatcagccaatatttcactgcaacaacatatcgggtttcgttgagccggttgtaccagagaaccagaacagggccctgtactcgacccacactttcaagatcttgttcaaggagggtggctgtggtacctttgttcctctcttcctaaacctggttgcatctgtgcgacgctacaatcagtttgaggcccagtctgccgcaagtatggcgccacgtgtggacccgctacaagctgttcagactcctgttgatgatatgatgcgtcatgcgtatgttgatccgaacgatcctacaaagattttccttcagcagcctgcgccagagtcacagctgaggaggagaaactaccacggacgggctgacaatgcgtactagtgttcttacctgattgcaaagaacccatatgttcgagcctatgaacatatggatttcggcctctagtcgcgtatcatgctattacgtgggtgtgaaatgaaagcttcatgttgcacagaaacctattgtatatcttttatgccatattcagttgcatatctcaataatggtgtacatattccgtagtcctctggacttggt

SEQ ID NO: 16435 - DNA, 1942 bp, Oryza sativa
  ref <308>: DATABASE ACCESSION NUMBER: AK066926
  ref <309>: DATABASE ENTRY DATE: 2001-12-06
gcatgacagcatcagtattccagtagcagcggagagagagagggagcggccaaccaaaagcccaagccaagccaacgccgcgtcgcgtctcagccagccagcgaactgcctccccgccgccgcgctcgccggcgaactccccccacctccggcggcccggcccggcccggccccgcctcgctccccggcatcaggtgtgaatatgtcggacagtgcgttgaaagatctgaatctagctcagtcagcagagctggagaaaaccaaggacagttctgccaagtcttgcatcaccaagcctgtcttgaatggcaacaaatgcaacaatacggaagaaaatgctccacctgtactccctgatgctgtgactaatgggtgtgaagctggaaatgcagatgttgagtatattgattctgagagtctgacagatcttgaagatgctggtgcaacccttagtactttagttgcaaggttggattcaaaagactgggttatgacatgtgaagctctaaataatgttcgtcagttggcaatatttcacaaggatagattgcaggaacttctgtaagttgcttaccttgttattcaatcaaaaggatctttgtttttgggcaaatgttacttatccatgcctgaagctatagaattacatcattctctgtatcttaatttttggatttgaattatagggaacctctagttcctcttatcatgaaatctgtctgaagaaattcattctgttttttttattggacccaggtttattctcttcgattgcttgtatctcaaaacactcaagaatccaaggagtgctgcctgtaaagctgcactcatgacctgttctaatcttaatttttggatttgaattacagagagcctctagttcctcttattgtgaaatctgtcaagaatccaaggagtgctgtctgtaaaaccgcactcatgacctgcgctgatattttcaaggcatacggtgacctaatggttgactcaattgatccactggtgtgtgtttctcagttctcaaacttccattcacaattacactagttctttttcctgtactaactacgctatttctcaaaacatcttttctgccaaatttgttctcagttagtgcagctatttctgaaatcttcacaagataagcgttttgtctgtgaagctgctgaggcagccctcatatcgatgacaagctggatcgccccttctgctctgttgccaaaaatgcaaccttaccttaagaacaggaatccacgaattcgagcaaaagcatcaatgtgcttcagcaagagcgtcccaagcttgggtgtggagggaattaaagaatatggaatggataagcttgttcagatcgcagcaactcagcttagtgaccagcttcctgaatccagggaggctgctcgcaagctggctttggagctacaagcattctatgagaaatcccaagcttcgagttctggtgaagttgacgacgcacctgctacctcacctgatgctgatgctgatgctggtgctgaatcatgggaagctttctgccaatcaaagctttccccattaagtgcacaggcaatccttcgtgtcacctctacgacgaaagagggtgtggctgtgggtgtcacctctacccctccgaaagaaggcgtcactgttggttgctagcatcaggaggtagtagatgcaatgaggttgtggtttttccatccgattcaccttttgctgtacatggttatggttgttctttctctacatccaatctgggattcgttcgttaagcatcggttcgagagttgaggtgtgacctgtgggtgttaatattggtgcgagatatacctgttatagttgaccgtatgatcttccttttctcccactgcttggtattgattggtcaggcgaattgtagaatttcttccactattcaatattactacacagtaatttttcc

SEQ ID NO: 16436 - DNA, 3011 bp, Oryza sativa
  ref <308>: DATABASE ACCESSION NUMBER: AK066927
  ref <309>: DATABASE ENTRY DATE: 2001-12-06
gtcagtcctctccctcccgtagaccgtggatatcgtagaacaaacggaagaacacgagaagcctctcgaagcttccagaatcccgattccaccagattcctcccccccccccccggagccctaattctctcgcgcggttcgtcccgcgacctcccggttcctgccaatggccgacagggagaaggcggaggagacggaggaggagtacgagagcgacctcgacgacgcgcccctcccggcggtgcggcgccgggacgcggcgagcgacgacgacgaggaggaggaggaggaggaggaggaaggggcgaggccctctccgcctacgaaggccggatccgacgcggaatccgacgggcaaggcgccgccgaggtgtacgacgacgacgacgcgtacgaagatgacgaagggtacgaggaatacggggaggtgtacgaggagttcgagcaagggcgaggcgttgcgggcggagtggccaccggggcggtggccgcagcgggggaggaggcggggatgggtatgaagggggaagcggaaggtgaggcgtcggcggcagcggcggagggagaggaggggaagaaggggagcgagccctatgccgtcccgacggctggcgccttctacatgcacgacgaccgcttccaggaggcccgtggccatgggcgccaaaggagaatggtgggtgatagacggctgtggaatgctaaagaggatcaagcgtgggtccatgacagatttgatgaaatgaatttacatgatttccataatgactacacaagaagaaggcccagaggtcgatttagaggacgtggtggtgcacctgttggtaaagttcgtggtggtagccgtgataatttcagaggcaacaggtcgcagacatactatcgtgatggtgctaagaactacatatacgttccgaaagaacctcatagttaccatgataacacaaagaaggttcaacaggttctgaatgataatggcaagaatagaaccatcaaaccacctaatcctcgtgatggcgatgccaacaatttcgattttgttcgaaaagagtctcgccctctttatggcaatgccaaaagtaataagagtgcaccgagagtagttcgaggaagaggctctaaacgttaccaaccacattggaggagtaccgctgagatatcttcagagcataataataaatcacaaaatcttgaaaacacttcttcaaatgcaaacttgggaaaacaccaacatcaagcttcaaattctcaaccagaacgaggatttccgatgaagcagagctttgcatcaaatttgaattcagcttcacctcccttttacccttctaggccatctcatcaggaactcccagtgagtcagaggggggatggacaacccagtaccactactagacacttctcatcccccattggtatggagcatgtctctccaaccccacagtatggccctctcttaagagggaaagcctttgtaccgtctgctgggcatggcaagttgcatgctgaagttcctataaagggcatggatcatccttcatttcattcatctacatcatcatcaactagtcaatttcctatagctactaatcaggtcactggaaattcggctaagtccccacacccaattgtccaacaaaggttggttcaatcatttaatcaatccacaccaaagatgcctggtcagatgtttgctgcgcaatttgctagcagtgataaattgccatcttccatgcaatctacatcaacaattttgactgaaggcactgaaatttcttcacctcgtggttccaacaaatctaatactagattgatggcaaagggacaacatagtgaccagggagaagaacatgcttcttttatgtatggtggagctcaagttcttgggactacaggatcacttggtgaccaaaatttccatggaacccctgcactatttccagttatgcagtttggaggccagcatccaggtgggactggcgttccctcaattggcatggctctaccaggatttgtgtctcaacaacaacttggtctgagcaattctgaaatgacttggctaccgatattggctggtgcttctggagctttgggagcaacgtatggttcaccttatattactgtagatggcagctattatccccgaacttctgaacatgcatcttcatcagtttctttgagagaacccagtgcctcttctcagttgaagtcacaagaaataactgaggctttaaatgatgaacttagtcaacgccaacataaacctcggagatattcggaaatgaactttggcaaatgaacatagtgacgatggtgttaatgaggacttcatctgttagatttgggtctgtgcaagacttctatctcaaggcctttctgggtccttgcaacacttcagtgtctgatctgtagcactttgggctgtatccagaatgaatgccaggtttgacagttgaaggtgtttatatccttactatagtcatttgcagtgattattctgatgggcagttgctattgtgtaattaggtgagatttacatggtacaccgtccatgttgctattgatcatcttcacattggcatgcatatatgaataatgcgcgatggagaatacgtgaggtctctgttattgtaagctccttttcttggtgaaagagggggaatacaaggtggtgttgggtttgcttgtgttgctcagctgacttgatcactgtcggttaatccgttatgacattttgaagatctgctatgtgatgtgttccctttgctgaagatattgtcgcgatatactagttcggtacgtgttagtgttacacagagttctttctgttcagttcatactacttgtaactgtgtaagcaccaggtcttctgaattactacgattttaccattggtttccctttatagtggagtatgatattaacaactactacgtagaaagatgtaaaagtgagaaacttatgtgaatgttgtacatgcacgtcttataaaaaaatatttatttattttggtc

SEQ ID NO: 16437 - DNA, 861 bp, Oryza sativa
  ref <308>: DATABASE ACCESSION NUMBER: AK066928
  ref <309>: DATABASE ENTRY DATE: 2001-12-06
gctctctctctctcttctcttcttcttcttcaattttcctcgcaccgtcggcgaaggcgaagcggaagaggcggcggagcagtagctagtctactagctagtagtagtagctcgccggcgagcggagaggaggagccgaggaggaggaggagcttcgtggccggccgggccgccatggagagccgcaaggaggaggagcagcatgggggaggaggggcggtggggtggatgacggtgccggcgttcggggagtgggacatgaagaacggcgcggtgccggactactccatggactcctccaagatccgggagatgcgcaagcagaacaagcgcgagctctcccgcgccagcctcggcggggacgacgacctcctcgccgcgcagcagcacaaggccgccgcgccgcagcccgcccccaacgcctccgccgccgccgacgaccaccgccggccgctccacgccgcccacgacgactcgcccacggggaggaagaagttccttagctatttccagtgctgtataagagcctggagaactgtgaccctgcccgtcgtgttggcggcacgtaactcctgcgcaaatagctcttaggtttcttgggtactgtaaagtttgcgtaaatgtgtaatctccacctgctctgtaatctgttgctctttgcagagaaaaaaaaggggaccgattgtgaacaatgaaaaagcgtatttgttcatgctgtttttcgcagaattgttcgcgacttccggtgcagtatcatcgtcctttgaaagggataggatccgaggatgtatgagtataacttatgattgatttggttcttggttggagaatataattttcacctggtgacctgtgatgatg

SEQ ID NO: 16438 - DNA, 871 bp, Oryza sativa
  ref <308>: DATABASE ACCESSION NUMBER: AK066929
  ref <309>: DATABASE ENTRY DATE: 2001-12-06
gcgcattcctcttcttgaaggggatcgctgatcagcaaggttctgaggtgctcctgacctgcttccacaatgcaagctaaagaatccaaaaagtctagggacaggggccgggaccgtgtgaaatggaatgaagaaaatttgaatgacattgagtcgaccaagccagtaagagaaaaaatcaccgagcctaagacgccatatcactcaatgattgatgaagatgatgggactgtttctccaaaaagaactattgaagaatcagtggataagtccactcatgctgatgcgattaagactgctttgatggaagctgtttcaagtggaaaattatcagcaagagaacatttggaatcctgtagtaatgaagaagaagaagaaggagaagaagaagaagaagaagaagaagaagaagaagaagaagaagaagaacaagaagaagaagaagaagaagaagaagaagaagaagaagaagaagaagaagaagaggtggccatcaaacaaggcacagatttcgaagagcaacggaaggctcactatgatgaattccgcaagatgaaggaactgcgtcggaggggaacgccgtcacaagagggtgatgaatgatgactctggcaccgtcgcacaactcggaagcatatgatcagcgaatcctcggcatgttaaatattggcagtggcaggaatgttttacagatatcctactaaaccttaaaaagctcatgtgactatctgttctcttgcttaattattagtactggtcctaggacagtaccaggtaaaattttggctcttattatggaggtaagaaaatctgtatcgatcttgtactcaaaacttatgctcttgttcatgctgttgattacaaagttcgc

SEQ ID NO: 16439 - DNA, 3290 bp, Oryza sativa
  ref <308>: DATABASE ACCESSION NUMBER: AK066930
  ref <309>: DATABASE ENTRY DATE: 2001-12-06
ggccgggaccttatccctctcctaaacccccaccccctcccccgaccctttcccgttcctccttcctccggccggtgcggcgcccctcccctctccaacaatggattcttgcgctctcttcctctctaccccgcgaccacctcctcctctcgtccccgcgcaccgccgccgacccctcgcgagccgctcaggcctccgccgccgggagggttgcccctgcagctgcgcctcctcctcttcctcctccggtcgtgccggttctcaggaccgcccgcccaggccttggcagcagaagcagcggacgcagcgtcccggccgcggcgaggccatcgacccagtcggcttcctcgccaagcacggcatctccgaccgcgcgttcgcgcagttcctccgtgaccggtacaaagctttgaaagaccgtcgatgggagctgcactctcgtctaattgatctgaaagaggcatcttctgggtttgagttaatgggcatgcatcgacatcggcagcaccgtgtggatttcatggagtgggcaccaggtgctcgttattgttctgtagtgggtgattttaatcagtggtcaactactgaaaattgtgcacgcgaaggtcatttgggacatgatgattttggatattggactatcatacttgaagataaacttagggaagggcaagaaccagatgaatattatttccaagagtacaactacgcagatgattatgacaaaggtgataatggtgttgatgtggaagaattgatccacagaatgaacgaagagtattgggaacctggagaaattaagtcacagaagtctcggttagaggtggttgctaagctatatgagcaaatgtttggtccaaatggtccacaaacagaggaggaactaggtgacatacctgatgctgaaacaagatataatgagtggaaagccttgcagaaggatgattcagcaagttcgttgccttgctatgatatcattgataatgggcgggagtttgacattttcaatgttgcaaccgatcgagtgtcatttgaaaaatttcaaggaaaatcaccacctcttgcttactgggttgaaatgaggaaagggcgaaaagcttggttggagaaatatgttccagcaatttctcataaagacaagtaccgtgtttattttaacactcctgatggtggtttggaacgcattcctgcttgggctacttatgttcttccagatgctgaagggaagcagtcctatgcagtacactgggatcctcctccagaagaaatttataaatggagatttgaacggccgaaggtcaaaggttcacttaggatatacgaatgtcatgttggaataagtggatcggagcaaaaaatatcgtcatttcaggagttcacatcaaatgtcctccctcatataaaagatgctggctataatgctattcaattgattggaattgtggaacacaaggattactcttctgttggctataaggtcaccaattatttttcagtcagtagcagatttggctcgccagatgacttcaaaaaactagtggatgaggcacacggccttggattagtggtgcttcttgatattgtccactcctatgcatcagcagatgaattggttggcttatccctctttgatggttctaatgattgttacttccacagcggaaaacgagggcaccacaaatactggggtaccagaatgttcaaatatgatgatattgatgttctacacttcttattgtctaatttaaattggtgggtcactgaataccgtgttgatggattccagtttcactcactgccttctatgttatatactcataatggcttttctactttcactggtgccactgaagagtattacaatcaatacgtcgatgaggatgcgctgatatatttaattatagcaaatgagatgttgcatgagcttcatccagatattataacaatagctgaggatgcaacattttatcctgggctatgtgagccaaccactcaaggcggattaggatttgattactgggtcaatctttcaattcctgaaatgtggttgtggcatcttgaaaatgttcctgagcaagaatggagcatgaataagattatgagagtactagtaaacaacaacagtaatatgctatcttacgtcgaaaatcacaaccagtcaatatcagggcggaaatcttttgctgaaataattctttatgagggaaagtgttcaaatagttctgttgacaatgatttgattttcagggcttcctcattgctcaatataatcaaactaattacttttacaacaagtggtggtgcatatctcaacttcattggaaatgaatttgcacatccaaagagaattgagtttcctatgtcaagcaatgactattccttctgcctagctaatcggcaatgggaactgctggacaagggtgtccataaacatatattcaactttgacaaggatatcatgagcttagatggcaaagagaggctaatttctgggggttcacccattgttcatcactgtgatgacactagcatgatcatatattttactagaggacctttcctttttgttttcaatttcaatcctgacgcctcctatcagctctattctgttggtgtggatgaagctggtgaatatcagcttatattgaacacagatgaaactaaatatggtggacgtggggagctgacgagcaatcaatatatgaaaagaaccagtgacaatagggttggtggttgccgcaactccttggaattgacattaccatctaggagtgctcaggtattcaagttggtccgaattttgagaatttagattctcaaggatgagcattgttgatagaccaagcaattcgggtcctcagaagacggaacttctctgttaatatctgaactcttgcaaacttaaagattcgcatggcaaaaactgaggggaaaagaacaccaccgtagtgagaggatccttcaggtatgaatgtccatgcagatgcagattgttgggttgatgttcgacgtctctgatttgaccttctgttgtggtacaatatgaagtattgcagtatttatttagacctcaaattgcctgttctgctcactcgtgtaccttgattccatgcctagtgtgggcgtggcaccgtggctagtttaatcaaggatgctatagagtatatagactcatagctccacagtgaaacgctcataaggagtgctattgaaactaataaggctttgtttgttccagctgggaacctcgtaaggagtgctattgaaactaataaggcttcgtttattcc

SEQ ID NO: 16440 - DNA, 2984 bp, Oryza sativa
  ref <308>: DATABASE ACCESSION NUMBER: AK066931
  ref <309>: DATABASE ENTRY DATE: 2001-12-06
gattgccattgccaaccccctccaccctcacctgttaaagcactgcctcactccctcccttctcaacccggattccacctctcctccgcccgccacccaccgcgttctctcccatggacggcgacggctgggtctgggtgcggcggccggccgacgacgacgaggaggagcggccgctgaaggtggtgttcgactccccggccgagcacttcacggacgcggcgcccatcgggaacggcagcctcggagccatggtctggggcagcgtcgcctccgagaagctccagctcaaccatgataccctttggaccggcgtgcctgggaactacactgacccaaatgcgccatacgcactcgctgttgtgaggaagctcgttgatggagagaagtttgttgatgctacagaggctgcctctggccttttcggtggtccaacagaggtttaccaacctcttggagacataaatctggagtttgactcatctagtctggggtatacttcttacaaaagagagctagatctacgtactgcaactgtttgcatcagctataatattggggaagttcagtacagtagagagcacttctgctcaaatccacaccaggtttttgccaccaagatctctgctaacaaatcaggacatgtttctttcactttatccttaaacagtcaactaaaccacaatgttcggataacaaatgcaaatgagatgattatgcaaggtacatgtccaggacgaagacctgcactgcatcacaatggggccaacgatgctattggcatcaagtttgcaactgctgttgggctgcagattggtggcacttccacaaaagtcacaattattgatgatcaaaagttaagaattgatgctgcagattgggttgttttgctggttgcagctgcttcctcattcgatgggcctttcgtgaatccttcagagtcaaaattaaaccctgaagtagctgctctaaatacattgaatatcagcaggaatgctacattttctcagctcaaagctgctcatttggaagattatcagggtctttttcaccgtgtaactctgcaactatcgcaagcatcaatgcttgagaaagatatcttggaagaagttgatcatgacgtaaagactacagcagaaagaattaattcctttagaagcgatgaggatccttctttggtcgaattgttatttcagtatggtcgctacctgctcatttcctcctctcggcctgggacacaggtatctaatctgcaaggaatatggaaccaagattttgcacctgcttgggaggcttctcctcacctgaacataaaccttgagatgaattactggccaacacttccttgtaaccttactgaatgccaagaaccactatttgacttgataggatctcttgcggttaatggaacaaaaacagcaaaagtcaattaccaagcgagtggctgggtaactcatcacgtcacggacatatgggcaaaatcatctgcatattacgtagatgcgatgtatgcattgtggccaatggggggtgcctggctgtgtacacatctttgggaaaactaccagtattcactggacaaagaatttttggagaaaagagcatatccattactggagggatgtgcaatgtttttaattgattggttgatcaagggaccaggagactatttggaaacaaatccatctacttctccagagcatcctttcatagctcctggtactggtggtcaccttgctagtgtgagctattcaactacaatggacatctctattatccgtgaagttttcctggctgtcatttcgtctgcagaggtcttgggaaaatctgatactaatctggttgaaaggatcaagaaggcactcccaatgctccctccagttaaaatttctaaagatggcacgatcatggaatgggcacaagatttcgaggacccagaagtccatcatagacacctgtcacatctgtttggtctttaccctggtcatactataaccatgcagaaaaatcctgaggtttgcaaagctgttgccaatagtctccacaaacgaggggaagatggccctggatggtcgaccacatggaagatggcactgtgggcacgccttctgaatagtgagaatgcatacaggatgatcctaaagttgatcaccttggttcctcctggtggcaaggttgactttgagggaggattgtataccaatctttggacagcacacccacccttccaaattgatgcaaattttggattcacagctgcaattgctgaaatgctgctccagagcacccatggtgatgctgatctctacttgctaccagcactgccgcgcgaaaagtggcccaaaggctacgtgaagggattgagggctcgcggcaatgtgactgtgaacatcagctgggagaaaggggagctgcaagaagcaacggtgtggtctagcaacccaaaatgcaccctgaggctgcactacggtgaacaagttgctatggtgacagttttagggggcaatgtttacaggttcaatgggggtttgcagtgcgtggagacatacatggccccttgacaattgaacgccctctgcatttcagtgtttacggtttttcatcgttttagagtattttgtgtggacatgatgatgaattgatgcgtgcattggaataatttgcttttgtaaaagatggtgcatgctcttcaagatagtcaaggagctgtgcatggatgtctctgctgtatatggctatgatgtagtattgatttctggtgtatggcaactttatctgttgtatatatgtctaccataatcttttactaggatttagtagaaagaatgtgactatttcagttatagattacctttttcaaaactgtatgatggactattttgttgagttattttttaaaactttcaagaggtttgtacttttgtatgtcttttagattcttgtagtggatgcttcaatcagtatatttttggtttatacttgtt

SEQ ID NO: 16441 - DNA, 2327 bp, Oryza sativa
  ref <308>: DATABASE ACCESSION NUMBER: AK066932
  ref <309>: DATABASE ENTRY DATE: 2001-12-06
ggaactcactcgctcacacatacaagcgcagttaagattagttaatccaagctctagctcgatcgcgcggtcgccggagctgaggtagacgaaggagtgcgacgagctaagatgggtagtggaagcgcggcgaacggcggcggaggaggggcgggggcggcgagggtgccgatgccggcggcgaagccgttcctggagacgctgggggggaacatgaaggagacattcctgccggacgacccgttcagggtggtgcggcgggagcgcgggtgcgggcggcgcgcggcggcggcgctccggtacgtgttcccgttcatggagtgggcgccgtcgtacaccctcggcaccctcaagtccgacctcatcgccggcatcaccattgccagcctcgccatcccccagggcatcagctacgccaagctcgccaacctccctcccgtcctcggcctctattcgagcttcgtgccgccgctggtgtacgcgatgatggggagctcgagggacctggcggtggggacggtggcggtggcgtcgctgctgatcgggtcgatgctgagcgaggaggtgtcggcggcggaggacccggcgctgtacctgcacgtcgcgctcaccgccaccttcttcgccggcgtgttccaggcgctgctgggggtcttgaggctggggttcatcgtggacttcctgtcgcacgccaccatcgtcgggttcatgggcggcgccgccaccgtggtgtgcctgcagcagctcaagggcatgttcggcctcgaccacttcaccaccgccaccgacctcgtctccgtcatgagctccgtcttctcccaaacccacctctggcgatgggagagcgtcgtcatgggctgcggcttcctcttcttcctcctcatcacccgcttcttcagcaagaggaggccaaggttcttctgggtatctgcagctgcgccattggcgtctgtcatcatcgggagcctcctggtgtacctcacacatgctgaaaaccatggcattcaagtgattggttacctgaagaagggcctgaacccaccgtctgccacaagcctgaacttctcgtcgccgtacatgatgctggccctgaagaccgggatcatcactggcgtcattgccctcgctgaggggattgccgtaggaaggagctttgcaatgttcaagaattaccacatcgacggaaacaaggagatgatcgcgtttggaacgatgaacattgtgggatcactcacctcttgctacctcaccaccggtccgttctcgaggtcggccgtcaactacaacgccggctgcaagacggcgatgtcgaacgtgatcatgtcggtggcggtgatgatcacgctgctgttcttgacgccgctgttccactacacgccgctggtggtgctgtcggcgatcatcatgtcggcgatgctggggctgatcgactacccggccgccgtccacctgtggcaggtggacaaggtggacttctgcgtctgcctcggcgcctacctcggcgtcgtcttcggcagcgtcgagatcggcctcgtcgtcgccgtcgggatctccatcctccgcgtgctgctgttcgtggcgcggccgaggacgacggtgctcgggaacatccccaacacgatgatctaccggcggatggaccagtacaccgccgcgcagagggtccccggcgtgctcgtgctccgcgtcgactcgcccatctacttcaccaacgccagctacctgcgtgagaggatcgcgcggtggatcgacgacgaggaggaccagtgcaaggagaagggcgagatgggcattcagtacgtcgtcctcgacatgggtgcggtcggaagcatcgacaccagcgggacgagcatgctggatgaactcaggaagaccctggacaggaggggccttcagattgtgttggcgaacccggggagcgagatcatgaagaagttggacagctccaaggtgcttgaggcgatcggccatgagtggatcttccccacggtgggcgaggcggtggcggagtgcgacttcgtgatgcactcgcagaagccgggaatggtcatgggcagtggagcaccccatgagaacctggtctgattggagaagaacttactgtagtatggttgagtttgatcaacctgaggttgtcaacaagcaaagccgagataaatataagcatctcgagtattgtagtactaagttgtcaaggaagttcaaaggaaaaaaaatcacctttttttttgcaaggcgaaaatgatgagcctcagagcctgtacagatgcattggagctacttctttgaagtattgactcaagatcataccttttttccaaatatcc

SEQ ID NO: 16442 - DNA, 2738 bp, Oryza sativa
  ref <308>: DATABASE ACCESSION NUMBER: AK066933
  ref <309>: DATABASE ENTRY DATE: 2001-12-06
gagtgtgcagagcgagagacgcgtcacctcctccccgccgccgccgccgccgcctcgcctccgttgcaaccgtagtagggttagggttttcgtggtgggcgccgccgccatggcgatcctctcggcgctcgggaccgaggtgttcatccccgtcgcggccgccgtcggcgtcgcgttcgccgtcgcgcagtggctgctcgtcgcgcgggtgaaggtcaacccggcgcacgcggcggcggccgcggcgtcgggggggagcaagaacggcgggtacggggactacctcatcgaggaggaggaggggctcaacgaccacaacgtcgtcgtcaagtgccacgagatccagaccgccatctccgaaggagcaacatcatttctcttcacggagtaccaatatgttggtatcttcatgtcaatcttcgctgtcgtgatcttcctcttccttggttcagtcgagggattcagtacaaagagccagccttgcacatacagcaaggacaagtactgcaagcctgcccttttcaacgcgctctttagcactgcatctttcttgctgggagcgatcacctctttggtctctggttaccttggaatgaagatcgccacatttgccaatgccagaactaccctggaagcaaggaagggtgttgggaaggcatttatcattgctttccgctctggtgctgttatgggcttcttgctggcatcaagtggtcttgtggttctttacatcgccattaatgtatttaagttgtattatggtgatgactgggaaggtctttttgagtctatcactggttatggtcttggtggatcttccatggctctcttcggaagggttggtggaggtatttacactaaggctgctgatgtgggtgctgatcttgttggcaaggttgagaggaacatccctgaagatgatcccaggaacccagctgtgattgctgacaatgtcggtgacaatgttggtgatattgctggaatgggatcagatctctttgggtcatacgccgaatcatcctgtgctgctcttgttgttgcatctatctcatcttttggaatcaaccatgatttcactgggatgtgctacccactgcttgtcagctctgttggcatcattgtttgtttgatcaccacactctttgcaactgatttctttgagatcaaggcagtgaaagaaattgaacctgctctgaagaagcagctcatcatctccactgctttgatgactgttggtattgcaataatcagctggttggcccttccagcaaagttcaccatcttcaattttggtgctcagaaggaagttaccaactggggcttgttcttctgcgttgcaattggtctgtgggctggtctgatcattggttttgtgacagagtactacactagcaatgcatacagccctgtgcaagatgttgcagattcctgcagaactggtgctgccactaatgtcatatttggtcttgctctgggatacaaatcagttatcatcccaatttttgctattgctgtcagcatatatgttagtttctctattgctgcaatgtacggcatagccgttgccgctcttggcatgctaagcaccattgcaacaggccttgccattgatgcttatggtcctatcagtgacaatgctggtggtattgccgagatggctggtatgagccacagaatccgtgagagaactgatgcccttgatgctgctggcaacacaactgctgctattgggaagggttttgccattggatcagctgctctggtgtcccttgcactttttggtgccttcgtcagcagagctggagtgaaggttgttgatgtcctgtctccaaaggtcttcatcggtttgattgttggagccatgctcccgtactggttctctgccatgaccatgaagagtgttggaagtgccgccctcaagatggttgaggaggttcggaggcaattcaactccattcctgggctaatggagggaactggcaagcctgactatgccacctgcgtcaagatctccactgatgcttccatcaaggagatgattccccctggtgctttggtgatgctcacccccctcatcgtcggaactctctttggtgtggagaccctgtctggtgttctggctggtgctcttgtttccggagttcagatcgccatctcggcctccaacactggtggcgcatgggataacgcaaagaagtacattgaggctggtgccagtgagcatgctcggacccttggtcccaagggatcagactgccacaaggccgccgtgatcggtgacaccattggagaccccctcaaggacacatcaggcccgtcgctcaacatcctcatcaagctcatggccgtcgagtcccttgtgtttgcgcctttcttcgccacacacggtggtctgctgttcaagtggttctaagaacataataccattggcagcagcgctgaaatcttcgacggacatcacgaataacgactgccagtgtacgttgtgcttgggaatcgcccgcaccgtttctttttgggtctcatgttgtttcaggattgctgttgtcttatctttggcctcttgggagttgttaccttagccttactgttagcttcacttagaagagaccagagtccagatgttctcccatctctggtgcgtgtctggcaaattttcctcgtcccatgatgacgacgataatgtttgaactcttgaacaatgagatgatgattgttgcatgttagttactggtggt

SEQ ID NO: 16443 - DNA, 2372 bp, Oryza sativa
  ref <308>: DATABASE ACCESSION NUMBER: AK066934
  ref <309>: DATABASE ENTRY DATE: 2001-12-06
ggtccaacttccatcacaatcccaccaaatccttgtcctcacgtcaacgatcgcaagccatagctccgatggatccatcgtaccctccctccgccaccgcccgccgcgccgccgccatcgcccgccacctcgccggcctctcccctcgcgacgccgccgccgttgctgcagcgctggagccctccgcgtgcctgagctacgcgcccccggagtcgtcggagcccgcccctgcgttctcgccgctggagctccgctcgctcctcgacgggcaccacctccgggagcgcgactgggcgttccgcgcgatggaggagagcccgctcttctgccagcgccgcagcggcggaaaggtgttcgtgtctccggactacaacgagggcaaggaggggcagcgggaggccacgatgcggcgggtcggctacctggcgcggcggggcgtgttccggggctggctcacggagccggggcccgacgccgagctccgcaagctcgcgctgctcgagtgcctcggcatgtatgaccactccctcgccatcaagatcggcgtccacttcttcctctggggcagcgcaatcaagtttcttggaacaaagcgccaccatgacaaatggttgtcggacacagaaaattatgttatcaagggttgtttttccatgacagaactgggtcatgggagcaatgtccgaggaattgagacagtggctacttatgatattaaaacaagagagtttgtgataaatactccttgtgaatcagcccagaagtactggattggtggagctgctaatcatgctacacatactatagtctttgcgcagctccatataaatgggagaaatgaaggagtccatgcttttgtagctcagattagggatgaacatgaaaatgttatgcctaatatccagatagctgactgtggccataaaattggattaaatggtgttgataatggacgaatttggtttaacaatatacgtgttcctcgagagaatttgctgaatcttgttgctgatgttttgccggatgggcaatatgttagcacgatagatgaccctgatcagaggtttgcagcatttttatctccacttacacttggtcgagttaatattgcagttaatgcggtttatatttcaaaggttggcgttgcaattgctgtgagatatgctttgtcaaggagagccttttcagttacaccggatggtcctgaaatgctgttacttgattatcccagtcaccagcgacgccttctaccactgctagcaaaagcatgtctgatgagcagtgctggtaattttatgaaaaggatgtatgtgaagaggactcctgaacttaacaaatctatacacatttactctagtgctcttaaagctacacttacctggcagaatatgaccacacttcaggagtgccgtgaagcttgtggtggccaaggtttgaagacagagaatcgcataggaattttcaaagctgaatttgatgtccagtctacatttgagggcgacaataatgttctaatgcagcaggtaagcaaagccctttatgctgaatttttgacagcaaaaaggaagaatcaaccattcaagggattgggcttggaacacttgaatggtccttgccctgttattcctgattatctgacaagtggcacactaagaagctccagtttccagatggacttgctctgcttgagggagcgagatttactgaaacgattcaccacggaggtttctaactatctggcacaaggagaaaacagagagaaggctttgatgctgagctaccaactcgctgaagacttagctagagcatttactgagcgcacaattttgcaaatatttttggaggatgagaagaatattcctactggttctttaaaggatatattgggcttactaaggtctttatatgttatggtttgcatagacgaatctgcatcctttttgagatatggttgcctatcgcgagagaatgtagccgctgctaggaaagaagtgatgacactgtgcagtgaactcaggccccacgcacttgctattgtcagttccttcggaatcccagatgccttccttagcccactcgcttttgactggattgaggcaaatgcacggtcttctgggaatgaatgactccacgctaccatcaggtagttatggggttttccaatggaactactacagatggacagccaaacacactatacgcaaagataggtgtacatttgcaactacttcctgtcaagataggttacaataatttctctgaagtgtatagttcgagatggtgatgttgatctggacttcatagaagtttatgttcttgtaatttgcacttcagaatgggacatacgtgaataagtggaacttcagaatggg

SEQ ID NO: 16444 - DNA, 2005 bp, Oryza sativa
  ref <308>: DATABASE ACCESSION NUMBER: AK066935
  ref <309>: DATABASE ENTRY DATE: 2001-12-06
gcctgttccctctccctcctccgtttccttcccctcgaagcagcgagcagcgagcagcagcaaagccgcggcatcggcggcgatcccccaaccgaatcacccccacctccggcgatcgccggcctccgccgcaggcatccatccatccatccatctccgcgtccggtccacccagcccccccctggccgatggggagcgacgcggagccggccaaggggctgctgccctacctgcagcgcgccgacgagctgcagaagcacgagccgctcgtcgcctactactgtcggctctacgcgatggagaaggggatgagaattccgcagaaggagcgcaccaagaccacaaactccctcctcatctctctcatgaaccagctggagaaggataagaagtcattgactttggggtctgatgaccatcttcatgtagaggggtttgcattgaatgtctttgctaaagcagacaaacaggatcgtgctggacgagcggacataaacactgcaaaaaccttctatgctgccagcatcttctttgagatcctcaaccaatttggtgagcttcagactgatgttgagcagaaacagaaatatgccatctggaaggctgctgaaataagaaaagctctcaaagaaggacggaggcctgaagctggtcctcctggtggggacaaagatgaagcacctgacagcaccaccacaaattcccatctaacggatatggggcgcagccaatcctttggcagtgggcagcatgggaacgaagcatcatctcagcatgtagatcaggattttagcaggagggatagcttctctgcggtccaaccaggaaataatgcactccggcacagtacagagaagttcaatgaccatgtctctgcccagtcaccttattcaccaccacccccacaatcccagacgcccccacaatcccagttttcatctcctgcacagtcatcttattcctctccgtcatatcaaggaacagattacccttcttctgatgttcacaaaccaccccacggttattcatccgccccatatacaagcacagactaccctaccaatgaggtccacaaaccaccatccaattattcctcaccaccgtacacaagaacagactacccttccagtgatagctacaatccccagagcaatgataaaccagatatccctacttatcctcacacataccaccagccaccctacacaattgaaccgcagcacacatctcaaaactactactctacagaaaccccagctgctccgtataactactctaattttcagtcctatccaagctttcaggacagctcggtaccttctgtcccaactcatcagtcttcgttctatcctgctagtgatggtacaagcgctgtatcatactctccttctggatcgaaccatcctgcaccaacacaataccacccgagtgctgatactactacgcatcaagttactccccctgctatcgcaccaccggctagccaatacaagtatgatagcagttaccagccagaagttgaaaagattgccgaggctcacaaggcagcaagatttgcagttggtgccctcgcatttgacgacgtgtcggtcgctgttgatcacctgaagcgcgcgctggatcttctgacgaacccttccgccgaaactcattagttctctcaggctttcttatggtcttcgcagaaaacatcttctgtacatatgctacactggtaattactacgacatggagatgttgcctggttgcatacaaacaaagatagcaaagatactgggttggctacacaaatctaggagatctcgaggggcaccttttctcctgtacctacaaccattgaacggcttcttgtgtgaagttgaattatttgtcacagagttttgcaagaaaaggatatactgtacattacatttgtttgaataaatcttgagaggtgatctggtacttcttgtatattgactgctttggtttaaggtctcatttgtcattattgctactttgctt

SEQ ID NO: 16445 - DNA, 3663 bp, Oryza sativa
  ref <308>: DATABASE ACCESSION NUMBER: AK066936
  ref <309>: DATABASE ENTRY DATE: 2001-12-06
ggtagtaccgtacaagccgcccttgtccgccttcacttccctaaaccctaaaccacccactttccccaatccccacctcaatggaagaagcggacgacgccccgccgccgtggaggcacggcaagccggcggcggccatcgacggctcgtcggggcccctcgccgccgccgccgcgcgcctctccggccgctcccgcgcgctcccatcctcccgcgacttccacttctacaacaacttcccctccttcaggtcccccgtcggcgccgccgccgccagggcgggcgcctccctcgccgccctcggcgccgcccccttctacccgaagcggcacccgccgttccccggggacgacctcgacgacgcccaggactgggtcgtcggcgtcatcgacgacctggccgagcagttcggcgcctccatggacgagttcaaggcggcgcgggaggaggaggaggcgactggccggagggcgacggaggaggacgggttccaggttgtttacggcaagaagaagaagaaggtgatgggcggcggcggcggcgaggagggggttggtagaggtggtgaggcgtttggtggtggttctggctcggtgaagatggccaccagggataagtcggccgcgccgggggcgaaggcgaaggtgccattccacattcccaccatcccgcggccgcaggacgtgcaccgcatattggtggacaactcgagcaagccattcgagcattcatggcttgagaagagcgatgatggttcccgtgttgtccatccattggaaaagatccccatggaacaattggttgacagagattttcctgaaagcgagccgataaagcctcctgctttggatgataccccttttacacatgtcgaagacttgaaatccttggaggtgctagctacaaagctgaagagtgcaaccgagtttgctgttgatttggaacacaaccactataggtcttttcagggtctgacctgcctgatgcagatttcaactagaactgaggactttatagtggacactcttaagcttcgcaaatatcttggtgattacttaagagaaatttttaaagacccaacaaagaaaaaggtaatgcatggtgcagatcgtgatataatatggcttcaacgggactttggcatatatgtatgcaacctttttgacacaggccaggcttcaagaatcttgcagatggaccgcaacagcctggagcatcttttgcatcatttctgtggagtgactgcaaacaaagaatatcagagcgcagattggaggttgagaccacttcctgatgaaatgatcaagtagactacctttctgaaacccctcatgaatttccttctatttccatgttatacatccactttttgtcgatggctctactctcgctgatcatttccatcaaatgtacctgattatgccttctttgtttaggtatgctagagaagatacacattatctgctttacatatatgatttgatgagactcagactggtgaaagagtcttcagatgaaaatgatcttcttttagaggtttacaagcgaagcaaagaaatttgcctgcaactatatgagaaagaactgctgacacattcatcatatctttacatacatgggtttgtattttgcttgtggtgctgcttttttgttataaataatgttcatgctacgtaaggccaattttatttaattccaggttgaaagaaaatgaatttgatgcaaggcagctgtcagttcttgctgtaagtactctttttgggattgaaatgtttgcttgattctggcattttgacattgatgaattttctgcacctagaagtactgaatcgtccagcattttggttgaaatgaaatatgtagtacctccagctccaaaatttggtcttcacaaatgatttcttattgaactttttctttgttttagttgcccctagtattcttaactcttaatgtcctagtgtaaatgaaacttcacgtacatatattttaaagatactaccctattttgtttcatatttgttagctcagtgccatacttccagttaaaactattaattttaatgtatactgaaatgattctgttgcaccagaattaattgatttcctccacagaatatatataaatggagagattccgttgctcgtggcgaggatgagagcactggttatatattgccgaataagacgctgcttgagatagcaaagcagatgcctgcgaccactgggaggttaaaaagaatagtgaaatcaaaaaattcgtatcttgaacgccatcttggccatgttatttccactatcaggagtgccattgcaaattgtgatgcttttgaaagtatagctgagcagttaaagaagggacgtctggaagagttggcagtggcaaacatgaagagcaacgatggagacactgaaatggttcctgctgatgatggtaataacgatgatgataatgttggcccgagtgatgaacatggtgctgttgccagtgttgaaaatgttggcgctgcttctcattgtactgggaatgttacaagtggagcttcttcagttaatgtacagctagaaaaccctgcagaaactaagagcttaggaatcttgtcgggtgtttctggacaagatatggaggtactgagcaatggtgataggaagcaagtagcaaaagccacagttcaagtgtcaaagagacctacagcttttggagctctattagggaaaccaacttctggaagaagacaaaaccttttttcagggttttcaagcgggcagaatatggtggacaagataaaatcttcagtggcacttcctttccataatttctgtggcggtgcaaaatctccggccactagcattccattggaagaatcagtgcgtcctgaaccagaaagcatccagtatagtgatccagcttgtcagacggaagatgttatacagttgggcactgaaacagatggtccccaacccccagaaaatcacaataaagatggacaaggccaccttgtacctgatgacatggagatgtctaggtcccctcctgagcattcttctgctggtgccaagcaacgcttccagtcactcatcgaaagtagaaaccaacaacagaaccacaagccacaccaagaaccagaatttaaccaccagctgaagccttttgattacgctgaagccagaaagaacataacatttggagagcgtaaagccgagagaatcaaagacaatgcagtggccagggcaataaacaaggattctggagataaaggtagaacctcaaaccaattcggtgctggagagaacgaggggaatcgccagaatcctcgggggcgacaggcattcccgccttctggcaacagaagtgctacataccattagttgttaagatgtataaccagagacattgtgttcttgtaagaggtattatgttcatcttagaggggaagtgtattgtctctggttttcatcgttagatacttagatcatggcaatcttttgggggacaatgtagcggctttcttagtgatctatcttgagagaagtaggaaagcccttctggctggtggtgctgggttttaactgaacatgattcagaacattgaggatacttataccagatattgaatcatttcagtaaagcacgcatataaaatatgcttgcttagaatgtgg

SEQ ID NO: 16446 - DNA, 2695 bp, Oryza sativa
  ref <308>: DATABASE ACCESSION NUMBER: AK066937
  ref <309>: DATABASE ENTRY DATE: 2001-12-06
ggctgcctcgtatcgtgaaatgagatactagctagaaaggtggtggtaggggatagatccggggcgggcggcatgagcatgaataatatgatgggtagtccaccaagtcgtagcaggggcagggatgagaagaagaagaggtggaagtggaagcttgggccggccaccatcctggggttcgagctgctggagagcatcgccttctccggcgtggcgctgaacctggtggtgtacctggccaccgtccttcacggcaccctcgccttcaacgccgcccatgtcgacacctggaatggcaccaccttcatcgtccccgtcatcggggctttcctcgccgactcctactggggaaagtacaggaccatcctcgcctccctcctcttctacctcgccggccttgtgctcctcaccgtctccgccgctgtcccctccctgcgcccggcgccgtgcaccggcgtcccatgctcaccggccaccgggacccagttctccgtcttcttcctcgcgctctacctcacctccatcggaacaggcggcgtcaagtctgcgctgctccccttcggggcagagcagtacgagcgcgacgaccacgacactgatcaggagggcgccccggccccggagaagacgaagcaatccttcttcagctggttcttcggcgccatcaacctcggcatcttcgtggccgggacgcttgtatcgtgggtggagcagaacgtgtcgtgggcgctgggcttcggcatcgccacgctctgcctgctcatcgcgtcggcggcgttcctggcagccacgccctgctacagggtgcgcctccccacgggggacacccccatcaaggccatcctcagggtgctggtggccgccttcaggaacaggacccggacgctgcctcccgacgccgacggcgatggcctgtacgaagtcgacgacgacaagaacaagaacggcggcgatgatgagaagctggcgcacaccgaggggttacggtggctggacaaggccgccgtgagggtggacgggggcggcgtgtgggaggtgtgcacggtgagcgaggtggagcgcgtgaaggtgctggcgcggatagtgcccatctgggtgacgtgcgtgctgtacgcggcgtcgctggggcagatgaccaccaccttcatccagcaggggatggccatggacacgagggtgttcggggggaggttccgggtgccggtggcgtcgctggtgtcggtggaggtggtgttcatgctgctgtgggtgctgctccacgacgtggtggtgatgccggtggcgaggaggtggtggcgctcgggtggtctgacgcagctgcagcggatgggcgtggggcgtgtgctggtggtggtggccatggcgacggctgctctggtggagaggcggaggctgcgaggggagaagcggtcgatgagcatcttgtggcaggtgccacagttcgtggtgctggctggatccgacgtgttcagcggcatcgcgcagctggagttcttctacggcgaggcgcccgggtccatgcgcagcatctgctccgctttctccttcctcgccctctccctcggcttctacgtcaactcgctcgtcgtcaccatcgtggcggcggtcaccaagaggagcgacggctccggcggctggctggcgccggacctggacacggcccacctcgactactacttctggctctgggccctcatcagcctcgccaacctcgccctctacctgctgctcgccgcccgctacaagtccaagaagccctcgccaccgcattcttcttctcatccctagccactaccactatcatctccttcttcttcctccaccattaattgttcatccatcatcatcatagacataccatatatacgcacgcatatctcatctcatctgtaagatggatcatacatagtctgcagcagtgcatcttgtatctttctacctatagcctatagtttgcttctgaatttaacatcggaatccagggaattgaactgacgacaaacttttctgcatacgatcgaattggtagcttttgggcagaaacagccgtttttttgacaaattgacccttttcaaaaacttatttcgaaactaacccctgctaaaaacttcaactaaaactaggccgtcggctcagcgccaagcgcattggcgctgaggttggccgtgtcagcgccaacgggactggcgctgacattgtgccaccgtggcggccgggccgatcccccagctgacgtggcagctacctcagcgccaaccgcttcggcgctgaggtgcccaacatcagcgccaagtacgttggcgctgatcttggctactttgagcccggccgaggccgccccagccagttagtcctctgtttttccccagccgcccgcctagggttcggtcgccaccgcgttctcctcgcccaatctcccccaaaaacctctctaatcgaaggtgatttgtgtggcattgagtttgggatcggaagagaaggtaaacccctctataaaccctaagttccccaaagttttattggatattttgtattgttttggttgtagacgtggtttgataatagttggctaaggatggattattagatggataatgtgggtggggatgaagtgtggaggtggcatatctttatccatttggttgttgttgatacatttgacaaaatatatttgggatgaatgtttggtgatgc

SEQ ID NO: 16447 - DNA, 2902 bp, Oryza sativa
  ref <308>: DATABASE ACCESSION NUMBER: AK066938
  ref <309>: DATABASE ENTRY DATE: 2001-12-06
gtccagtttaactctgaagaaaacacaccatttgcttggtgtcaattattggaggaggatttgaaaaatgcaactattgatcctagtgaaatctccgagacatttgatagctgtccatattatctaagtgagaacaccaaatctgctctccagtcatcagcatatgtaaatttgcactgcaaggactatatcaagttcacaaaagatatttcttctcttagtcagcgagtactgctgtctggtccggcaggaaccgatatctaccaacaatatctggttaaggcacttgcaaaacactttggtgctaggttgctcaccatagactcttccatgctatttggtgggaagactaccaaggaatcagattcatacaaaaagggtgatagagtgcggtacattggttcgttacagtcaacaggtattatccttgatggagaaagtcctccagattttggttcacaaggtgaaatatgtcttcctttcgaagagaatagatcatcaaaggttggagtaagatttgatgaacaaattccgggaggtattgatctaggaggcaattgtgaagttgatcatggtttattttgttcagttgattctttatgcctcgatgctccaggatgggaaattagatcgaaacacccatttgatgtcattattcagtttatctctgaagaaatcgagcatggtcctctagtcttatttttgaaggacacagagagaatttgtgggaataatgattcctatcgtgctctcaagagcaagcttcaatatttcccagcaggtgcttttattattggttctcatgtacatcctgatgatcacaaagagaaggcaaatgccagttctctacttctttcaaagttcccatacagccaagcaatacttgactttgcatttcaggactttgatcgtggaactgataagaataaagaaacttcaaaggcgacgaagcatctaactaagcttttcccaaataaagtgacgatccagccaccaaaagatgaaattgagcgctcgaagtggaaccagatgctagatcgagatgttgaaattcttaaaggaaatgctaacatttcaaaaattcgctcttttctattaaagatgggcttggaaagcagtgatcttgaaacagtatgtgttaaggatcgtctcctaacaaacgaatgtattggtaaaatagttggttttgctttgagtcatcaacttaagcactctacaattccagacccttcgagtgatgttcgtttcactctatctagtgaaagtcttaagcatggtgttgacatgttggaaagtgtggaatctaaccctaagagcagcaacataaggaagtcgctcaaggatattgctactgagaatgaatttgaaaagcgacttcttgctgatgttatacccccggacgaaataggtgtcacctttgaggacattggggcattggaaagtgtcaaggaaactcttaaggagttagtgatgctacctttgcaaaggcctgaattgttttccagaggtcaacttatgaagccatgtaaaggaatattactttttggcccgcctggtacaggaaagacaatgcttgccaaagctgtggctacagaggctggtgcgaatttcataaatatatcaatgtcgagcatctcttcaaagtggtttggtgaaggagagaagtttgtgaaagctgtattttcactggcaagcaaaattgctccaagtgttattttcgtggatgaggttgatggcatgttgggtaggcgtgaaaaccctggagaacatgaagcaatgcgtaaaatgaaaaatgagtttatggtgaactgggatggtctaagaacaaaagataaagagcgtgtattagtacttgctgcaactaataggccatttgaccttgatgaggctgttgttaggaggcttcctaggcggttgatggtgaatttgccggatgcatcaaatagaagaaaaattcttagcgtgatactagctaaagaagatttggcagatgatgtcgatcttgaagctgtagctagcttgactgaagggtattctggcagtgatctcaagaatctatgtattactgctgctcatctccctattaaagatatccttgaaaaggagaagaaggagaaagctttagcagaggcagaaaataggccgctgccccaatcattttcaagtaacgatgtccgtgccttacgactaagtgatttcaaacatgctcatgaacaggtctgtgcaagtgtgtcttcggattcaactaacatgaatgaacttattcaatggaatgatctttatggagaaggtggatcaaggaaaaagactactctaagctacttcatgtagctgaagttcattccaatgtacatatatatcagaagcattaggacaaacaatggtgattggaggcaaaagttttgcagattcactacagtaaaaaaagaactgtactatctgctagacatcagaagaattaacaacagttcatatcgaggcggatgggataagacattcaatcgtcgccatggtgtgggctgtcgattttggcgaaagaggaagatgggattcgggatgtggcttacaaattgcctgctgtggtggacctgggggtagtgacggcaacatatcaccatccgcaaaaatagattacatttctagtccccatagtcaggtcaggcagccagttccgagaatgacatctcttaccgggccggttggttcaccgtcatttttctcatttcgtgacagcgattcaaatttttttaggttaaagttgtgcctgtgcaattgtacagtatgagcatccaggccaattaacttgttattgcggtcaccgcaaaattcattttaaacatgtccgttgttactccatttgtcgactgtctaccaggttttggtactgcccctttactgatcg

SEQ ID NO: 16448 - DNA, 1660 bp, Oryza sativa
  ref <308>: DATABASE ACCESSION NUMBER: AK066939
  ref <309>: DATABASE ENTRY DATE: 2001-12-06
gacggtttcttcctcctcctcctctctctctctctcctctgcttctctcccaaattcgccacctctcctcctcctctgatccctccccacgccgccggcgagggcacggccacaacggccgcggcggcctccgtgcgccggagacaactagactactacaactactactactactactactactctttctctctcttgttgagaggagcggagatccatccgtgcaggctccggggggtggtttcgtgtgggatatgccacacgtgcagtcagctcctgcggcggcgaccgcggcggggatgtccgcggcgtcggcgcccgcgccgaggaggtgggaaggggtggaccaggcgctggagcggatggtgctcagggcgtgcctcgaccaggcgcccgagcgccgccgcgtccgcgacgcgttcaaggacgtgcagctcagcatcgaccactgcctcttcaagggacagtatagcgatattggaacaaaggagtcatacgagaaaaactccaggggcgtggagattttctcaaaatgttggtatccagagaatcatcgcataaaagcaattgtttgtctctgccatggttatggagatacctgtaccttttttctcgatggtattgctaggaagattgcttcagctggatatggagtgtttgcattagattaccctggttttggtctctcggaaggacttcatggatttataccaagttttgacactcttgttgatgatgtagcagaacattttactaaggtcaaagaaaatcctgaacatagaggtcttccaagctttctgtttggtcaatctatgggtggagcagttgcattgaagattcattttaagcaaccaaatgaatgggatggtgcaatactagttgcgcccatgtgcaagattgcagatgatgtgattccgccttggcctgttcagcaagttctaatttttatggctagacttcttccaaaagagaagcttgttccacaaaaagatttagcagagttggctttcaaagagaagaaaaaacaggagcagtgttcttataatgtgattgcgtacaaggataaaccacgtctccgaacagctttggagatgctgagaaccacaaaggaaatcgagagtcgtttggaggaggtttcgctgcccattatcattttgcatggtgagggtgatttggtcacagacccagctgtgagtaaagctctctatgataaagcgaagagctcagataagacgcttcgcctttataaagatgcatatcacgctatcttggaaggtgaaccagatgaggcaatttttcaagtcctcgatgatataatttcttggctggatcagcattctacaaagaaagttccatcgtcataaactgcaaaggcagcattgggaaaatttctttgctactgatgtatccttcgttgccgttgatccaagattccaacagttgcgattccattttggcaccagccctgtcatgtttcttttctgattgcaaatgtgcctgttgctcatcaagctgtgtacataatgtatattatccatcacaatttgtttcacaaaatttaggtaaggttttgcatgccatatataaatttgtaatatattcaaatgtttttctcgttatgtaatattttttagatttgattggcatatgtttgggttag

SEQ ID NO: 16449 - DNA, 1579 bp, Oryza sativa
  ref <308>: DATABASE ACCESSION NUMBER: AK066940
  ref <309>: DATABASE ENTRY DATE: 2001-12-06
ggcggcctccattttcggcgctctgctctctcctttgcgtcggattcaagtaaggcttgttgagttcggtgccccatatccctcaatctcgggtgcgattcgatcgggtttgcttcgaattcgtcgttcgattgagaatgtcaagcctcgaggagccacttggtcttggggacctgccaaagttgagtattaacagacttgaaaggttctctccaagtgcctgcagagcaagtgttgatgacagcaacaccaacaattacaagcatcgcaatggtggcaacaatcagacgatctttcacagcagtgctcattcatggcatatgcaaggccaatatactgattcatcctgcaatggggtggatatggagttcagagctcttccacggaaggtttcatcagaccacctcaaatagaaggaatgaactcacatgtagcattatgactgtggcaatgcaacatgttttatgggaccttccaaggtttgtgaagatagttgaagttggaccacgggacggtctgcaaaatgagaagaatactgtacccacatctgtaaagattgaactgatacacaaattggtggcttctggtctatcagtagttgaagccacaagttttgtgtccccaaaatgggtgccacagctagcagatgcaaaggatgtggttgaagggattaagcatgtgccagatgtgcggtttccagtgttaactcctaacctcagaggatttgaggctgctgttgcagctggtgcaaaagaagttgcagttttcgcatctgcctctgaatccttttctaagtcaaaccttaattgtaccatcaaggaaagccttgttcggtaccatgatgttgtaacttctgccaagaaacatggaatacgaatccgtgggtatgtttcatgtgtggttggttgccctgttgaaggcacaattcatccatcaaaggtagcatatgtagctaaggagctttatgacatgggttgctcggagatctcactcggagacacgattggtgttggtacaccaggtagcgtacttgctatgcttgaagctgtaatgtcttttgttccagtggacaagatcgccgtccatttccatgacacatacggccaagcccttgccaacatactggtctctctccaactggggatcaacatagtggactcatcagtgtcaggactgggaggctgcccatatgcaaagggcgccaccggcaatgtcgcgacggaggacgttgtgtacatgctccatggactggggatagagaccaatgttgacctcaacaagctcatggatgctggagattacatctccaagcatctgggaaggcagtcaggctccaagaccaccactgctctccgcaagctaaccacttaagtccctgatgatcataatagggattcagaaaagaagtccgaagatacatcggttggcgtcagtttaatgtttttacacaagtcatatgtgattgtaacctgtaaaccgtctcaatttagtcccaatatgggtgaaagtaaacagaaaccatatatgtatagacacatttgtgtttaagttcttggattgaataatcaatgcccttcat

SEQ ID NO: 16450 - DNA, 2697 bp, Oryza sativa
  ref <308>: DATABASE ACCESSION NUMBER: AK066941
  ref <309>: DATABASE ENTRY DATE: 2001-12-06
gagtacactgattcactcactcccgagtcccgacctccctcgcacgtgcttccctgcgtcgaccccgtcccgacccgtccccctcactcgccgccgccgccgccgccgccgacgccgacgccgaggacgacgacgacgatgccgcggaaggcctcgtcgacctcagattcgcgcctgaaatggcggaagtggaagcggaaccccaccgcgtccccgtcgccgtccaaccgctcgtcggccgccgccgccgcggcggaccactccgacgactccgactccgccgccgttaacgaggacgacgactccgcggtccccgaggacgccgacgacgaaaccctagccggggcggaggaccccgtgctcgacctccgcgaggcggaggtgctcccttcggcggagcccgtctcggcgttccccgtcgccacccgacgcgtcgtcaaccggccgcacccgtccgtcctcgccgtcatcgcggccgagcgatccgcgtgcgcgggtgagggttccgccgcggtggcggcggcgccggtgctggagaacatctcgtacgggcagcagcaggtgctctccggggtgctccctgaccacgcttcgctcgcgacggacactgacaagccgtctacctatgtgtgcacgccgccgaatcttatggaggggcatggcgtgaccaagcagttccagggtcgcctacatgtcgtgcccaagcactcagattggttctccccagggatcgtgcacaggctggaaaggcaggtggtgccacagttcttttcagggaagtcgccgggcaacactccagagaagtacatgctattgaggaataaggttattgcaaaatatttagagaacccaagcaagaggcttgcttttgcagagtgccaggggcttgttgcgaacacagctgaattatatgatctcagtaggattgttaggttcttagacacttggggaatcatcaattaccttgcgtctgggtcggtgcaccggggtctaaggatggcaacctcccttctaagggaggagccaaccggggagttgcaactattgactgcgccactgaaatcaattgatggcctaattttgtttgatcgaccgaaatgtaacctccaagcagaggacatttcttcattggcatcaaattcggaggttgtggattttgatgctggacttgcagaattggatggaaagattagggagcgattgtcagagagttcttgcagttattgcttacagcctttgaccagcttgcactatcagtcactaaaggaggcagatatcgctctatgctctgattgcttccatgatgcgagatatattactgggcattcaagcttagattttcagaggattgatggggataacgatagatcagaaaatgatggggatagttggactgatcaagaaacgttattgctgttggagggcatagagaagtacaatgacaactggaataacattgcagagcatgttggaacaaagtcaaaagcacaatgtatttaccattttattcgtcttcctgttgaagatggtttgttagagaatattgaggtgccagatgcatctgtgccatttagagcagaaaccaatggatacccacatttagattgcaatggcagtacttcaggaaatctacctcaaaaaattccacctgataaccagcttccgttcattaattcttctaatccggtgatgtcactggttgggtttttggcttctgctatgggaccaagagttgcagcatcatgtgcaagtgctgctttatcagttttgacagtagatgatgattccagggtgaattcagaaggcatttgctctgattctaggggccaaggtccgcatccgaattttcgtgatcataatggtggtgtatcttcatccatctctccagaaaaggtgaagcatgctgccatgtgtggtttgtcggcagcagctacgaaggctaaactttttgcagatcaagaggaacgtgaaatccaaagactaactgctactgtaataaaccatcagttaaaaaggttggaactgaagctgaagcagtttgccgaagtcgagaccttgccttttgaaagaatgcgagcaagtggagagaataaggcagaggattgcatctgaccgtgtccgaatcgtgtccacccgcttggcctcgcctggaaatagcctacctgggggtagtactagcaccatgtcatccaatccaatgagtatgagccccagaccgatgggcgtgccaggctcgatgcctcaatccagtatgccagcaccatttgccaataacatgcaggggcatggtcacccccagatggcattcttacaacagcagcagcggcagcagatgctgtcatttggacctcgtctgccgctgtcggccatccaaacccagccatccccacagacgtcaaacatcatgttcaacccaggcatgcccaattctgtaacccctaatcatcatcaactgttgaggtcgtcttctggaaacaattcaagtgtaggataggagaaagaaaaaagggagattcataagattccaaccagtgtagcttcctcagttgtagctttatatgattcataaacatctcattgttattcatttgtacaatatgttccattggtcgtataatttatgatcacttaggttctcattttatgtatttatgatcacttgggttctcattttatagcctcaaaagtgttgttacg

SEQ ID NO: 16451 - DNA, 1416 bp, Oryza sativa
  ref <308>: DATABASE ACCESSION NUMBER: AK066942
  ref <309>: DATABASE ENTRY DATE: 2001-12-06
gggcggtggctcggctggttcctccccgctccgcctctcctcctcctcctcgcgcggcggccggcgagcttggccgctccggcacgcacggttcgggcagcctccactccttcccgactcccgcccttcctcccgcgcgcgcgcgcgcgcgccgcgggccggtgtgaacaggttttgggaggggggcggcgcggcgcggccggcctcgctcgttccgccgccgccgttggcggttcggcaccggaggactgaagggagtatgaggaggtgagcattgtagctggagtgattcggttgccggaaatggtgctggtggtgaagcagcaccggtgcatgcactcggcgagctgcgtttgcatcaagggacacctcagcgaggacgcgctgttcctggtctttcgtcacatgaactggaaccccaggctgatcgccgtgctctcgtgcgtgtgcgagtggttcgacgaggtcgcgaagcaggtgctctggaaggagttctgccacgccagggcgccgaagatgatgctggatttgcattcgggtggcagtcacattgtcgacgggaactggaaggcgctcgggaagcttctcatctactgcaatggctgcacaaaagggggcctctttaacaacattcatgtccctgggcactttgtgttcaggacacgcttttcgaggaccgcgggcaagagtttcctgccccagcagtgtaggaatgatgtcttatatgtctcagatccatgcgagcatcttgatcaaggggatgaaggtgacttgggtttcttccgtggtatcttcatgtcgttcgccacctcaaaggttaagaagatgttgattgagaagcgggcaaggttccatccaagcgagtcatgtccctactgtaaggctaagctgtggagcatgttggaagcaaatatgtcgccggggagttcttctgccaggcttggtgcttacgaggattctgtggagtattttgtatgcctgaacggacatgtcattggaattggtacccttctacctctgtctgattctgaggaagtaccagaggagtagtaatcaggaacttgaatcaggtttgcaagactgaaaccctggattcgtgcatgctgttcgttgctgaatctttggttgcgactaacagtgggagaatgcatgcgcaaggcgacctgcaggtctgcaggatgacaagaatggctttgcatcgcagtgttgttcttcctgaaactttgcatcagatggggaaaaaaagctatttttatactgttctctcctttatcattgatgcctcatccctgcttcccctaattgtaaccgagacaccaatctcctgtcatgtcctatatgttcacagcacgtaatgtggtgtttatttagcttaattggactgtcaaaaatataaaactggtgctcatcacatgc

SEQ ID NO: 16452 - DNA, 2099 bp, Oryza sativa
  ref <308>: DATABASE ACCESSION NUMBER: AK066943
  ref <309>: DATABASE ENTRY DATE: 2001-12-06
gtgattcttcctaatcagtcagtttcctcatcctctttgcatcctccgcgccctcgcgctgatacttgtaatcaatcaactcatcagcatggtcttcgcatggagctgctagctgcagagtcacagagcccaattgttgagctcgaaatgccacgtgttgtatgatcgttacatgctaactgctcagagtgagtgaggcgcttctttgcggctttatgtccttttcagctccaagcttcacatggagatggatcacccagcaaatatgcagtatacagtatatggatatgctatgaacatgtagtctccctcttctctcacacacacacccagatacgtacacacaaaaatggagctattctcatcacagcaatggctagcacttctacctccgatcatcctctgtatccttctgttctcctatgtgtatatcattctatggctaagaccagagcggttgaggcagaaactgaggagccaaggagtgaggggtcccaagccttcttttctctttgggaacatagcagagatgaggagaatccagcaattggccaagtcagcacatgaacaagaagcagggagtaccgacatgttttcatcaaattatgtggcaactcttttcccttacttcctccactggagcagggtttatggttccatctacctgtattccactggaagcatacaagttttaaatgttactgatccaaacatggtgaaggagctagccaactgcaaatctttggatcttggaaaaccttgctacttgcaaaaagagcgtggagctcttcttggtatgggaattctgacatcaaatggtgatctatgggtacaccagagaaaagtgattgcacctgaactattcatggaaagggttaagggaatggtgaatttgatgatggaggctgcaatgtcaatgttgaactcatggaaaaatgaagttgaggacagaggaggcagtgcagagattgtggttgatgagttcttgagaaccttttcagctgatgtcatatcaagggcttgttttggaagcagctttagtgaaggcaaggagattttcataaaaatacgacaacttcagaaagcaatggcaaaacaaagtatgctcattggtgttcctggaagtaggtatttaccaacaaggagcaatagagggatctggaatctggatagtagcatccgtaccctcattttaaacatatcaaagaaatatgaacatgattcatcgacctcagtaaacaaggatctcctgcactccattattcaaggttctaaggatggtccctttgcttcatgcacgcccgaggatttcatcgtcgacaactgcaaaaacatctacttcgcagggcatgagacaacttcgaccacggctgcttggtgtttgatgcttctagcttcacaccatgaatggcagtcccgtgcccgggtggaatcccttgacatttgtcaagggagaccactagattttgacattctacggaagttgaaaaagctgacaatggtgatccaggagacactccgattgtacccaccagcctccttcgtcgcccgggaagctctgaatgacatgaaacttggcggcatcgacataccgaaaggaactaacatctggatcccgatcgcgatggctcaccgggatccttcagtatggggtcctagtgccgacaaattcgatccggacaggttcgccaacggcatagcaggggcctgcaaaccccctcatatgtacatgcccttcggcgttggggtccggacatgtgccggccagaatctagccatggttgagctcaaggttgttctgtcactcctgctgtccaagtttgaattcaagctttctccaaactatgtgcattgccctgcgttcagactgaccatcgagcctgggaaaggtgttccattaatttttagagagctctgacttgagattcttgaaggttatataaatgtttcccttttccccttgttatatttgtttggtatgtgtttgcaacaatgctgcaactcgagtgtaaacagtagtatattctacagtatgcaattctgtacaccgattgaagtgttacttatttgtggaatgaaacttttacttctcgtctgtc

SEQ ID NO: 16453 - DNA, 2264 bp, Oryza sativa
  ref <308>: DATABASE ACCESSION NUMBER: AK066944
  ref <309>: DATABASE ENTRY DATE: 2001-12-06
gggcctcctccctctccctcgacaccaccccccgtctccaccctccccgccgcctgcgcggcgccgccgcggcgatccccaccacggcgacccgcgtagccggcgtgtcctgctgcttccgccgcgtgttctctcgccggtgacccctcggcgcccaagtcgacctcctcccccccgcccccgcgccccctctgccttcccccgctcccgtctcctcccgagctcgcctcgccctctcgccctcccgcccgcccgccgcctgcgccgatctccatccgtcccgcgcgcgtctaccccgtcgccctgctgcttccgcctccgaggaagaacatgcgtgatccattcagtgccccagtcgatttcaataacgagaatcaccgtgctggaaatgagcttaccaggactaacatgccgttgtctgttggggactatggtttgcaaaatggtgacgctacaacctttgctgtaaacaccgacactctagtgaggcatcaactccagggtgcatccctccagaatgacttgactgcagaagattctattactcgtttgatggatccagagtaaggggttatacttcagatcacggtcacaagaggaagagatcttattgcttcgcaagcaaattgcagatgcttctgtaaaagagctacagttgctgagcgaaaaacatattctggagaggaagctttttgacttgagaatggctgttgatgagaagcaggaagatgctatatctggtgctttgaagcaactaagccagaaaaaaaggccatgtcgaggaaaatatgagactagcaaatgatctgaaaggtgaggaagaagagctatacttcttcacttcttcattgcttagtatgttagcagaatacaatgttcgcccacctcaaataaatgcttcagccattacagctggtacaaagcgtttgtaccaccaaatgcaatggaagatcaaatatttaaatgacagtttaggtgagataactcaacctggacacatatataataatcccaatcatcaacaagcaacgccgttgaggcatgaaccttcctcatcttacaatacggatgcaactaggaacaattttcatcagtatgctcaagatccaaatgaccgaaatactggacagatgtaccatggatccaattatcatcaggaaatagtagctgctaccccctctaattattttgaagaaaataatggtcctagagaagtaagattagacgactcacagttttataggcaggataatcaagagtattcagctgatgatgatcctttgcctggtattgaggggtttcaaattgttggggagcctagaccaggatttacattaacagcatgtggtttccctaccaatggtaccaccctttgtaatttccagtgggttagatatcttgataatggcaccaggcagtctattgaaggtgctacgatgtatgactacgttgttactgctgatgatgttgacactcttctggctgtagactgcacgcctatggatgataatacccgtcagggtgaattggttacagagtatgctaacaacgggagcaagataacttgcgatccggagatgcagaacactattgatatgcatatatcgaatgggagagctcactttaatcttcttgtgctgggatattcttctgatgagtgggaactagccatcttgacgcttaaacgaactgggtaccatattaaggtcaaggatgaagttctaaccgaagagaaatattcatcaaatctacagacaaaaattccgaatggacgcactactcaatttgttttagttagttctggaggtgtaaatataccatttaacacacagggaatatcagaaccaaataacgaggatagcgatgttaggttacgtgatctaatcgtattggtcttgagaactttccagagtaaggcattagatgctaaaaggaaaggaaaggtttagacttggattctgtgtagaagaattttgctcattgttttgtgcagtcttcactttttggattttgagatgaaaggacacattttaagacttaaatggtggtgtgtaggcaaaaaaaaaaagaagaagatcaaatcagtgttaaaaatgtgtagtatgtgttgttctgcttttcgcatttcttttctttccccatgttttccccctctgctaggttatttagttttagagatactattgtatttaatgaagtctgagaaaaatccaatgctgtaagtaaacttcagaggtattctctgcagccatctaattttgatt

SEQ ID NO: 16454 - DNA, 2684 bp, Oryza sativa
  ref <308>: DATABASE ACCESSION NUMBER: AK066945
  ref <309>: DATABASE ENTRY DATE: 2001-12-06
gacgctttcccttcttccctcccaatcccaatccctcccaagaacgctccccccgtgtcctcctcgatcccaatcctctcctcgcttggccctcctcgtgctcgcggatcgacccacccaacccagctgatgatttgctccggccgccttctcatgcttccttttgcctgatttgttagggaggctggaagccaaaaggcagcggcaatgccggagtgtccagcgagggagcggttctccgcgctccgcggcgcccggtggcgcgccgatctcggcgtcctccccgactgcgcctccgtgtccaccgaggagttccgccgagccgccgccgactcccgccgcaggtatgctaatttgcggcggcggctgttaatagatccccatctctctaaggatgaagaaaacgctcctgaccttgctgtggaaaatccactatcacagaacccagaaagcacttggggccaatatttcagaaatgcagaactagagaaaatgttgaaccaagatttgtctcggctctaccctgaattgggaaatttcttccaaacaaccatatgtcagtccatgcttggacgtatactgttagtttggagccttaggtacccagagctcggttacaaacaaggaatgcatgagctcttagctcctcttctctatgtcctccatgctgatgtgcattacttcaaacaagtcagggagcttcatgatgagctttttagtgatgattttgatggccaaacatttccagataggataaaactgaacaggagtgacaggacaaacacaattgagggtagtgcagctaaaataagaagtttggatgatcttgattctgatacgagggaccttttcttgattaatgatgcttatggagcagaaggggagctgggtattattttgtctgaaaagttcatggagcatgacgcttattgtatgtttgagagtttgatgcatggttcgatgaatggtgcacaaggtgtggttgctattactgacttctattctctcagtcctgcaccagaatcaagcacaggtttaacacctgtaagggaggcatcatctgcaatatatcacttgcttgctagtgtggattcccctcttcacagtcatttgatggagttgggagtagagcctcagtactttgcgctacgatggctgagagttctattcggtcgtgaattttcacttgacaatcttctgtttatttgggatgagatcttctcatctcctaaccattcatattgtgcagacataaagaatcaatcagactatcagtttaagattttatgttctcatcgtggtgccctgattttgtcaatggcagtttcaatgatgctccatctcagatcttccttgctaggaagtgaacatgcaacttcatgcctagtaagattgttaaattttcctggagacactgacttaaagagcttgattgataaagccaaattattgcaaccttttgctcttgaagcaaatcttccttcatctcctctcagaggaaaatctcccttgaatccacccaactactgggaagagacatggaagatactccagatgtcagaagagaaaagaagtggtggttcaattaataggatgaaggtaagaggtttgttcagaagaagttcccccaacactgaatcaaatgtttcgagaaccaaggatgctaattttgaagatagcaattcgacttcagagaatatgatcaccacctcaaacaatgtattggaggcaggacagcctgaagttcaccgctccagttctgttgatgttagagatgctcttggagttgcatgtggaaatttatcaagagacagcagtacctcgttatcatgtggtacggagtatgaccatgagactcatcatgcagatgagccatgtgcttcccatgatgataaggtggttagtgagcctgatccactccctgtgcataatgataagattgatgaagtgacaatcgcagccattcaaacatgtgcattggtcgattatcagcaatcacaacagaataaaccgtgttctgttaatgggaaatcagaggtaaaatatcaacaaaattttgctgtgcatgaagttggccgcaaagaaacatttgaactaggttcaagctcagatgtggctgataaagagctacttggaacattaaggttacttggggaatctatggttgaaaacattgaggttattgacttgttgtttcaaccaaatttgcactctacctcactggataaatcagaggaaattgttcttggtagtatagagcaagctaaagcaaaagcagctctagaaggtctcaagaagattagtgaacttctacgacgaatctaacgtgtatatttgtggaaactcgcaagagtagctctaactacctgttccatacttccatgatatattttcattttttttcacacaagttctaacttaacagaattgttgtactgaacgaacaatggataaatggtccaattgctttgtagatattttgtacatgttccatgtaagctgatgaaatcatcactgtatatttgaacaactcttggctgattttgaagtgctgctggccttccgattttatatggctttgcttttagcattggcagacccaatgatggataagcaatgtttgttcatatcctttttccggccccattgtttggcagcatatttgcaaacgagaagtaatttgt

SEQ ID NO: 16455 - DNA, 575 bp, Oryza sativa
  ref <308>: DATABASE ACCESSION NUMBER: AK066946
  ref <309>: DATABASE ENTRY DATE: 2001-12-06
gatccgtgcgaggaaggagcggcccgcgggcggcggaggaaggagcggcgcgcgggcggcggaggagcggcggggaaggggcggcgcgcgggcggcgggggaggagcggcgcgcaggtaccacacgctcttcggtcggcctccccgcctcctccctcttcgcgtgcgctcggtggcgtcggtgatgttgccggaactcctccccgcctcgcctccggcttctcctccgccgccgcttcgagttcatgggacactagagagaggagcacgagccccctagccccgccgcggatggtgctcgcggaggcggcgctgcggccgtggccggcggcggaaccacgggagctgagggtggagatggtggctctcttcttcgaagccatggagtctcttctcaagtgatacaaaattgaaggatcattgttccttccaaattgattagttgatgagctatcgtagatatggatgcggcgttgtttcacaggagctggtgtgaattgtatctgttgttctttgtattagattactgtatttaaactgctagtttcctggtttcaaagttttttcacgacgagc

SEQ ID NO: 16456 - DNA, 2074 bp, Oryza sativa
  ref <308>: DATABASE ACCESSION NUMBER: AK066947
  ref <309>: DATABASE ENTRY DATE: 2001-12-06
ggtcgttttttcccccaatttctcgtctccccccttcctccaatatatcggcggcgatcccggctcgaggagaggaggctccgccgcgattttttcggtgtcgcatcgaaattatgattttcgatgcattttaggctaaaagtgctcgggtctgaaacctacgtgcttttcttgtcgccgaagatggtgtcagcaaatatacatcgacgcacatgaacagcgatgatgcgttgctgaatccgtctgaagctgcaataagcatgacggttttgcaaattatgatactaaaccattcatgctgctacgccctcgtctggaactttcttcttctgatgcaaccgtgcacaagcaaacctagcctcgaagcgattgtgatgagttttagaggtggtgcgggttcgatcacgtggagttctattggtgttcagtgactcttggcaaaagttctcttgtaaaatcgacgacgatggaaaggtacaaagtgataagggagataggcgatggcacctgtgggaatgtttttagggcttataacactgaaacaaatgaaattgttgcagttaaaaaaatgaagaggaagtttttccaatgggaagagtgcattagtctgcgagaggtgaaggcacttcaaaaactgaatcatcccaacattgtgaagttaaaggaggtgactatggaaaatcacgagttgttcttcatttttgaaaacatggaatgcaatttgtatgatgtcataagagaaaggcaagctgctttctcagaagaggagatacggaactttatggtgcagatactgcaaggtcttgcatatatgcataacaacagttatttccatcgtgacctgaaacctgaaaatctgttggtgacagatggcactgttaaaattgctgactttgggttggcaagagaagtatcttccagtcctccttatactgactatgtttccaccagatggtatcgagctccagaggtgctgctacaatcgtcagcttacacacctgctattgatatgtgggctgttggtgcaattttggctgagcttttcacactgtctccacttttccctggtggaagcgagactgatcagctatacaaaatatgtgctgtgcttgggacaccggatcatactgtctggccagagggaatgaacctgcctcgttcaagcagctttaattttttccagatcccaccaagaaatctatgggagcttattcctaatgctactttggaagctatcgacttgattcagcaactttgttcctgggatccacgaagaaggccaactgctgagcaatcactacagcatccgttctttaatgtgggcaactgggtaccaaggccactccatgcctctcacacaaagacaattgaaactagaccgaatccaaggttggaactgaacctgtgggattttggtacagaacctgaggacaactaccttgatttaactctgagtctaaagccaagttttcctggaacagatttttctaacaatgttccagagcatacaaaagaggaaattctgctgtacccaggatttgaaaatcctcctgtgcagtcagggttttggcctctcgttgcatcagaccggccaatgggcgatgttccagccatgtcatcctggccacaggcatatgtggttgacggccaagccacacttccagctgttggattctctggttctccattcggtttgtcccccttacaaccaaatctgtttgagaaccgttcgttcgcaacacccatccggcaggtcaatttcttctgaggggatacaattaacagattgagcactgaaactatttttcagtccatacattcaacttgttcctttatacattgaactcaaataaacgggggcggcagatgaaatgtatataatcgtagcttgtttcctttttcttttctccccatctaaattcccctcacggagtaccctataatgtcagattctatatttatctagattgtgaatatgtgactttccaaaacagttttgtacgtcgatttgtcaaatgataacagcaagtatggatgagcgataactgacgatttgtgaagctgtttttgtatg

SEQ ID NO: 16457 - DNA, 1335 bp, Oryza sativa
  ref <308>: DATABASE ACCESSION NUMBER: AK066948
  ref <309>: DATABASE ENTRY DATE: 2001-12-06
tggtggcaagccaaccgcaccgcggcgcgcggcgaactcggtgtgcagaaagcgagcgcgacggacgagatggcaaacgtggcgctgctgtccgccgcctcgccctccacctcctccgccgctccccggctccgccacgtcgctcgccgtcggccgtctcgccgctccgcctgcccccgaagcgcggcctccaggctctccatcatggctgcattgggcgaggatccaatcaggcaatggattctaactgaagggaaggccacgaagatcaccggggtcagttccatcggcggtggctgcattaactctgctcagtgctacaagaccgatgccagttccttctttgtgaagaccaatgggcgtattggtccatctatgtttgaaggggaggctcttggtttgaaggccatgtatgacacaaattcaatccgtgttccattgccatacaaggttgggtcattaccaactggtggttcttttataatcatggagtttattgaattcggttgctctagaggtgaccagtcagctttgggaaggaaactagctgaaatgcataaagctgccaaatctgacaagggctatggtttctatgttgacaatacaattggaagcactccgcaaattaacacttggactgccgactggattgagttttattcaaagcatagattgggcttccaattagagttgataacccaacgatttggagattcggcaatatatgataaaggtcagcgattgatcgagaatatgcatccactttttgaaggcgctgttatggagccatgcttgcttcatggggatctatggagtggaaacataagttctgatactaatggtgaacctgttatattggacccagcttgctactatggccacaacgaagcggagtttggtatgtcatggtgcgctggatttgggggggaattctatagctcctattttgaggtgatgccgaaacagccaggctttgagaagaggagggacctgtatcttctgtaccactatctgaaccactacaatctttttggctccgggtaccgctcatcagctatgtccattatcgatgactacttgaggatgctgaaggcttagcttcttccgtttccctctaaagagaataggatgaagaaaaagtacgtatatctgacatttttcttctatatactgtagtctcagtatatatgttttgaattcattatgacatctttacatcaccgtatcaaccgaaaggtcctcaaatctgtaaatatcttactgttgatccaccgtgatcctgtttccggatgtgctaggtgtcgcgcaagagcaatgtattctttcctttttgtc

SEQ ID NO: 16458 - DNA, 1374 bp, Oryza sativa
  misc_feature (787)..(787): "n"=any one base of a, t, c, or g
  misc_feature (797)..(797): "n"=any one base of a, t, c, or g
  misc_feature (812)..(812): "n"=any one base of a, t, c, or g
  misc_feature (940)..(940): "n"=any one base of a, t, c, or g
  ref <308>: DATABASE ACCESSION NUMBER: AK066949
  ref <309>: DATABASE ENTRY DATE: 2001-12-06
gggaagaagagccatggccattcagaaaactgaagagcagcattcagcatttttccatttgcaggggatatgatgtttggctatacatgcacttgcgcataatgcacatgtcgccagacaggccctaactcaaaagcagatcacagagcgccgtcgtcgtcgtgactcgtcccctccacttactagccgagactaagtgttcgacatgcgcgcactggtgaactgctgccatggcgcggatcacgtacgcgtactccatcatgcgccgatttgatagaagagagcgagcgcggcgagaacgagggtgcccaagccgcagcacgacagcaccgccgccgcgaccgccacgctcgccttcctcgccggcgccacggaggccaccacccccaggctcaccgcgccgacgaacgccgacgtcaggaagaacgtgcacaccttcagctgcgccttgcccaccgcgccgccgagcagcccgccgaacacggcaagcacggccccgaacgacaccgacgccaccgccacggcgatggcgtacatcgtccccagctcggacttcccgtcctcctcctcctcctcgcctaccgccgcggtgcagaactcgatgaacgcacacgcggcggctccggcgaccactgggaagacgacggcggctacaggagcccgtgaaggattgtcgcggcgatcagcagcagcgccggcaccagcatctcgagcatgacgacgttcgcgatggctagtacagtcatctgccaccatatctccgtcgtcgacagtcgtcgtcttcggngatcttcttngttggtcatcatccntcaaaggatcatcttcaagatttcgttcagttcggatccaatcatgaagaagatcgtctccttgtcgtatgaattctgttctttcaatttctctgtcttgtgatagatttcaaggagatcttcaaaanattcagagaatgatgtggtctccaaagataagtgaaagtcatcatcaaggatggaagggttccaatgaaatgggctaggaagtaataatttttaggaagctagagaataagtgatggaaataaatgataaaataagggaggatatggaggtagttaagaggattatggaaagttttagttggttgatggtgttgatgatgtgttttggtttgattgtcatcaatttcagggtgtggaatatgagggaaattgtggtgataaaggttgtgaatgtaaaggaggagtaaattttagtttgagtggaagtttgagtgtatttttatgaagaaatagaatgttaattagggggattgtagagattgtgatgaggagtaatgtaaattttagattcttgggggcaaatgaaagaagcaaaacagtttggattctggctt

SEQ ID NO: 16459 - DNA, 3713 bp, Oryza sativa
  ref <308>: DATABASE ACCESSION NUMBER: AK066950
  ref <309>: DATABASE ENTRY DATE: 2001-12-06
ggtcagtcttccccttccccagctctccatcgaatcgtagcttgttgaaggtggaagatggaggccgcgcttctgagcggattcatcaaggccatcctgccgaggctcttctccctcgtcaacgacaagctcaatctgcacaagggcgtcaagggcgacatcgatttcctcatcaaggagctccgcatgatcgtcggcgccatcgacgacgacctctccgtcgaacatggcgccgccgccgccgccgccgccgtatctccatcgaatcgtagcttgttgaaggtggaagatggaggccgcgcttctgagcggattcatcaaggccatcctgccgaggctcttctccctcgtcaacgacaagctcaatctgcacaagggcgtcaagggcgacatcgatttcctcatcaaggagctccgcatgatcgtcggcgccatcgacgacgacctctccgtccaacatggcgccgccgccgccgccgccgccgtacagacgctatgcatggaggacctccgcgagctcgcccacggcatcgaggactgcatcgacggcgtcctgtaccgcgccgccagggagcagcggcgctcttcgtcgcttctcccccgcacgtgccgggcaaccaagaagttgctacagacaaaccagcatgtggcccaggagttgcagcggctgaagaggatggtggaggaggcgaaccagcggaagcagaggtacacggcggcggcgcccggtcaacacggtcaggtgtactcatcggctgcggcgcaggtggatgagccgtggccgtcgtgctcatctgcctcagatccgcgcatccacgaggcggacctggtcgggcgtcgacgcggaccgggcggagctccttgagcagctggcggagcggcagccggagcagctcaaggtgatcgccatcgtcgggttctgcgggctggggaagaccgccctcgccgcggaggcgtacaaccgagagacccgcggcgggagattcgagaggcacgcgtgggtttgcgccgcgcaccggagtgcacgggaggtgctcggcgaattgctccgcaggattgacgccgcttgccatggggactccgatgctggccagctgtgtgtagatatcagacaacagttggagaagaagaggtacttcattgttatcgatgacattcaaacagaagatcagtggaaaagcatcaaatcggcttttccgactgataaggatattggcagcagaatagtggtcacgacgaccatccagtcagtagctaatgcctgctgttctgcgaatgggtatttgcacaaaatgagcaggcttgataagaactgctcaaagcaattgttgtccaagaaagcttgcccagagaggtattcacattacaagcagccagattcagcagcaattttgaagaaatgtgatggccagccacttgctcttgttaccataggtgaattcctgcaagctaatggctggccaacggggcctaactgtgaagatctctgcaatcggctacattatcacctagagaatgataaaacacttgaaaggatgcggcgagtgctggtccgcaactacactagtctacctggccatgctctcaaggcctgcttactatattttggtatgttcccatctgatcatccaatcaggaggaaaagtctgttgaggcgatggctggccgagggatttgtagaaccagtgtcttcatctagtaacctagattccacggctgctttcgatgtgctaatggaccggaacattattgagcccatcaatgtaagcaataatgataaagtcaagacatgccaaacgtacggtatgatgcgtgaattcatatcgcatatgtcaatctctcagaactttgtcacctttttctgtgatgacaagttcctgcccaaatatgttcgtcggctttctctccatggtgacactgttgtgaatggcgataacttcaacggtattgatttatcacttgtacggtctctggtagtctttggggaggcaggtacaactgtattagacttcagcaagtatcaattgctgcgagttttagatcttgaaaaatgtgatgatttgaacgatgatcatctcaaagaaatatgcaatctggtgcttctgaaatatctgagccttgggggtaatatctccaaacttccaaaggatattgccaaattgaaagatttggaggcactcgatgtaaggagatcgaaagtaaagataatgccggtagaagtcttcgggttgccatgcctaattcatctgcttggaaaatttaagctctcagataaagtcaagcagaagactgaagtgcaagagtttctctcgaaaggaaaaagcaacttgcagacgctagcaggatttgctagcaacggaagcgaagggtttctgcatcttatgaggtacatgaataagttgagaaagttgaagatttggtgtacgtcgtctgcaggtagcaccgattggactgatcttagggaggccattcaacagttcattctggatgaaaaggaagcaaatattggtacccgttctttatcgcttcatttcactggatgctctgaagatgcgataaattccttaaaagaaccctgctacctcagctcgttgaaattacatggcaacttcccccaattgcctcagtttgttacatcacttcgtggtctcaaggagctttgcctttcatctactaaatttacaacaggccttcttgaagccttgagtaatttgagctacttgcagtatctcaaactggttgccgatgaacttgagaagttcatcataaaagttcaggggttccccaggctgctatgcctttgtattgtgctacaatgtccaacattcccagtaattgaagaaggagctctgccatttcttgtcacacttcagctgctatgcaaagatctacatggcctttctgacatcaaaattgaatgttttaaacatcttcaggaggtaactcttcattctggagtcactccagctacaagacaggaatgggtaaaggctgctaaggagcatccgaataggccaaaagtattgcttctcaaatctgttgatacagcagaaagtgaacatacagacgttgatagtgtaatggaggcagtcaaaagtgagactacagaatattctattgcaccagagggaccagaacaagtgattgacatgaacaacaaaatgcaacttgaccatggattggaatcctcttctgtgctgaacaaacaaaacaattttgcagaccaatcaagctcaaaagatcaactgcattattctttcaacaatatggggctttcagatgtctctcctgctgtgagtgagctgccgaatggcatggtgccttcttgtacatgacaaggatctagaatcttcacgtggcttcccggtcagttatttggacctgttgctttctgattgtgcattttgtgtttacttgtccttcacacaatcatcgtcatcaaaatacctttgatttcctacactccctgttacctcccttgatgaaatcagggggattcatgggcacagctacatgttctgtctgcattttgtatagtgacgtggcatacctagtacttgttttgtctccatcctgtttggcagagcaacaggttgtaataaatcttggttctaactggctgccctcagaatatgttgtctatagaatccacctgatagggaattcggccgtttgataatcctttatttttaagtctattgtttgtcctgagc

SEQ ID NO: 16460 - DNA, 1612 bp, Oryza sativa
  ref <308>: DATABASE ACCESSION NUMBER: AK066951
  ref <309>: DATABASE ENTRY DATE: 2001-12-06
ggaactccccatcgcctcgcccgcggattctcctcctcctcctcctcctcctccttcctcgccgccggcgacgcgccgccggctaccttttgacgctccgaccgtggtgccctttttctgtgggacccgggatcctagctcccctcctcccccgacgattcccggtcgcctcggcggctctcctcccgtcctagggttccggcgaggtcccccgcggctgcgccggcgagatgggtgagcgcaaggtgctgaacaagtactaccctccggacttcgacccgtcgaagatcccgcggcggcggcagcccaagaaccagcagatcaaggtgcgcatgatgctccccatgagcatccgctgcggcacctgcggcacctacatctacaagggcaccaagttcaactcgcgcaaggaggacgtcgaaggcgagaaatacctggggatacaaatatttaggttttacttcaagtgtacgaaatgttcagctgagataactttcaaaacggaccctcagaattctgattacacggtggaatctggggctagtcgcaattttgaaccttggcgtgaagaagatgaggtagcagacagagaaaagaggaaacgagatgaagaggagatgggtgatgcaatgagagcattggagaatagagcaatggattcaaagcaggacatggatatacttgctgctttagaagagatgcgatccatgaagtctagacatgctggagtcacagttgaccagatgcttgaaattttgaagcgctctgctcatgataaggaggagaaaacagtagctgagctagatgaagaagatgaaaaacttatcaaatcaatcacttttcgaaactcccaagattatgtaaaacggatagaggatgatgatgacgattatgaagatttggtgataccgggccagtcgagtagcacatcaaagatgaatggatcctcccagtcagtatcaaatgcaacagatgtcctgaccaagactagtggatctgataatgccaataaagaaggaaataagatctggccatctaagatgccaaaatttatagtcaagccaaagtctacccctacagatcctatcaagaaacagaagacggaaaccacggctggcccggatactggcaaagcgccagtcgcagaagaaaatagtgagcctgcgcagaacaatgtcctccaatccctctgccaaaactacgatagcgatgaaagtgagtgatgactgcgtggctgcttcgtgccgtaagcccgtaacaaccgtaaccgcgaatcgccaccaactgctgtggcattggttgcagcggatgacaattccactcacagaagaagaatattacgttgtgctaacattggataaccagatccctgaggatctattgttgccacaaatctgaatcccgggaattcattggttaagtatatacagtacttcaaaatctgtggctgctaacattgtccaggcgagatttatacgtgtgtggtttgttgctgaatgcctgaagagatcaaaagtcttgtaaaattgacagggaagatgtttgttgacgttgggttcttgcaccaatccttcatttctacgcctagcttatacacaacacaaatttgacc

SEQ ID NO: 16461 - DNA, 2896 bp, Oryza sativa
  ref <308>: DATABASE ACCESSION NUMBER: AK066952
  ref <309>: DATABASE ENTRY DATE: 2001-12-06
ggttcttcgtcttcgcctcctccccatctcacggcctccgaaaccctaaccctaggggaggaggaaaaagaaaacaggagagagaaaactcgctcgcccgcccgctgcgccgcgcgatggggaggaggaaggagcgccgccttgcggccaaggcggccgcgggcggccgcagggtgaagctcgacctcttcctcgatccctcccccgggggaacaccttcgaaagagggagagcgaggggaaaaccatgaccaacaaactggggttccacttcaccatcttcttcagataagaaggagaatcctctagcgttgcttgggcaatatagtgatgatgaagaggaagaggaagcagcagatcaacccaatgatgaaacagaggctaatcctgcagatgcaggtgataagattactcatgaacgtggggacttgactaggaatgaaggtgatgcacaaagtgatctggctggttctgctaatgtccaacaagagttaactgaagctgatgataagaagtgcactggaaatattgctgaagaaaatgttgttgccataaagccaactctggaagatgggactgcaacagcaactgaagctattcctgactcatctgggatgcaaattgttggtgacattggtgggaattggaagactataatgcatgagcagagcaaccagtgttactattggaacacagttactggagaaacctcttgggagattcctaatgtattagcttctgaaattgcagctgacagtgtcacttctgcatctgctcctactcatgtagactactctatggaggcccaagcacatgcccttacccacaatgccgtggaagcttatccaagtgatatatctgtgctaaatggctcagtggcttatgctactttgggaatgggacagcctactcatgatgcttatgcttatgctggagctgtcactagtcatgaatcgatggacattgatcctttgcagcttgcaagatatggcgaggaattgctgcaaagattgaagccgctagaaaggttgcatggttccatttacaatgttgaattgctaaaaagagaaattgagatacgaatatcagactgcaatgcactttcatcgtatggatcttctttgcttccattgtggttgcatgctgaggtacaccttaagcaactagaattctcagtttccaaattggaaactagttactctaccactgaacctagacatccagagaaagcagacacagaacacaaaacacctaatgaagctgaagtgatgatgccaccctccaatggtgagggtttgaaatctgaggtgagcactgacgttatgatggatggaaatgttaaaaatgaggagccattttcaacatcatccattcagaaatcagaagaaaatgataccacaacagtcccatcaaaaattgaatccgacaatgatgaggatatggatgtggatatggaggttgacgatgacaatgttgaagagcataagcactcgaattccacgcctattaaggaatatcctccatcagagcaagttcagtcaccggctttgttattgttggacggttcagctgcacccctagaggatagcgacattcctccaccaccaccagaagatgaatggattccacctccaccacctgagaatgaaccagctcctccacctcctcctgaagaacctgctgtgtcatctgtttctactgaaacaattccacagtcctatgtcgatcaagcaaacttggtctatacagttcctggaatggagtactatgctgctgcaggtacagaaggtacacatgccagctattatatgcaaacgagtgagcctcatgtcgttcaagcacaccagaatggttactatgcaccagtatctgcaagtggcatatctattcctgttgatgccacatctattgctccagtacctgtttcttactatagctatcattcagtcactatggctgccactggagaagcagctgagccttctggatactacgcggcatcagtctctgccacttctagcagtgtattagataacacaacaagctcttccaatcttgctcctgcgaatagtagtttgcattccagggagtctgacaacatcatatccaaggaggcaaaacttgcatctttgagccaacctgtgggagcaacatcagcatcagcatccatacagggaagttctgcacaggcttctacaagtaccacaagtcagagcaaagttgttcgtagcaagaagcgagctgtttctgttgcaacatcactgaggtctaataagaaggtttcaagtctggtggataagtggaaagctgctaaggaggagcttcgtgatgaggaggatgaagagccagaaagtgctttggacgcattagaaagaaagcgtcaaaaggatattgatgagtggcgcaagcaacagatagccagcggagaagctcaggaaaatgccaattttgttccccttggtggtgactggcgtgatcgtgtgaaacgcaggagagcggaagcaaaaaaggaggcaaatagcgagactatttctgcaccagtgagtgtcaccgatctgcataaaggacaacctgatcttgcagagctctgcaagggtcttccttctggatggcaggcatacctggatgaatctacaaagcaggtgtactacgggaacagcctcacatcagagacgacatgggatcggcctaccaagtgaagataggactaggaagtctagaacatgttttgcggtttctggttgggtcaactgccaattcagtgattcccctatctagataactagatatcctctcccccctaaggagcgaatgacactgtagctggcatattttgagagaagataagttttgtatgtttaaaattaccttggagcaaagaaaagttttgcatgatt

SEQ ID NO: 16462 - DNA, 1321 bp, Oryza sativa
  ref <308>: DATABASE ACCESSION NUMBER: AK066953
  ref <309>: DATABASE ENTRY DATE: 2001-12-06
gtgtgctttctttcgcttcgagcctcttcctctcttttctctcgtctcttccatccacattcttctctctctctcgattgcttcgcactgggaatggcgatagaccatgcgtcccctttctcgctgaagaacagaggcgacatgggaggaagggggtatgaggaggaagaggtggagaaccagcggtggccgccgtggctgaagccgctgctgtcgacgagcttcttcgtgcaatgcaggatccacgccgacgcgcacaagagcgagtgcaacatgtactgcctcgactgcatgaacggcgcgctctgctccctctgcctctcccaccaccgcgaccaccacgccatccagatacggaggtcgtcgtaccacgacgtgatccgggtgtcggagatacagaaggtgctggacatcaccggcgtgcagacgtacatcatcaacagcgcccgcgtggtgttcctcaacgagcgcccccagccgaggcccggcaagggcgtcaccaacacctgcgaggtctgcgagcgcacgctcctcgactccttccgcttctgctccctcggatgcaagattgtgggtacgtccggtggataccgcccaaggaagaagcacggcgggtgcggcggcggcggcggcggcggcgacggtggcaagaagaagaagaagagggcggcgctcaaggacgcgcggtacgagtccgaggactcgtgcacgagcaccagcggcggcagcagcgacaagagcagcgtcgtgcagagcttcacgccgttgaccccgccgccgacctccgccagctaccgcaccggcaacaagcgccgcaagggcgtcccgcaccggtcccccttcggcagcctcatcgtcgagttctagggagtctcgacgcgtccgcgcctgatcaacatagtgtactgtacacatgacatagccaaacacaataaccgtgtgccccggaatggcggcgagccaggcgcttcccttcccggaggccggccggcgtaatgccggagaagggcaagagcagtaagccacgtcacatacatattatagcttgtttgttacttttcagcttcggtttttagttacagttcagttactcctagttagtacccagtcaagtccaagcactgctgggtgcttacgactcggtaacggcaactaagttttgcaaccgtgtaaaaatatagtagcagtagtagtaacctccatattgtagatgtacagagctgtggtgggataggggacagtcacacagtgggatattcatatgtgcattatattacccatgtaataaaaaaaaaagagttgctgctccaaattaccccgg

SEQ ID NO: 16463 - DNA, 1331 bp, Oryza sativa
  ref <308>: DATABASE ACCESSION NUMBER: AK066954
  ref <309>: DATABASE ENTRY DATE: 2001-12-06
gtctcatcatccaccacaacatctcctccaatcagcagcagcagcagcagagctgatcaccatcacttcggagcttgtcagcacaaggctaattattaagctagggctcgatcgatctgatcgtgatctgatctgatctgaccatcagcagccatgtcgtttaggtgtaagggcggcgtcgcttgggttgctctgctcgtcgctgtcgcggctctcgcctccgccgctcagggatttccaaatcccttcggtcacgaggagttcacggagagttactacgacgagacgtgccccaacgcgcagagcatcgtgcgctcggtcatggagcgccacgccgccgccaacccccgcacggcgccggccatcctccgcctcttcttccacgactgctttgtcaacggttgtgatgcctccatccttctgaacgctacggactccatggagagcgagaaggatgccgagcccaacgccaccctcgccggcttcgacgtgatcgacggcatcaagtccgagctcgagcgcagctgcccggccaccgtctcctgcgccgatgttctcgcgctcgccgcccgcgacgccgtcgccatgctcggtgggcccagctggggcgtgctcctcggccgcaaggactccctcaccgccagcatagacatggccaaagaggatctcccgaacccgaaagacagcctggccgaactcatcaggatgttcaaggagcacgacctcgacgagcgtgacctcaccgcgctctccggtgcacacaccgtcggcatggcacatgactgcaagaactacgacgaccgcatctacagtcgcgtcggccagggcggcgacagcatcgacccatccttcgcggcgctgcgcaggcaggagtgcgagcagaagcacgacaaggccacggcaccgttcgacgagcggacgccagccaagtttgacaacgcctactacgtcgacctgctcgcgaggcgggggctcctcacctctgactaggagctctacacccagggctgccagaccggcgacctggtgaagacgtacgccatgaacggcgacgtgttcttcgccgacttcacaagagcgatggtgaagatggggaacatacgcccaaagcattggtggactccggcggaggtcaggctcaagtgctcggtggccaacacacattgttgatgctcatactgttgagtacaacacaattatgttgcactcatttataagtgtgatatttcctttcgatttaattgtgcattaaactgtaagatgtatttttcttttgtacctcaatttttttattcatttttttataatgtatgggagatcactttgccttg

SEQ ID NO: 16464 - DNA, 1478 bp, Oryza sativa
  ref <308>: DATABASE ACCESSION NUMBER: AK066955
  ref <309>: DATABASE ENTRY DATE: 2001-12-06
gggcggttgggcgtctcgtcccgtctcgtctcgtctccccacgacaagaagagaggcggtgcgcttctcctcctctcctgtcctctcctcctctcgtcgagcggcgacgcagaagagtagtatggtgcccgtggagatggaggtggacgacccccgcggctgggacttcgtcgactgggtcggccccgacgcctccgcctccatcttccgctccctcgacgaccccgccgacatcgtccgcgccgccgccgtctcccgctcctggcgccgattcgttgttgagaacgaattcagcaagagcatatgcttgcggatatgcccggagatcgccaatttcaccagcgcggaggaggtgagcagatcgccgccgcagccgccgcacgccgagtccagccatggcgtccagcgcaaggccctcgagagggactacaggatctactcctacctcagcggcgccctcgtctccaacagcccctccatggactgcatcctgcaatgcatcggcgcctccagcaccgacaacttccccgacgagaccatcgagaacacgctcataccacacgatcgggtcaagcaccgcccctcctactggtccagcggcggccacgacgatcccgacacaccagagaccttgacgtacaggctcaactgtgatatgtgcatcgtcgatgagatcaagctgcagccattcaaagcttattttcagtatggacatcctatatactcttcaaaggcagtcagattccggatgggccattccaagcttcctcatggctcggattcctttgttacggtcgaggatgagaatctgatggcaattgctgacgagaattatgtgtggacttacacttcaccagagttccccatgttgcaggaaaatgtgctacaatccttcaagcttccgcgcccagtcctttgcattggtggtatagtgaaggttgaactattgggcagagtacaaaaacaggaagcagatgatagatactacatatgtatctgccatgctcaagtgagagggcgttcactttctccagttttcatggttgatacctctgatcctgctggttattcagtcctcaagtacttgccggatgcaaaaatcctacgctccgaggacgcaatgctggacgatggcagcgaatcgctggagtggcactcacttgttgctaggtacaggcggatgaggcatctagcgataatgaatgtgcttcttggacctgaagagttcatggatgaagatgatattataggtggcgtgttaatggatgaagatgatttaggtggtatgttagaggacgacccttttgtgtaggcttgctgctacagaaccacccgggttttaaactctctgtagttagttttccttgcagacatctgtgaaacattctgcaacttcgtcgagaaaatacagttgttctgatctggagagaagaacaaatggattgttactgcgctcaatcttgatcatgtttatatgc

SEQ ID NO: 16465 - DNA, 2443 bp, Oryza sativa
  ref <308>: DATABASE ACCESSION NUMBER: AK066956
  ref <309>: DATABASE ENTRY DATE: 2001-12-06
gagagagagccatagccagcccgccgctccccgccgctgcctcttcgctcgtctccgtcgagtccgtcacgcagatcgggagaggtttgacagtgcaatgtaatcgataagcaaaaccgacagatacaccaaatggcacgcctgtgcagcttcttgtttgcaatgatgtgatctggcagaaagaaggcttgttggttgagactgcagtagccttgggcagatacacttgatgatttattgatgcagaaattagtgcttagcaacataatgttgtctgtgtactttattaagctaaatggacaataaatatgctgatacaatcagcatgccattcctcgaaacgaagtactaaagagaataaatatcgaagaggtttttcagcaaatagctatgtcttcctcgatgagaagagcaaaccgaggagttagagcagtcaggaagccctggagagaaagcagtccaaggctccaagctattagttttttcaagaagagaaacctgtgaccttttggtgcaatgtcctctttgggagatgttctgcacaacatcttgtgaattgtgatgctagatttcatttcctgttgcttgctttgcttccagctgactgtatatacatataggtgctggtatttctggctctgtgtgcagcagattgcttgtcatgtgctttttttttttcagaatgctctactgattacatatttacatcttcccagaaatcttgtttatcaaagtcagatttttgcacatttttttttggagagatcctttgcacattttactcgtctactcatctgacttataattatttttttatcatttcagcttggtttcatgactctcatctagcacaagctcccggtctgactcaagccgagtgggctgggcctgggccgcatcacgcaggcacacgagctgggatgggatcatttggactcttccagttcgcgccttatataaggacctcacgcacgttggctcgtcaatcatcatcggagcagacacgagagcggcgatctcatctcaggcgcaacgctctgcaagtctcggagcgctgccggagctggtcgctgcacggcgagctattcggcgatggatcaggggagctcttcgtcgatgtcctcgtgctcttcttccacgacggcgtctaccgggcccgatcaaagaagattgtcggcggcggcaccgacgttcgacccgtctatggcctcgagttcgtccatggcggctacgacggcgggcgttccagggagctcgccggcaatggcgcctctgcttacctctgcgaggatgtcctcgggctcttccgcaagttccactacttcgttcgacccagcaggatcgtcggcgttggcacctgcgcgctccccgaggcctggattgtcggcgtcggcacctgcgttctacccgacgacggcctcgagctcttccacgccggttatgccggccgttccagggttcttgccgcagattcctgagcccaccgcttcttgttccgactttcctccggagatgctctggcatcatccttgtggagaacagaagatcaaaggaggacggccggaccttcttggtcgtgagtttggtattcttgctgaacagaagaggttgattcagagacatttagatctgaaagaagaaatgcatttgcgccataacaaggagatcgagaatgccttcatttcggagacaaggctggcccggggtgtggagcaagatctgcttggggactgcaagaaggccgtgctagtgcagcaagatcaatctggaaaagaagaagaaagtcatcagtgcctgaggcagctgcaagacgtcaacggcgagcagcttgtgggggtgccgaagctgggtcttcctggagctgaagaaaacgttgcatgcaacaacactgcttcccataaagaattcagtgaatttccaggtccagatattaagtttgggagcatcaacatcagagatataccattgctgcagggaaggcaagctgcagttattctgcccaatcctcagctagatagaagaacttccggtttaactccagctggagccagttccctggatcaggagacagatcaggagctgaatgaaaagcttttgtagtagttatgaaatagttactcagatcgtgctcctgtggacttgtgcagttgtgttgtgctgtacttacaaatctgtcttaaattgggcatttgtcatgctgaaaagaatccgctgaagatagtggtaaactggtacacaaaattctgtcttgaaacacccattaggccattaggcccattagtcagcaagaacatgttgaaggcagtgtcaccctgctgtgcattatataactcagaatagcaagtattctttggctgtttgtactgaacaatagctctggtagctacattctgtaaatttttttgccttctggaaatgaaaatcagcaagaacatatactgtc

SEQ ID NO: 16466 - DNA, 756 bp, Oryza sativa
  ref <308>: DATABASE ACCESSION NUMBER: AK066957
  ref <309>: DATABASE ENTRY DATE: 2001-12-06
gactcgcaccatagaaaccagcgtgagaacagggctgcacagatcaaggaggacaatattggaagacgatagcgaccacaagcccctcttcgagaaggcactcgtcgggcaaatcaacattgaggatacgagtggaaaagctaaggatgtgatcagcgaggaggggagcagcgaggagatgaaggatagcgacaatgatgttggcatggtcattgggggatatgcgcaagatccatacgatgatagaggcctagaagaactcatgcaagaccaagatgccttggaaaaatcggtcttcctcatcggcatcaaagttgagatcaaaaggaaaggcattatggttgtgacctccatttacttgcagaacttgatccatggcatcggcatcgtctacaataacaaataccatattattctatattggtccatggttccatatatcgtgctgaagttcagagctctttgcgcacaacattggagatgcatacaagttgatatcaaaaggaagcacatggatggcacctccgtggagatcacctccaagctggtcatcctcttgatcagccactgctgcttcttcagccactgcttcattgagattaggtacagcctgttcatctccctcatctaatggtatatctatacttctaaagctggctggatctccagccagctgattggaccacgtgtccttcctcatcttgcaaataaattccgattttatgtaataagaaaatcaggatattttccggtgct

SEQ ID NO: 16467 - DNA, 3847 bp, Oryza sativa
  ref <308>: DATABASE ACCESSION NUMBER: AK066958
  ref <309>: DATABASE ENTRY DATE: 2001-12-06
ggcagcgaaatctctcctcctccacctcctcgcctctctctccctctctctcccctctcatcactctctccccacccccctcgtcgcctcgtcccagatccggacatggcgagcgacagcgacgtcgacgaggacgagctcctccagatggcgctgcaggagcaggcggcgcgtgacctcagccaccagcgccccgcgggggccgggaagcccgtcgtcaacctcgtccgcccccctgccaactcctcccgcggcggcggcggaggaggacgcggcggagggggccccgccaaggcgaggcagcccagccgcggaggcggcgacgacgacgacgacgactccgaggtcgagatgctgtccatttcctccggggatgaggatggcgccccctcctcccgtgaccgtggccccccgcccccccgcggaggcggccgcgccggggcacggcgggccgcgtcgagggatgatggggatttcgacgacgacgagcccaggagctggaagcgcgtcgacgaggccgagcttgctcgcagggttcgggaaatgcgtgaagggggggcagctcctacagttgatcagaaagcagctgctgcagcaactcggaaggcacttaccaatgtacagactttacctagaggagtagaagttctggaccctttgggccttggagtcattgataataagtctctgcgattaattactgatgcttcagtaagttctcctgtttcaagggagaaggctcagggtttagaccccagtatgcgagagaaagttatatattcttctccgaattttgaccccaaggtttttctttcgtgggttcacaaagatacaagtgctgctgacttagagtctggtgcgcttaccttgaaaactgatctcaaagggagaacacagcagaaaaaacaattagtcaaggagaactttgattgttttgtttcgtgcaaaaccacgatagatgatattgagtcaaagctgagacagatagaggaagatcccgaaggtgcaggaactgctcacttgtactcagtcacccagaaaattagtggtgtagcaaaccgtgcatttgagcctctatttgagaggcaggcccaagctgagaagatcagatctgttcaaggaatgcttcagagattccggacattatttaacctgccaagtgcaattcgtgggaacattagaaaaggagaatatgacctagctgtcagggagtaccagaaagctaaatctattgttcttccttctcatgtggggatactaaaacgtgtacttgaggaagtggaaaaggtaatgcaggaattcagaggcatgctttacaagtcaatggaggatcctcatcttgacctcgctgagcttgagaacattgttcggctactgttggagttggaacctgagaccgatccagtgtggcattatcttaacattcagaatagcaggatccatggattgtttgaaaaatgcaccttagatcatgaagcacgaatggaggttctacagaataaaattcgtgagaaaatactatctgatgcaaaatggaggcaattgcaacaagattcaaataaatcattggaagttgattctgctaccggtgactcttttcaagatgatcaactgtcaacaaatattatggctgatgaagctgatagcttaagggcagcctacattcgtaggttaactgctgtacttatccagcatgttcctgcattctggagattagctttatctgtcttcagtggaaaatttgcaaaggcagctgcggggaatgtactttctgattctgatatgaatacaaaacagagtgtaaataagactgatgataaaggtggagaagcaaagtacacaaaccatactcttgatgaagttgctagtatggttcgtgctactgtatctgcttttgacaccaaggttcagaatactttccgtgattttgaggaatgtaacattcttcgtccgttcatgggtgatactataaaagaaatagctaaggcttgccttactcttgaagggaaggattcatctccaactgctgtgaaaatgttgcgggcccttcattatgaaataacgaagctttacattctacgactttgttcatggatgcgggcaacaactaaggagatatcgaaatatgagacctggtttactttaaccacccttgagaggaacaaatctctatatgcaatttcaagcatgcccttggagttccgtgatatcatagtttcggcaatggaccgcattgattttatggttcttaatctgaggagtgagactgccaagtcttacgatatttctcaacacctccatgaaattcatgaatctgtcagacttgcatttctaaattcttttctggattttgctggttatctggagaggtttggaggggaactagctcagaacagatcaaataaagaaaacaaccatacccaaaatggatatgtaaatggtactaacagtgaaacatctgctggcatggatggggacttgtacaagaagctgttggttgttctgagtaacattggatattgtaaagctgaactttcagatgaactgtataccaaatacaggcacatttggtccccagtcagggataatgatgagcgtagtgctgacatgcgagatctgatgacttctttctcagcacttgaggagaaagtcctggaacagtatacatttgcaaagtcgaacttgatcagaaatgctgcacgaaactatctgttggattatgggattcactggggagcagcaccagcagtaaagggcattcgagatgcagctcttgatttactgcacatccttgtagctgtacacgcagaggtctactccggtgctaggcctctgctggaaaaggcgatgacaattttggtagagggtttgattgatatcttcctcagtattttccatgagaataagaccaaagaactcagaatgttggacgcaaatggtttttgtcagctcatgcttgagcttgagtattttgagactatattacggacatacttatcaactgaggcagagcaggctttgagatccttacaagagaatttattggagaaggcctgcgaaagtgtgactgaagccttggagaatcctggacaccaccgtcgaccaactcgtggcagtgaggatgctgcatcagatgatagacaatcagtatcacctgatgatctgcttgcacttgctcagcaatgcagtagcgatttgcttcaaggggagctggagaaaacccggttaaatattgcgtgctttatggagtcaactcttcaatcaacgcctgcaccggctggatcaaaacctgctgcttatcagtcatacaaggcacctgcgacacaccaaccagttcaagtgtcctccccaagttttagaaggcagcagacaagtacaaattcacctgcagcctcgaggcggcgtcgatgaagaaaatgcatcatgttgagagaaccattccttcatctacgtgcctcttccctaaattctcctctttctttgttcatctttcccatgctttcgtttgttacctgtaattagtatcatgttgtcatgtattatgaattttgacccattcttttggtgttgtaagataaaaggggtgtacaggggttgctgtacggggctatctacttgtataatttccatgagcctggaattattgtcgccattttttctaaagacaccatctcaacttaactttctggaactgagtgtcagatttgtcggtggctgacgaactcattagtcattaccaccattggacctcactcttccgattttctatgcggacttaaatgtgtcttgtaccaggctgaaacgatagttggagcacgcgatcgatcttatttgattcgtggatctg

SEQ ID NO: 16468 - DNA, 883 bp, Oryza sativa
  ref <308>: DATABASE ACCESSION NUMBER: AK066959
  ref <309>: DATABASE ENTRY DATE: 2001-12-06
ggcccgtctcctcttcggccgtctttgctcgaccggagcggagcgcagcgcaggccaacggcgtggacgacgcgcgccccctctggatcgccgctcccccgcgcgccacagcttccatccggcgactgcaaggccgcccaagccaagagggtttctttgcaagctttagccgctcgacgttcattgacagaacatgcctaaaataaagacaagccgtgtcaaatatcctggaggatgggagcttattgaaccaactatccgtgagttggatgccaaaatgagggaagctgaaaatgacacacatgatgggaagagaaagtgcgaagccctctggccaattttccgtatttcccatcaaagaagtcgctacatatatgatctttattacagaaggaaggagatatcaaaagagttgtatgagttttgcctggaccagggttatgcagaccgtaatctgattgcaaagtggaaaaagccgggttatgagcgcctttgctgtcttcgatgcatacagacacgagaccacaactttgcaactacatgcgtctgccgggtccccaagcatctcagagaggagaaggttatagaatgtgttcactgtggatgcagaggctgtgccagcggtgattgagatatcgtcattatcttgtttgaatctgtcaaactaagcagacataatgtttcttgagcgaaatttcggctaaaaacgtttacgaaaacgttttgtaaacccgcctaccgggtatgacgttatttaagtacctgagattgtggttacggtctgcattaatctgccgcatggtcattgcttgatcatcggcctcaacaccctgcatatgtgtattctaaagttttttaatggaaacatctgttactcgatgcc

SEQ ID NO: 16469 - DNA, 1069 bp, Oryza sativa
  ref <308>: DATABASE ACCESSION NUMBER: AK066960
  ref <309>: DATABASE ENTRY DATE: 2001-12-06
gggaaggctagaaggcgatgggcgcggtggattcctcgaggtgaggaggaggtgatgtgctcggcggcgacggcggcggcggcgcggcggcgatggaactcccgtggctggatctgcccttcacgctgctgacgctgctgctggcgacgcggctcgcctacgactactacggcgtcgtcgcggccaccttcacggggagcttctcgctccagatcttcctcttctactgcttcgcgcgctggtaccgccacaccatcgccgcccgcgccgccgcagacgccgacggggatggcggcggcggcgcggtggcggatgaggaggcggcgccgcccgtgctgatcccgctgctggagggccggggcggtggaggcgggggcgcgggcgcggcgtcgtcgctggcgaaccggtgcttcgccgtggtgttcatggtgttcgtgccgctggtcatcgtggtgttcgagcggagccaggccgacgtcgtggcgtacgcgctctgcctcgccaacatcctcgtcatggtcgtctggctctcgcccgagcgccggcgcggaccccgcgtcggcggccaagtcgttcctccgcctcagcgacgacgaggacgaaggcagctgcagcggcagcggccacggcgccgccgaggacaagtgctgcgtctgcctcgccgggatgcgggaggcgcagggctccgcgacctcccccggtgcggtcaccgcttccacgccaagtgcatcggcaagtggctcacggcgcacccgacgtgccccgtctgccgcaccacggccgtgccgccgccggcgccgctgcccgccagcggcgaccatgccgacgacgccatcacccctgtctagctctgcacatagtctgacagacaaactcaggtaaattaatttcttgtgctattaatctgtaaaattgttgggaaatttttttcttgaagatgttgtatatagatatatagctgtatgaatgaattgcctccaatttttcatgcatcaattggaaagaatggtaagtagtagtaatctgtaaattcttttgtaacattgctctatgaagattcaagattgtg

SEQ ID NO: 16470 - DNA, 1470 bp, Oryza sativa
  ref <308>: DATABASE ACCESSION NUMBER: AK066961
  ref <309>: DATABASE ENTRY DATE: 2001-12-06
gagaggcgcgcgtcgccgtcgggcggcggcgaagccggagatggcggggacgccggggaggcagggttatggtatgtactagggtgtgttcgttcggggatggcgactagttcttcgagctttcgccggaggggaagatggcggtgcggccctcggggaaagaggggatgcatcaagcggtatttctgatttgggcctctggaagatggatttgagtgatgatgtgtaccaattgctttctgaagtgaagcatatgaatctgatgatggaaactgttgcaacggcacattcggaatatgccaatatggaatggctacccttgcctgcagtccgtaggataggatgagctgatgatgagcagctgcagctcgcaggattatttatttgtcgtggaagctggtgtgcaacgtctacgaattcgtgtaccagactacccttatatataagtactccgtatacatacaggtacgcgcacggtcggccacaccttgagctgcacgaatgttattcgcgttggacgaggcaggtgttccttggactgaagaagaacaccggaggtttttgcttggattgcaaaagcttggcaaaggtgattggcgaggaatctctcgtaatttcgtggtctcaagaacacctactcaagtagccagtcatgctcagaaatattttatacgccaatccaatatgaccagaaggaaaagaaggtctagcctttttgacatggtgccagatgagtctatggaccttccaccacttcctggaggtcaagaaccagagacccaagtattaaatcaaccagcactacctccaccgagggaggaggaggaggtagattctatggagtcagatacttctgccgttgcagagagctcttccgcttctgctatcatgccagataatttgcagtcgacctatccagtgattgttccagcttatttctcgccctttttgcaattctcggttcctttctggcaaaatcagaaagatgaagatggtcctgtgcaagaaacacatgagattgtcaagcctgttccagttcattcaaagagcccaatcaacgttgatgagcttgttggcatgtcgaagctcagcataggagagtccaatcaagagacagtgtctacttctctttcattaaatctggtaggaggtcaaaatagacaatcagctttccatgcaaatccaccaacaagggcacaggcatgatctccttctgcacacaactgcatttagatgaatcccaggcaaaataagctttgcctccttgtttttttgtttttattttaagattaaccgttctccgtagtctgtatcatgtgctgtaagttatgctatgtatgaatgtatctgttgtttgtctggcacacatgataaatcactctatgttaacaaaatcagtaatggtagtgctgatcttcgtggttgtactgttgtaaactcttttataagaaaaaaaaatattagttagtc

SEQ ID NO: 16471 - DNA, 3099 bp, Oryza sativa
  ref <308>: DATABASE ACCESSION NUMBER: AK066962
  ref <309>: DATABASE ENTRY DATE: 2001-12-06
gacacgtccctcccccatcttcgccttgcttccgaatccaaccccaactccagatcccctcctcctccgccaccgccgccttcgccgctgcggcgatctcactcgcacttctctctatcccccaggtggccgcgatccgatggactcccgctccatcaacctccggggtttcgccgggaacgccggcaaaaacatcatgcaggggattgggggatttgttttcggaaatgagaggtccgagtccaaggaagacagctatgttgagagattccttgatcgcataagcaatggcaccatatctgacgataggaggtctgccatgaccgagctgcagtcgcttgtggcagagtctcgttctgctcagatgtcatttggagccatgggatttcctgttctcctcaacgttttaaaagaagaccgtgaagatgttgagcttgtgagaggtgctctagaaacctttgtgagtgcactgactcctattgaaacctcgcaaggaccaaaaactgaggttcagcctgcatcagtgaactctgatttgctttctcgagaaactgagaatatctctcttcttttgagcttattgtcagaggaggatttctatgtgcggtactatacgatccagcttttgacagcgctacttacgaactcgctgaaaagactacaagaggcaattctattgattccccggggcataacagttttaatggatatgcttatggatcgggaggtcataaggaatgaagcactgttacttcttacttatctgaccagggatgctgaggaaattcaaaaaattgtggtatttgagggtgtatttgagaaaatatttagcattatcagagaggaaggatactctgatggtggtgttgttgttcaggattgccttgaactgctaaataatttaatccgacaaaatgcatccaatcagatgcttctgaaagagacaatcggctttgatccattgatagcaatactaaagataaggagaggcagtgcattcaatttcactcaacaaaagacagtaaatcttctcggtgctttagatactgttgagttgcttttgatgggaggaggctcatctggtgagccaggtaaagatgctaacaagaccaccaaccaaactgctttagctcagaaaaatattctggatcaccttctactgttaggcgtggagagtcagtgggcccctgtagctctccgctgtatggccttgcgatgcattggtaatttggtgttaagaaatcctcagaatcttgattctcttgcgagcaagcaagttggggaagatcctcatgttcagcctgcactcagtgcaatcttttctataatcttgcgaacctccttagcacaagaatttgttgctgctgattatgtcttcaagtgtttctgtgagaaaaatcctggtggccaggctttactagcatcaacgattgctccacatccaaatcaagcacatgctacatttggggccactactgacatgccttttggaagtatacttctgcaagctctggtgtcaagtgatgataatggagatatggaggcatgttgcagagcatctagtgttctttctcacataatcaaggacaacttgcaatgcaaagatcgtgtactgcaaattcagcttgaaacacctgcaccttccttgggacgcactgagccactactgcaccgcattgttacatgtttgtctattgcagcttcagcagaaggagaaaatggccaaagcggtcaaccagaagaatcatatattcagccagtcattctccggttactcattgtatggcttgtggattgtgctaatgccgtagattgccttttggaatcagcagtacatctgaactacattatcgagcttgcttcaagtaaacgctacagtgcttgtgttcgtggattggctgccgttgttttaggtgcttgtgtcctgtataatgcaagccgggagaagggccgagatgcctttgctgttgctgatgctataagtcagaagattggcctatccacatacttcttgaggttcgatgagttgcggaaaaggtttgcacattcatcatcagggcagcagaaccgcaagcagctttcacggtcaagtgcaaatagtatgtcagatttccaagagattgaagaggaagaaataaataaaggcgatcagcatccagtcctgtcagaaatctttgattcacattttgttagtttcctcagtaagcttgagactgatattagggacaatataatggatatatttagtcgaacaaagaccgcaactgcaattatacctgctgagttggagcagaagaatggggaagttgatggagaatacatcaagcggctaaagtcatttgtagagaaacaatgcaatgaaatgcaggacttgctaggtcggaatgcaatgctggcagaagagttagtgagaactggtggtggcaactccgctgattccttacagaaaccaagcagtggccgagaaagggtccaaatcgaatccctcagacaagaactcgaaggagcaacccgacgcatagaggcactcagagctgaacatacccagatcgaagccgaagctagcaaccaacgaaacctcgcagcgaaactggaatctgatctcaagagcctgtcagatgcttacaacagccttgaacaggccaacttccgtcttgactctgaagtgaaggccttgcggcagggaggcagtgcaccctaccccgatgtggaagcaatcaaagcggaagcgaaggaggaggcagagaaggagagcgaggcggagctaaacgatctcctcgtctgcctgggccaggagcagagcaaggtggagaagctgagcacgagactggcagagcttggtgaagatgtggacaccttgctgcaaggcattggcgatgacactgctttgccagatgatgacgacgatgaagatgaagatgatgagtaatataatgtgtgtaattctgtcatctcatggtgtaaccagttggggatcatgctgttgtagcaacaactgtacagtggatgatgatatttagacaaaggtttcaagttatttatgttggatgattgaattgctgaatttagttctcagaattaagtgaagtccttaggaac

SEQ ID NO: 16472 - DNA, 1864 bp, Oryza sativa
  ref <308>: DATABASE ACCESSION NUMBER: AK098977
  ref <309>: DATABASE ENTRY DATE: 2002-08-28
gcccctcctccttcgcgccgcgccgccgccactcgccaccaatccccctcctccaccaacccctccacgcctcacctcctcgcgctcaaatcccccacgataaatcgaacctaatcattcaccggattttgttcggagttttccgcgatccgtcgcctcctcgtcgagccgcaatcagtggtgcgtgggtgggcgagcatgagcatggcgttctcgtgcgcgggcgcgcggctgcagcaggggcgggtcggcgtggggaaatgccggggtggtggtggtggtggcggtggcgccgcggtggtgaggcggagcggctgctgcctctacccgggcgggaggagggggctgggggttagggggatccgcgccgagctgccgccgcgggcctgcgcggatgggggcggcggcgccaccacctccggttcgaccgtcgccgtgcctgatgctggggaggttgctgaccacgtgaaggaggtcggcgcggttgcacctccgagcgtgctcccgaagggggagcgtggcgaggtggctgatgttgacggctcgggtgggaatgggaagttaccctccagtggcggcggcggagatggggataatggtggtggcggcggtggtggtgatggtggggacggtggggatgaaggggatgatgagtttgggccgatcctgagttttgatcaggtggtccaggaggtggagaagcgaggggtcagcttgcccagcttgcccgcggatatgattgaggccgcaaagagcgtcgggattcagaagctactgctgctgagatacttggacatgcaggcatcggcttggccgttgggtccagccattaggtcctgctcacttctccggaacaggatgctagttgacccttcatttctctttaaaatcgggactgagatagtcattgacacatgttgcgcgacattcgcggaggtacagaagagaggggaggagttttggtcggagttcgagttgtatgcggcggatatgttggtaggcgtagttgttaatgtagctttagttgggatgttggcgccatatgctcgatttggtgggggatctgcatctccaggtcttcttgggcgtgttaggcatgcttatgactctctcccaagcagcgtgtttgaagctgaaaggccaggatatagtttttccattcaacaacggataggaacatacttttttaagggtattttatatggtacagttggattcttttgtggtcttgtgggtcaaggaattgcgaacttgataatgactgccaaaaggagtgtaaagaagtcagatgatgatgtacctgtcccacctctgctcaaaacttctgcattgtggggtgcattccttggtgtgtcttccaacacccgttatcagattattaatgggcttgagcgtgtggttgaggcttcacctgttgccaagcgtgtcccagctgtttctctggcattcactgtcggtgtgcgctttgcaaataacatttatggaggaatgcagtttgtggactgggctagaatgaccggttgtcaatgaggtgaaggcattcttattttcatgttatcattcacagcgatgtggagtgttgccagccatagactcccaaaatttgtcgaatttgctccgtctctatttaaagatgtgatgctattaccaataattgcattgctgcagagctccaaaataaatgaggtcgtatgttctgtttagaatgcaacaggattcattgtaaaatcaggaaagtttcagcatgtcatagtgcttagccttccatatgcgcaaatcagtagctccaagatttagaagattggatgtatattgaattcggttgtttctcttgtcgaataaattcggtcatcttggtttgggc

SEQ ID NO: 16473 - DNA, 2095 bp, Oryza sativa
  ref <308>: DATABASE ACCESSION NUMBER: AK066963
  ref <309>: DATABASE ENTRY DATE: 2001-12-06
gatggcttcatcagaaaatccatgaagataattgagcttggttctaacagctaatagctgatcagaccaccatggtggcctctctcctttgcaccgtcgccgttgcggttctcgccgtggcagcggtcggcggcgaggcgggggtggtggagcacaccttcgtggtgcacgagatgaacgtgacgcacttgtgcaacacgaccaagatctttgtggtgaatgggcagttaccgggcccgacggtggacgtgacagagggtgacacagtggtcatccacgtcgtcaacaaaataccacatgggcttaccatccactggcacggtgttcgccaattgaggagctgctgggccgatggggcaggcttcatcaccgagtgccccatcccgcctggcagtgagcgcacctaccgcttcaatgttaccgaccaagtcggcacgctgtggtggcacgcccacgtcacctgcctccgctccaccatcaacggcgcattcatcatccgtccccgcgatgggaagtaccccttcccgacacccgtcaaggatgtaccgatcatcataggtgaatggtgggagctcgacctcgttgagctggacaggaggatgagggatggcaacttcgacgacaacccgttgtcggctacgataaacgggaagcttggcgaccttagcaactgctccggcatagtggaggagagctttgttctcaacgtgaagcatggggagagctaccttctccgggtcatcaacactgcattcttctccgaatactatttcaaggtcgccggccacacgttcacggtggttggcgctgatggcaactacctgacgccgttcaagacagacatggtcaccgttgcccccggcgaggccattgacgtgctcatggtcgccgacgccccaccagcccactatcacatgatcgcgttggctaaccaaccaccggagccagacccacagatcccgaagtacatctctcgtggcctcgtccgctacaccggtgtcgatgccaacaacaatggcctaccggtcccaatgccgatcatgcctaaccaacacaacaccatgccatcctactacttccatgccaatcttactggcctcatgcatccgaagcatcgtcgtgtgcccatgcacgtcgacgagcgtatcttcatcatccttgggcttggtaccatctgtcgtggtcggaacaccacctgcaagcggcagcgcagcctggagaccatcgaggtggccaccatgaacaatgtctccttcacccacccaaacaccactgcgctcctcgagcgctactacgacggcactccagaaggcgtttacacggaggacttccccgttcggccaccacggccatacaactacaccaaccctgctctcatccctcctggccctctcgaagaggtgctggagccaacattcaaggcgaccaagctgaaacggttcaagtataacacatcagtggagatcatcttccaaagcagcacgttgttgatgagtgactccaaccccatgcacctccatggctatgacgtcttcctccttgcgcaggggcttggcagcttcaacgccaagagggacatcaggaagttcaactaccacaaccctcagctcaggaacaccatattggttccccgcggtggttgggccgccgtccgcttcatcacagacaatccagggatgtggtacttgcactgtcactttgagttccacatcattatgggcatggcgacggcgttcatcgtggaggatgggccaacaccggagacgagcctgcctccaccgccgccggagttcaagagatgtgatgcctcttgaagcaacttatcctaacaactatggcaaggaccttcctcctctttgccagtattcactagataatggcattgcctttggggcattttattcttgtattgcattagttaagacgtacatgttaaattccagcgtgcacaagccggtccaggccatgtggtcatcagcttcaggccaaggtcacgaaaagcacaacttgatcatctgcatcttgttatgtactccctccgttttttgtttgatttttttttcttgtcaaacttctttaatttaaccaaatttat

SEQ ID NO: 16474 - DNA, 2804 bp, Oryza sativa
  ref <308>: DATABASE ACCESSION NUMBER: AK066964
  ref <309>: DATABASE ENTRY DATE: 2001-12-06
tcttcctcgcccgcccaccgacggccgacggccgacggcgaacccgctcctccgcctccgccgctgcctgagccagccagccattggagtggaggatccggcctctgctcccctcgcaaacccccgccactcctcacccgcacccgatccgatccagccccgcatcccccgatccctcccacgggaccaagattcggatccgcctcgccgtgatggatcccgacgagaaccccacgccgccgccgccataccaggaagcggaggctgcggtgccggtcgacgagcagcctccgccccccgtagaggaagagcaggcggaggcggcacgccaggagtcagctgcgccggttgaacaagatgcggcggcggcagagggaggaggaggcgatcgcgccgcgggcggggagcggagccgcgaggagctggagcgggtggtgatggagctcggcttccagaacgactacctcaagtcccagatcgcggccgccgagggtgggagtggggcggcggagtcggagctcgtgaaggggttgaaggagcaggtggagaggctgaggaaggaggtggaggagcacaagcagacgcagaaggccaccgaggccgccctcgagcacgtcaatgtcgcctacgccgaggcggacgccaaggtccaggacctcaccgccaagctcacccaagctcagcagaaaatggataaagaactaaaagaaagagatgaaaaatatgttgagctggataccaagttccagaggcttcacaagcgtgctaaacaacgcatacaggatatacagaaggaaaaagatgacatggaagctcgctttaatgaaattaaccagaaggctgagcaggcttcttctctgcagtcagcagcacaacaggaactggaacgtgctcgtcagcaggctagtgaggctttacggtcaatggatgctgaaaggcagcaattgcgaacggtgaacagcaagttaagaactaatcttgatgaggcacgtgttgccttggaggccaggaataatgtccttgagaagttgcgacaatcgatgtttgaaaaagaacagttgttagagcaaacccaagcatcacttcaatctgcagaagaaaagagaaatgcatcaattgcggagcttactgctaagcatcagaagcaattagaaagcttgggggcacagctaactgaggtttctgcggagaggacaaaagcatctgaaacgatccaatctcttcagatgttgcttgtggagaaagattcagaaatagctgaaattgaagcagcttctactggggaagctgctcgaattagagctgccatggaggagcttaaaggcgagcttgctcatctgaaggaccaacatgaaaaagaaaggcaaaattgggaaactacttgtgaatcgcttaggacaaaattggaagcatcagaaagtgcatgccatatatctgtgatagaatctactaaagttaaaagtcaactggagttggagttatcaaagcaaaaccaattactacaaaccaaagactctgatctattggctgcaaaagacgagattagtcggctggaaagcgagttttctgcatataaggtccgcgcacatgcacttctgcaaaagaaggatgctgagctgaacacagctaaaaactcagatttgattaaagcacatgaagaagcaataagggaagctgaaaaggaaatttcagctgccttggcagaaagagataaagccatccatgaccttcaaattgctcaatccaaatatggtgaagagattgaagcaagggatttggctctcgctgattctgacaaaaagttaaagaatgtcatggcaaaattggattctcttacttctaaattcctttccgaaaaagaatcatgggagaaaaacgtggcaagtgtagaggaaagctggagattgaaatgtgagtctgtgaaggctgagagcaatgggcatgctggagatgaacttaagaagaatttagtggagttgacagtaaaacatgagaaactaaaggaagagcatgattctttccgtgatattgctgatagaatgcttgaagagaaggaccgggaggtggctaagctcctcagggaaaacaaggatctacataactctttagaggctaaagcggcagttagcatcaatggtaatcaaaatccaggacctgctaaacaggatgcaatggacattgaactggctgagcagcaaattctgctccttgcacggcaacaggaacaaagagaagaggaattggctcaatcacagaggcatatattagcacttcaacaagaaattgaggagcttgagcgtgagaaccgccttcatgatcaacaggaagcaatgttgaagactgagctccgcaatatggagagatcacaaaaacgagaaggaatagatatgacatatctaaaaaatgttatcctaaagcttctggaaacaggggaagtgggagcattgctgcctgtggttgcaacattactgcaatttagccccgaagagctaacgaaatgtcagcatggcgtcctttcagctgtggcttcatcgccagcaactgcggtaccagacggtggatccacgccaaattcattcttctcaagattcacattctagcagaggtacatagatttgacattctagctgggggtagccggagaggatgctgtttgcacgaaatcccagcggtttttctggccatagatgattctatttgtttattatttctaggtcgccacttcctctcgtcacattttgtaaaactagtgtatataaaattatgaacattataagcaattttatgcctaaagtggaagggat

SEQ ID NO: 16475 - DNA, 995 bp, Oryza sativa
  ref <308>: DATABASE ACCESSION NUMBER: AK066965
  ref <309>: DATABASE ENTRY DATE: 2001-12-06
ggttccaggtgcagctgacgcggtacgctcgcggcgggctggtgatcggcacggcgtgcaaccaccaggtctccgacggccagtccatgagcttcttctacgtcgcgtgggccgccgccgtgcgcagcgccggcgcgaccctcccgacgccgttcgtcgaccgcgccgccatcgcggtgccccgcggcccgccggcgccggcgttcgaccaccggaacatcgagttcaagggcgagaacagctggacccactcctacggctccctccccctggagaggatcaggaacctcgccgtccacttcccggacgagttcgtcgccggcctcaagtcccacgtcggcacgcggtgcagcacgttccagtgcctcctggcgcacgcgtggaagaagatcacggcggcgcgcgacctttcgccggaggagtacacgcaggtgagggtcgccgtcaactgccgcggccgcgccagcccggcggtgcccatggactactttggcaacatggtgctctgggcgttcccgaggatgagagtccgggacctcctctccgccagtacgccacggtggtcggcgtcatccgcgaggccgtggcgcgcgtcgacgagcagtacatccagtcgttcgtggacttcggggaggtggccgtcggcgacgagctgacgccgacagcggcgccgccgggcacggtgttctgcccggacctggaggtggacagctggctagggttcaggttccacgacctcgacttcggccgtggcccgccgtgcgcgttcctgccgccggacctgcccgtcgaggggatgctcatcttcgtgccgtcgtgcgcggcgaagggcggcgtcgagatgtacatggcgctcgacgacctccacgtcgacgctttcaggcaaatctgctactccatggactgatcacgactgtcacaaaaatattactcctatgtgtaccatattgttagtttgttacaagtacaacaacagcgtgcatatttgcaagatt

SEQ ID NO: 16476 - DNA, 1620 bp, Oryza sativa
  ref <308>: DATABASE ACCESSION NUMBER: AK066966
  ref <309>: DATABASE ENTRY DATE: 2001-12-06
gacttcccccgtccttatcctctcctctcctctctctctctctctcaccgacggcagcggcgggctcggcaccggcggcggcggcctcgaccgccgatcgccgacgccccgcgccgcctcctcgctcatcaggatgggctcggcggtgtgtgccggtgccggcgtgctcggtgcgccagacccgcgacgtcgccttcgaggccgaggacgcgctcgacgacttcctccggcggcagtccactttggtcgcggtcgcggcgacgtccccaacctccatgacgtcgtcgcctcggctactccggagcccactgcccctggccggatttggaagccagctacacaacgacgggcgccggcctgccgttcttcgccctcggcctccaccggcttcccttccgacgtcgccgccttgagctcctcctcacgccctccccgccggcccttcccgatctgctccacccaagccaccacgacgaccagatccaggaagtctctccatcgctctagtcctgacagtggctggaggaccccggccggttgcagcaattcatccccgcaaaaatatcaaagttgacatcgtcagcctcctcatttggataagaatttgtgaatcaggatgttccatctaatttggttttgctcgggttgtcaaatgctcaatggatatgtacctgcgcatgtgcatcaggttggtgtgcttcggcatgtggtgggttgatttacttcagccaaggttgtgctcatctcttgtatcctcaaacactaagatactgatgttcttttcctcttctcgccattcccttgcatgccatttttttcaggtaaccaggttcaatgaagaatgggagaattatgtttactgataatgtgcatttttatttactgtgccttattagttcatttggcatggacgcccttacttttgcatcagctcaggcttagcaagaaagattctcatcctgttttaaataatgacccatgaatgattaatcttgatcccccaccctcaagcaactctgttgcttttcgcttgcgagaacgcagttctgtaatctagcttaactcagaccgattccttattttattgataatctcatctatttgtcatgtgagtaatttaagtggcgcttaaacaacaatgaaacaattgtccagatgtggttggaacaaaaccatatccacttgccgtcaaaaaaaaagaaaagaaaaataagtgcaaatttgttatttcttgttcttcgtatggttaaagatggtcttcctcgtatggtcgaagatggtcttgtttctcactatgaattattcttgtgcttgcagatggatgatactctgacaactggaagcatcaggagtacacaggggaaaagagacgtttagcagaggcttcacttgcctacaactgtgagaggatatagaagactaaaggatttacagattacagatgaaaagagaaacggccaatgaatcagttctacatgtagaaagctgtagatagctttaattagtgagacaattgtgtgaacttcagtttttttttgccattgcacctttttttttaaatgtaccgttgagctgtaacttcgatgatttatccaatataaataaaaatagttatgttcg

SEQ ID NO: 16477 - DNA, 1344 bp, Oryza sativa
  ref <308>: DATABASE ACCESSION NUMBER: AK066967
  ref <309>: DATABASE ENTRY DATE: 2001-12-06
gacccttatccattcactctctccttctcaccctcggcggtggcagtggcgggggctgtggcggcgaacctcaccctcggcggcgcggcgccctccaggtacggcggcgaggaggcagtgggtgtggtgcggcggtgtgtggcggcggcaatacagtggcgaggagggctcgacggagcgcggcggtgcggcggctcgacgcggcgatgaggagggctgaacggcgtgcggcagcgaggaggaggtgagcggcggcggtggcatatccatcccaacgcggcacagttaagaggggcagcggtgtgcggcggcaaggcggaggtggaggcagcaacgatggcccaatgccgaggtacacccctcctccccccatccatcctcttcttcttcttccctcctccacttaggaaaatttgctcatgtgtgtgatggatttgtcccttactgtcatgggtgacggatgtgtgaatgtgtgtgatggatttgtgaaatatgttttgttaatggagtagtatagatttaagcttcacataaatatatttgtaaaatgccattgtatcattgataataatgctctattggtaatcacagtaaagtatccacattgtgcttgtcatcataattcgtcactagcatgctaggatatatagaaaaatggcaagtctagcatggtaaaccaagtggcatctgtggacggctattaagtacaaaattctcgctgtcaatacctgcataaaaccataaaagtaaaacatccaatatagtggtaggatttatttctaaccatttccacgagtgttagtgtatatttgtatgcaggatgcaacccaccaaagttgagatgaaatgtacatgaaggatgagaatataacttccatatccaagccatagagttttgagcccacaaacccaataagatacatttatcttgagccaaacttcagtagaacatatagtgggacccacatgtcagaacaccagagaaggagctaggctggatgggccagccagggttcggctgaaccagcagctagcccaaccagcacaatattttaccaactgatagttatcctcatcctatgacggttaggagcgttaatactggtggaaaccgtcatcaagaggacacatggcaaaaggagaagttaagaagatgctcttaggattctatgttgaatatttcacagtatctccactctctcaactcacctccacactataaatacccctgtcctctccctcattcacacacacttgaagcatgagctgaattacaagaggctctagtgtactttattgtatattagaatagagagagagtaatgtagaagaagttgtcgatgc

SEQ ID NO: 16478 - DNA, 2380 bp, Oryza sativa
  ref <308>: DATABASE ACCESSION NUMBER: AK066968
  ref <309>: DATABASE ENTRY DATE: 2001-12-06
gatccgtcccctcttcccactccacttgccctcgcatctacgtcgcccaagcttcgcccgctgccgcacacaactccgccgacgccgacacgacgtcctctctcctttcgcctcctcatcctcctgcttccgaaatcctcaactcagattcggagctactgccgccgccgcctcccccgttgttgttccaagcgcccccacaaaacccccggccgtggcggcggccgcggcagcgacgggcttcggcggcggcacgcggtgcatgaggaggagaagaaggggaaggcacgactgcggtgtcgcgatccggagcaggagccgatggggaaagtgcggctgacccgcgcctgagcgatagagattgagagatccagggttcgtgagcgagtgtgaaaaagaaaggttatactgaagacttcagctggtggcgccaccaagatgcagaccagcaattttcgtaagaagaatgcagcagaggtggatttcttcatggggtatggtgatgttaatcgatacgaagttctggaggtcataggaaaaggaagttatggacttgtatgttctgcaaatgatatacatactggagaaaaggttgcaataaagaagatacacaacatttttgaacatatatcagatgctgcacgcatactccgtgaaatcaagcttctcaggctgcttaggcatcctgacatagtggaaataaagcatattatgctacccccatccaagatggatttcagggacatatatgttgtctttgagcttatggaatcagatcttcatcaggtcataaaggctaatgatgatttgacaagagagcactatcaatttttcctgtatcagatgctccgtgctttgaaatatatccatacagcaaatgtttatcacagagatctgaagccaaaaaacatacttgctaatgcaaattgcaaactcaaaatatgtgattttggcttggcaagagttgcattcactgatgctcccactacagtcttctggaccgattatgttgcaacgagatggtatagagcacctgaactgtgtggttcattttattccaagtacacaccagctattgatatatggagtatagggtgcatttttgctgaggtgttgattggaaagccactatttcctggtaaaaatgttgttcaccagttggatttgataactgatcttctgggaacaccctccttagatgctatttctcaggtgcggaatgacaaggcaagaaaatatctgacatgcatgcggaagaagcagcctgcatcattttcacataaatttctgaaggctgatccattagcattacaattgcttaggaagcttctagcttttgatccaaaggaccgtccatctgctcaagaggcactggcagatccgtacttcaatggattagcaaaggtagagcgagaaccatcttgtcagccaattccaaagatggaatttgaatttgagcgtcggagagcaacaaaggaggatatcaaggaacttatttttcaagaaatattggagtaccatcctcaattattgaaagaacacatcagtggaacagaaaggccaaattttcatcatttaagtgtggttgaccaattcagaaagcaatttactcaagttgaggaaaatctgaatggaagtggggctgctgtttcgctacagaggaaacattcttctttgccaaggtcaacaatagtgcactctgctgcaattcctgcaaaggattataaacatgtggcctcatctagtacaaagcttgcagtagatggatcttggaatgcacagattcagggagtacatgcaaatatagctggcgagccttcaactatcgttagacctgcagtgtcctcggaaagaagcttagcgcctacacttcaatggcaaccaaatatgacgcattttctgaatcatgcattgtgttaccagaacacagtatttagcgggtcacttcttgatgcaacaggcccagcccaagccattcctcgaactactccatatgtagactacaggtccgggaacttggacctctatcagcatcatgtttctagagaggatgtacaaagtgacacagccactgcacaagcacacgctgcttctcatggcccggttccagctgtgtcttacagtcttccagggacgtatagaatcacctagacctatcagtcgttcaatcatggaggtcttcctttttctttttttttcacccatcataaactgattgattaccaacatgcaataaaaaggcagaggaactagatatgcatgttcttttctttctgggacttagacatgccattatgctttgccagttcggaatcaaaagccttcaaatgtatgcagtttcctagttactgccttacttgttgcagtgctcagggtgttc

SEQ ID NO: 16479 - DNA, 1547 bp, Oryza sativa
  ref <308>: DATABASE ACCESSION NUMBER: AK066969
  ref <309>: DATABASE ENTRY DATE: 2001-12-06
gtctgcttctttcctccgacgactcgccgccgcctgaaatctctttcttgattcgtgcgctcctgagctaccccgatggccgcccaatcttccactccctcgccgcaagatggttctggtagaggtgaattctcagacaatttggtacttcaaaccccacagccaatgcgggaggattacatacagaatgctgttaactttcttggacatccaaaagtgaagggttctccagtattttacaggcgctcttttctggaaaagaaaggccttacaaaggaagaaatcgacgaggccttccgtcgggttcctgatccacagccaaacagtacagatgttgcagctgttgcttcacaacaagccggcatcgcaaatcaatctgctggagtacaaccttacgagacagttcaagcaccacaagccattaacactggtcctatcgttccacatgcgcagccgcaacttagctggtcccgtactctcattggtgtaggtgttttcctcggagttggggctagtgctgctgtcatcctcaagaaattgtttgttcctaggctaaaatcttggatccaaggagcccatgttgaaggggatgaaatttctgggaatgaacttaaatccaagttttatgaagaaatcaaagcagccatacaagattctgcatcagcgttttctgatattgctaaaacaaaccaagagttgcttgcttcaaaggatgaagataagaagatacttacaaagttggcacaagcatttgattcgcaagcagaggcgtttagatccttgagtgattccttgaatcgtatgagtgagaataggttttaccagtacaatctaatggaggatcattttcaatctgccccatggaatgggccaactacaaattcatggagagcttctcagcaaacaaacgcatacaacacatcaccacgcagtgattttgactccgggaggcatccgttcatgccagtaccgggagaaccttcacctggagcatttccggcgagatcctatgttgagcagcagcggatgcagaggcctgggtacggatttcagcctcagatgagcaatgacaggtggaaccctggctcgccattgacgaactaccacggtgctcctccgtatcagcagtatcaccatggatccaccaacgccatcgatgaagctccagctccagctccagttccagctccagctccaccagctgaaagcccgttccagcgtcgctgggttcccccacagccaccgggcgtcgtcatgccggaggccgtggccgccatacggcagccgaggcagcaagttgcagcggcatcgagaccgtcggaatccgccgcggcgacagagcagccacagtcaggtgacgtcgccggtggcgccgccatggccaatgcgggcaatggcgaggccgagcaagagcgggaagctgctgcttaattactccatttcttttttttttgtttgccacgcgatgcatgcgtctctcgtgtacaaaatacagactagtgacgattacctatgagaaaaagaagaggaacaaatgttgtgtattc

SEQ ID NO: 16480 - DNA, 2977 bp, Oryza sativa
  ref <308>: DATABASE ACCESSION NUMBER: AK066970
  ref <309>: DATABASE ENTRY DATE: 2001-12-06
cttgtttgcgaagagaaacgccgttcccggcggaggcacggccggaaaacttccgccgcctcgcctcgctccggcgcacgtcgccggcgacgaggggccgggggcaaaccggtggtcggtcggcctgctcctctcctccccgcccgtgcgccttctcccctgctgcccgcgagcaggtgcgaatcgaatcgaatcgaaggtcaaccacgatgaagaagcccaacgtcgccgccaaggtcaaggcggccgccgccggtggggcggatggggggtcgtccaaggggagcccttccacccctgcatcgctcagggtgactaagttggtcaaggggaaggcgaaggtgaaggcgaaggctagccgggagaaggctgctgcgccagccgctgcggctggtaaagaggccgcgtccctgggtgatgctggtggcaatgctgatgcatcgcctgcggctccggctttgcgaccggccgcggtggctgatgcggacggggcatccaaggggagcccttccacccctgcatcggtcaagaagacatctaggttgaataaggtgaaggcgaaggcgaaggctgcagcagctgctgccgcttcagggtccccatccgttggtgctgctggtggcaatgctgatgcatcgcctgcagccccggctccgcgatcagctactgtggccgatggatcagcagctcgggtgatatcgacgccagcggcagctacggctgaagcatcaacgccaaagcgaaggctaaagctaaaaccaaagctggctgaggctaatgctaatgctaatgctgtagttgccaccaagaatggtgtaggtgctgataacaacgatggtgatgccatcaagaagagaaaaagagagattgctggggagaggactagcaatgtgaaggaaaggaggaaggaggaggagggaagcaagaaggaagagaggcttgacagtaagggaggagggcttatattcatgtgtaatgcgcagactaaaccagaatgctttcagagccgcttgtttgggtatcccagagggaaaatcggaatagttgagaagatccgaccagggatgaggttgttcctctatgattttgacttgaagctactttatggggtgtacaaggcagtatcaaagggtgggcttgatcttgttcgagatgcattcagtggaaaattccctgcacaggtgaaatttaagatagataaagattgccttccacttcctgagagcagatttaaggatgcaatcagagagaactatagtgcaaagagcaagttcaatcccgagctcaactctagacaagtccataggctaatagctctatttgagtctgtgagtgtacctcaaccagctccacagaagcctcttgaagagatgcaccactatgaaggaaaaacacagccacatcaatatgaagaaagacgatcttctttgcctgtcatgcatgttcctccccctaaagacttatacagggcaacacgctttgatccacatccagtggattataggattgatcattctttgtctaatgctcatgatggtccccacatacattatcagcaaacacttgttgcacgcgagtctcagcgtgttcctcttgacatagagcctcgtcttgtgccgcatgccctagagcctcgtcatggcccttctatcccagagattcagcatgttccacatgcatactaccgccatttggctccatctgatgttccatattatcgttctcaagtggatccactgcctgatcgtgttgctgccagaactgtggctgatccatttctttcaagagattatacagcagtcccagccacaagatctgatggtgctgcccgtgttgaggaactcaggcggataggggatattgcttcacttggtgctcgggtggaggagctctaccgtccaggagagcttgctgctcgcggttctcgtgtggaggagctctaccgtccaggagagattgttgctcgtggttctcgtgtggaggagctctatcgtccacgagaggttgctgctcacagtgctcgcatggaggatctgtatcgtccaggagaaattcctatccgtggtgctcgtgtggaggatctgtaccgtcctggagaaatttctgctcgtgctgttcgtgtagaggatctttaccgttctgaccaacgcatcactcatgctgtggacctccctctccacgcaccctatccaacagctcattatgaggtccccaatcccgcatattctgatatcagtcaaaggtatgcctctacaaggcttaatgcacctggtgcatcggtttcgtctctctattcctttcctggcgcgccagcgtatcgatgattggtactctgaatttaccatgtttttaccctgagccggttatactgctagatgcatcggtgccatttagaagttgtccaaaccttaggaaacctggatggttgtcacagttcctgtcactgtggtttgctttacctgtattttctgtcctcgttgatctgctccctgcacaaatgatgtcctggtccaaccttgttcacccatgctgttgaattgtgctgcaaagttatatccatgaatcttaagctcatctttttgtttgcgtgttgccgcattcttttggccttggcattccgccaaggcaacaaggctcaagtagggctatgaggctgggtggtttcgtttgtgttctttgaaccttggatgattataaactcttgatccaagactagggatgaaagtgtattggatagtgtatataatacaaacccaggatctggtacaaatattgtcctcctgattccaatctgatttcatccctatccaagaagaaggctatatatgtgatatccttgggctgattgcatcatgaaagctgagaattttttttcgagttctcaatcgcattgttgtggaaggtgatgcattttgccttcctataaatattataacccttgctaattcgctggggattgtattcttcaattattttt

SEQ ID NO: 16481 - DNA, 4127 bp, Oryza sativa
  ref <308>: DATABASE ACCESSION NUMBER: AK066971
  ref <309>: DATABASE ENTRY DATE: 2001-12-06
ggtggccaggccaccacgacagcctagtctacggaaacgctttcttggttcgttcaaaccatgggagcatgagcccggcagtgcggacgaagcggccgccgccgcagccgctgccgcggcggccgccgccgccgaagccgagcgcggagtcgaagccggcgaaggcccgtgcaccggcaacctcgctactggagagcctcaagtcgttcaagtcccgcctggccgccggcccgccgctcgcgcccacgccgaagtccttcaagtcgtacgcggagacctgcgcgtccatcctccggctctgctccggcgccgcggccgcctccggcaccgctgccgcctcctcaaacctgccgctcgtcctctcaatccacgcgcacgcgctcgtctccggcctgaccgcggacggctcggtggcgtcgcacctcctcaccgcctacgccgccttcgcgcgcgcggcggaccgcgacggggccttccgggactgcgtctccgtcgtcggggcggcgtccccgttcgcctacgatttcatggtgcgggagcacgtcaaggccggggacatcgtctccgctcgccggctgttcgacggaatgcccgagaggagcgtcgtgtcgtacaccaccatggtggatgcgctcatgaagcgcgggtccgtgagggatgcggttgagctgtatcgccagtgcccgctctgctcggttcccttcttcaccgcgatgatcgcggggtttgtcctcaatgagctccccaaggatgcgctcggcgtgttccatgaaatgctcagctgcggcgtgagtccaaatgagatcactttggtctccgtcatcaaggcatgcattggtgcaggtgagttcgatctggccatgtctatcgtggggttggcaatgaaatcaaacttgcttgacaaaaatcttggggtacgcaactccttgatcacactatacttaaggaagggagatgcagatgctgcacgcaggatgtttgatgaaatggaggtgagagatgtggtttcatggactgctttgcttgatgtgtatgctgaattgggtgacctcgagggagctcgacgggttcttgatgaaatgcctgagaggaacgaggtctcctggggtactttggttgctaggcatgaacagaaaggcaatgcaaaagaagcagtgagtttgtatagtcagatgctggctgatggttgtaggccaaacatttcatgtttctccagcgttcttggtgcttgtgctagccttcaggacttaagaagcggaagaaagatccataaccagactttaaagatggcctgtagcaataatgtatttgtatccagcgctctgattgacatgtactgcaaatgcaaacagttgccagatgcacaaatgattttttactccctaccacaaaagaacatagtatgttggaactctctcatttcaggttatagcaacaactcaaaaatggtggaagctgaggaactcttcaaaaagatgcctgcaaggaatgttgcttcatggaattcaatcatctctggttatgcacaaaatagacagtttattgatgcattaaaatctttccatgcaatgttagcttcagggcagagtccaggggaaattaccttctcaagtgttctcctggcttgtgctagcctgtgttctttagagatgggcaagatggttcatgctaagatcattaagcttggaattaaggaaagcatctttgttgggactgcactgagtgatatgtatgctaagtcaggggatttagatagctctaagagggtattttatgaaatgcccaaaagaaatgatgttgcttggactgccatgattcaaggacttgctgaaaatggttttgcagaggagtctattctgttatttgaggatatgatctcagcaggaataacaccaaatgagcagacatttttagccattttatttgcttgctcccacagtggcttggtggagcatgccatgcattatttcgaaatgatgcaggcatgtggtatatcacctaaagcaaaacattatacatgtatggttgatgtccttgctcgagctggtcatttggcagaagcagaagatcttctcctgaaaatcgaaagcaaatcagaagcaaattcatgggctgctcttctgagtgcctgcaacatttacaggaataaggaaatgggtgagagggctgcaaagaggctccaggagttggacaaggataatacagcaggttatgtgttactctcaaatgtgtatgcatcttgcgggaaatggaaagatgctgctgagatgaggatactaatgaaagggatcaatcttaaaaaggatggtgggtgtagttgggttcagataagaggtcaatatcaagccttcttttcttgggagacaaagcatcccttgttaccggatgtttatgagatgttggatttgctgacatgggaattgattgcttgatttttttaaaaatgtcatataggagtaaaaccttcgaggctttgacctcattttgcttctttagttcataaagataacgatagcaggatggagttgtttctggagaatggctgaaaggaaattgcttttgacattccaaaaatgatagttgccttcatatgctaagctccagaaatattcatggttatttgcttccaaccatctagctggaattttagcaaattgtgatagccgtgctggattattacaaaagaaggtagggcattattgttggtttattgactttgagcaccgtggtttgtttttaatctgctcttcaaaacagcactacctcggcatggtagcaacctggaatagaatgtctgtatctttttgctgaagttcgtgtgatttgacaacaaccaacttcagatgaacaacttcagaaaattcaactgtgtatttactgcattgtgactatcctgacttgtttactgaaccttgtattgcctcctttgatatggaattcaaatgaagattactgcaaaagatgtcccgggtgcgagaaccctaagcatgaattgtgctatgagctagctttagtgataacctttgagtatgaactctctggggtcaccgttgaagtgggtaaagaatgtctaagctttcgttattccagtttgatcgaaaatcagtacagccaactggatcttagaagctgttcggtcgagaaatctcagaagtgtaccgtgtacgccgtctctgctacatgtatatggcttgattggggaactgattcttctttaccggttgaggatgcatctttggggaaggtgcagatccttaggtttctgtgctgtgcatttcattatcaaagccaaggtaactggacgacgtgcgcattgcactccaagccaatcacatcaacctgcagccgattgaaccgcggggttcaaattggctggccggtgccggtggcaattgatcgctctgcctcgtgccatcgtcggcacgcggcttgactctcttgtccctcctcgtgtcggcctacccgatcagcaccggacgcccagagcccagacacctcagcggctgggcagttcacatccgcgtgtactactacgcatattcttctttccccacccgcaatcaccgatcaaaccgcgtcgccctcagcagcggggtcaggtcaggtggctggtgcggcggggatggagccactggaggtggcgatcacgatcatcttcgacgcgctgttgctggtgttcatggtgaagctcttcttcgccatgttccagatgaagctcgtcgtcatcctcttctacctcgtcatcctcctcttcgccatggccttctccggccgggcacccagtagcttctagtatgccgcgacaaatttggaggtgcaaatctcttctttcccccttaattcgcgagctgattggtggatctacgtggattttcatcctctggtggaatcggtcgtctcggtttttgtgtaagaaaggagaatcatgaggccaaggtgcaaactgtgtagtcttgatcaaagaaaagccatggccatggccccctctcatgtgaatttagtcgagagtttcttctataatttccctgcttatatatttctacttacatttttgctaatgactcttgtcaaaagtgtagattttctagtggtttccttgatcatcaatggagagtagtctttcttgc

SEQ ID NO: 16482 - DNA, 1821 bp, Oryza sativa
  ref <308>: DATABASE ACCESSION NUMBER: AK066972
  ref <309>: DATABASE ENTRY DATE: 2001-12-06
gtcggttggttggctggttggtcggcgaattgcacatcttggggcgaccgatcggcggccggcgggcgaagcaaccaaggcccaaaagggagggaaaaaaccttggttgtgtgtgtgccgccgcgagcccgtgacggcgccctccggcacgcgatagggaggatgccgtactgcgtggtcagccacggcgacccatcggcggcggcggcggcggccggcgaggagggagatgtgcggattttctaccagagatacggccatggcggcaccaaggtgctcctcatcatcgggttcgcggggacgcacgagtcgtggggcccgcaggtgaagggcctgacgggcgccgtcgagcccgtcgacgaggagggcgccgaggtctgctgcttcgacaaccgcggcattggccggagctccgtgccgccgcacaaatcgcagtacacgtaatgctctgctctttaccacccattgaattctctgacagagacagagatactagtcgagttctttctaatcttctcccaacatcaaatatccaaataaaatcatttcatctgctcgattcttcgcagcacggtgatcatggcgaaggacgcgctagcattaatggctcatctagggtggcggaaagcacacgttttcggtcactccatggggtccatgatagcttccaagttggccgccattgcgccggagcgtgtcgcttcgctggcgttgctcaacaccaccggaggtggctaccaatgtatccccaagattgattggcagaccatatccctcgcatgtcgttttctaagagcaagaactccagagcagagagctggtgttgatcttgatgttcattacacgagggagtacctcgatgaaattgttggatcaaataccagaagacaaatgctttaccaggaatatgtgaaaggtttgtcatcatgtggaatgcaatcaagacatggatatgaaggacaactgaatgcatgttggacgcataagcttacacagaaagaactagaccggattcgttcatcaggttttcttattctagttatacacggaagggatgatgttgtagctcagttgtatcatgcaaggagactagcagagaagctccagcctgctgctaaactggttgaactccatggaggccacctggtgagccacgaaagaacagctgaggttaatatgtccctcatggagatgataaaagcatcaaaatcaaatacagatcagggggaatggtcaaaccttcctaagaagtctgatgatctacttcttgctggatcagatagtcgtcttgctaaacgagaatgcaacatcatcgttatatacaatctacttgggaagttgcaactcattttgcttttcttctttggagtattttatattattcttgagcatgctaggagggtactaagagttttgaagcctgtgagagtatcagctaccagcttatagtcaaacaagggatttttattttcaaggctcttttcgacgtcttcagttccatttctgaattttgcagcagcacagagattctcggtaactaagaatttactgcggcatagaaattagtcagcgaataattgcaatataaggccattcattcttcgggaaagtgtggatttgaagagttctgatttgtatggtatttgttgtacagggttaaaattacaggttggtccttctaggaattgtttggtaatttatctctccttttattaatgtgggagagaaaattgcctgcaatctattgaggatgtgtgttgtccaaaacataaatggagcatacatttttgcaatgaaaaattccttttccactgatttcac

SEQ ID NO: 16483 - DNA, 4411 bp, Oryza sativa
  ref <308>: DATABASE ACCESSION NUMBER: AK066973
  ref <309>: DATABASE ENTRY DATE: 2001-12-06
gtttgggttgttgtagaatcttgtggatccacttggcagggtctgtggagaagcagcgcaggatgacgtcgctgccacggatcgagagctccgcgaccatgatgtagatgtggtcggatcctccgggaaccacgacgaggccagtggcggcgcctgtctcggtgggggtggcggggacgggaaaggaaatcttgtagactgcgtcccagagaacgtaggacttgctgtcggcaagaaacggatcggagctggaaaggagaaggatgccggaggggtcagcggcgaggacgctgcctgaggcgaggccgagcgaaggggacacgaggagctgcgagatgcgcggggttgcgacgagcgagagggagatgccgtccttagggaggtcgatggaggtgagcggtaagcggtccaatacaacccactcaggcggcgcggccgccggcggcgacgccatcgggtttctttctgggaagaaaatttgggggttttcgtacacgcaagcggcctgggaagggaaaaaaatttgttgcataccggctactcctgtgcagacccgctccagatggacgacgtggggatcggacggctgtctccgctcggctccaatgcagcgcgatatggtgaggatggaggagtctcgctcataggtatcgactcattcggctcagatcctcttctctcatcttatcggcggccggcgccacctccgccgcaaacccaaaggcgtcgcctcccgacgtgttcccctccgcggtcccatccacctcctgcctgatcccgcgccgccgtctcgctcgttcgccgctgggacgcgtttatgcgcgcatcggggacggggaggactgccatggtctgggacctcggcctcgcgtgtaacacagcacctcgaccgacgaccatcgatcaaatggtgcccggccttgtccttcttgtcgacctgtatctgtatctgaccaacggtgaattggcagaattgctcataacattattcagagtttgttcataatgctttattcagagttgagagctagatgattgttctgcatgttgcctagattactactctaccaccagctggcttcagatggtcaaaatgtcattgattttcacaatgacaaaacacaaaatgtttactattgcacatgtcgaaagtcactgatctgtgaactgttcttcacacaggcaaaagagaaagaggaaaaaaagctcaaggcaaaggcaaaggcaaaggaggcagctaggctccaggcacaagcagcttcagatggtcctaaaaaaagtgagaagaagcaaaggaagaaagctgttgaggatgagaatcctgaggatttcattgatccagacactcctcatgggcagaagaaatttcttgcatctcaaatggccaagcagtatagcccagctgctgttgagaaatcatggtatgcctggtgggaatcgtcaggatattttggggcagatcctgtggctcatactttgaagtttgcactagatattacgttttgccacctccaaatgtcaccggagcacttcatataggccatgcacttacagtggctatagaggatgccattatacgctggcgaaggatgtcaggttataatgctctgtgggttccaggagtcgaccatgccggcattgctacacaggttgtagtggagaagaagcttatgcgtgaaaagaaattgacgaggcatgacatagggcgtgaagaattggtatctgaagttctcaaatggaaagatgaatatgggggtaccatattgaatcaactacgtaggcttggggcctcacttgattggtcccgcgagtgttttacaatggataaaccaagatcgaaagctgtaactgaagcttttgtgaggttgtacaaacaaggcctgatatatagtttttttcccctgttatggatgatatgcttctatacactagagggattatcgcctcgtgaattgggactgcactcttcgaacagcaatttctgacgtagaggttgattatctagatattaaagaagaaaccatgttaaaggttcctggttataatacaactgtacaattcggcgtgttgatctcttttgcatatccacttgaggaaggattgggtatgcaattcatcccttcaatggccgaaagctcaaaataatctgcgatgctgagttagtggatcccactttcggtactggggctgtcaagattacacctgcccatgatccaaatgattttgaggttggaaagcgacgcagccttgagttcatcaatatcttcacagatgatggaaaaataaacaactatggaggtgcacaatttgaaggaatgccaagattcactgctcgagttgctgttattgaggcactgaaggcaaagggcttgtacaaggagacaaaaaagaacgaaatgtgtttgggtgtttgttcaagaactaacgacgtggtggagcctatgataaaaccccaatggtttgttaattgcaataccatggcaaaagcaggtattgatgctgtaaggtccaaaagaattgaaattattccacaacagtatgagcaggactggtatagatggcttgcaaatatacgtgattggtgtgtttcaaggcagctttggtggggacatcgtgtgcctgcttggtatgttgtactagaagatgatcaagagaacattctgggttctgataatgaccgttgggttgttgctagaaacgaaagcgaagcaaacctggaggcacatcaaaagtatcctgggaagaaattcgagttacatcaagatcctgatgtgttggacacatggttttcatctggtcttttcccattaaccgtacttggttggccagatgatacagctgatgttaaagctttctaccctggttcagtgctggaaactggacatgatattctcttcttttgggtagcgcggatggtgatgatggggatgcaacttggtggtgatgtgccatttcagaaggtttatttgcaccctatgatccgggatgctcatggatgcaaaatgtctaagtcgcttggtaatgtcattgatcccgttgatgtgataaatggtattccactggaaggtctcctcaaacgtttggaagaaggcaatctggatccaaatgaattgaacattgcaagcgatgggaagaagaaagattttcctgatggcattgctgaatgtggtactgatgccctccgttttgcactggtttcttacacttctcagtctgactagataaacctggatatcaaacgagttgttggatatcggcaatggtgcaacaaattatggaacgccattcgttttgcaatgggcaagcttggcgatcattacactccccctgcaactatttctgtaactataatgccaccaatatgcaaatggatattgtcagtgcttaacaaggctattggcaaatctgtcacctcgttagaagcatataaattttctgatgctacttctgctatatattcatggtggcagtaccaactgtgtgatgtatttatagaagctataaagccttacttcttcaatgactctcaagagctcgaatcagcaagagctgcctctagagatgccttatgggtttgcttagataccggcttgcgcttgctccacccattcatgccttgtgtaactgaagagctctggcagcgtcttcctcagcctaaagattcttgtcagaaagattccattatggtatcagagtacccatcccttgttaaggaatgggcagatgataaacttgaaaatcaaatagatattgccttggatactgtcaacaaactaagatctctgaagccaccaactgttacaaacgagagacggcctgcttttgcgctttgccgaggccaagagattgctgccattgttcaatgttatcagtctctagttgtgactctttcttctatatcatctctaaagatcctgatagagagtgatgaaacaccacctgactgtgcaacagctgttgtgaacaaagtttatctgtatacctccaactccaaggagctctcaatgcagaagttgagcttgaaaagctaaggaaaaagagagaagaaattcaaaagctgcaacatgccctatcacagaaaatggaagcttccggttataaagagaaggctccacataatgtccaggaggacatgagaaaactgaccagttttttggaacaactagagattatcagtgaagctgaaaagaagctagatgcaaaaactggcaaaaactgagtcagaaatccctgttgtgattttgaagataccttctctttgtggaagtttcatctaaaattttgtactgttgccttagtcatatactagaatgatcagatagccagatttgtgattttgcagcttgaagatatatccacagcattatagttttggttgtacgacattgcatttgaaaatattcttacctac

SEQ ID NO: 16484 - DNA, 1252 bp, Oryza sativa
  ref <308>: DATABASE ACCESSION NUMBER: AK066974
  ref <309>: DATABASE ENTRY DATE: 2001-12-06
gtcccaagtcctcgtcggcggccacaacacgtacaccacacagcggcgcgagaccggaataggaggtttcaatggaggtggtgggcggcgtgtcgtcgctgagcgcgtcttcgccggcgccggcgcgggcgcggctgcggcagctgtcgcccggcgaggcgagcggcggggggagcttcctgctgatgaggacggcgccgaggagcaggctgcaggcggcggcgaggccggcgaggcgggcggcgctggtggtggaggcgagggggagggggtggtcggaccggcggtcccagcagcagcgcatgccgcagctgcccaagatcgaggacgacggcaacccgcgcttcgtcatcttcatccgcaccgccaatgtgtacttctggtacccgctcaacatcgtcaccggcggcacgacggcgaagatcatgctcgcggcgaaggacaacttcctcggaaagtacatctacaaggacacgctcgccaggaaccttgccgctgtcatctacaaagatgaggatgacataatagacacagcaaaagagcagtacagggtgctgaagaccgacaatgagtttcgatatggctacaaagttgtggagaatgggaacctgaggtctgcgctgacgacaagtaatgtgatcgaactcccaaagaaagaagagctcaaaactgtggttgacaaggtgaaggacttcttcggcgacgtaacctctggcgccaaagagtcgtttgcgcagattacaggatctgtcagcgcagaggcagaagcgccagtggaggaagagaagccctgggtgaagaggcgaaacgagaggaagcggaaacagaaggagaagcagaaccagaagcaggggatcaaaacggagagctgattgtaaagcgcagcataccagagatcgtcaagtgaacagccggctgtaattttccagtgtgctcatttccctgtcccagattagctctgtgtagttcctcaatacttcgagtttttttgcaacaaacaatgtgtagcttgcctgtgactctgagtaacttgctttgttcttccttactaaatctgcagctagagtctcctgggatattagaaatcggtattttatggacttatggaacggcgaaaattactgttgtatattgacctcgtttctgatgagttacagtggctgtacagtgtgtgcgcgcgattgcgtatgaccgaatgctgtttatctgttttctgaaatgttgcatctgaaaacaggctcagaacaaaagg

SEQ ID NO: 16485 - DNA, 1053 bp, Oryza sativa
  ref <308>: DATABASE ACCESSION NUMBER: AK066975
  ref <309>: DATABASE ENTRY DATE: 2001-12-06
gtgcagtcctcaccaccctaccctatggcgtccgccgccgttgccgccgcggccgcgccgctgcggcgttcgctccttccctccctcaacccgagctgtctcttctcctccctcgcgtcctcctcgcaccgcctatctctaccgcgcgccctccgccccgcgggccctttgccctccgatgtcgaagactcggacgattcgaatgccggagacggcgccggcgaggccctcaggaagagccgcaacgacctgaagcgggaggctcgtcgcgccgtgcagtggggtatggacctcgctaagttctcccctctccagatcaagcgcatcctcagggctgcgtcgctagatcgcgaggtgttcgacgctctcatgctcgtgaagagatttggatcagatgtgcgggaaggaaaaaggaggcagttcaactatatcggaagacttctgcgtggtgcacaacccgaattgatggacactctaatccagtattcgaaggatggcgatgataacaggttacttgcattaatgagtgaaaatacattcttgatggaagatgaggaaatagaggacttgccttgcaatgaagaagagggtgacaaagagcatattgaaattgcagatagatggtttgagggcctcctttccaaagacatttcagttactaatgaaatttatgcgatacataatgttgagtttgatcgtcaggaactgcggaagctcgtgaggacagtccacatggtccaagataatatagaaaatgaacatgaagaggaatctaccatgaagcttttgggagcaaagaaacaacttttgtgcttccttcgctccattgctaaggaggcatacgtcaaatcatagatttactcacttctcttctagatggttctaaaatgctttgttattcagttgtagaaatattggcccaaatggccctgcttttttttagactcatgtactttatttaaagtaagggcgcactgtgtatgtcagaggggaagttaacatgaagaattaccatattgcagaaaagcacctaagaaatgggcaaattaacct

SEQ ID NO: 16486 - DNA, 820 bp, Oryza sativa
  ref <308>: DATABASE ACCESSION NUMBER: AK066976
  ref <309>: DATABASE ENTRY DATE: 2001-12-06
ttattgaaaaggaggatgttttgcctcctattgttgtgctagagacattgtcgaaaaacccatgcttgacactgtcagttgtcaaggattacattgcccgcaaacttgagcaagaatcaaagctaatcgaagaagataggaaatctattgacaagtaccaggatgagacagaactgatgaaaagggagatagaagacctcaagacaaacgcaaaggtctttcagcttagcaagtgtacgacgtgcacctttacgcttgaccttcctgcggtccacttcatgtgcatgcactccttccaccttcgctgccttggggacaatgagaaagaatgcccagaatgtgctcccgaatatagatctgtcatggaggcaaagcagaagctagaacataacgctagagaccatgatctcttcttcaggcagctgaggggttcaaaggatggcttctctgtcgtcgcagactattttagcaagggcattgtgagtaaaacagccattcctcctgaaaatggccgataaggagtggaagaaaaccagctctattactccccatgtacaggatttgacgatgttttatctcctttcccatggtgttttgtcatcatgtgagtttcagggtccatcacacagcatgtgcaggcctttaatagcgagttcctctagtgtaccaacttatgtatgctttctggcctattttttgtggccgtgctatggagttctgttgtgcttgacattgtaaatccttctgttggcaaacgctgcctagtttttggcatttagttttgatggaagaagattcacggccatcatgtttgagttcg

SEQ ID NO: 16487 - DNA, 1488 bp, Oryza sativa
  ref <308>: DATABASE ACCESSION NUMBER: AK066977
  ref <309>: DATABASE ENTRY DATE: 2001-12-06
gggtctttcgccattttctctctcgctcggtttgctgctctcctcctcctcgtcgtcgtctccaactccgtcgcggcctcgcgctcaccgccgccggaatccggctgacctcctccgctcccgcatcgggcgctcgccccccgggtctaggtttccgaagaaatggcaagaagtgcaagggcaaggaggcatgtggctcgtcagcttagatccgcaccgtatcccatcccttcgtaccgctggaaagcaatgaaagaatcaaaccgaaagaaaactctgccagctgcacagaagatggactgggaagatgccaactgctctgtgtgcatggaatacccgcataatgctgttctcctcctttgttcttcgcatgataaaggttgtcgcccttacatgtgtggaactagccaccgccactcaaattgccttgatcaattcaagaaggcttacaccaagggtgcattgctagaggaacttcctgccaacactgttggcacgaacttggactcgacgccattgattgcaggtgaaaaaaatgagtctgttgatcttgcatgtccactgtgtcgtggcaaggtgaagggatggactatagtagaaccagctcgaagttatctcaatgggaaaaggaggacatgcatgcaggatggttgctcatttgtaggaacctacaaggaactccgcaagcatgtgaagtcagagcaccctcttgcaaagccgagggaagtcgatcccatccttgaacagaagtggagattgctagagattgaaagagagaggcaagatgcactcagtacgataacagcaactatggggagggcgattgttttcggtgattatgtgctagacttggaagatgaagatgatttagatgatgtagaaagtgatgaggatgacaatgccaacggacacgggacagataacactagacgaatgttaatgtttctaatgcgccaagttgctcggcatcatcaaaaccaaaggcttcagaatgcaattggtacaactggcggtgccgaggacaattatgcggtgagcagtggtgcaaatgcaaccacgccttaccattaccccttggaaggcgacgatgaggatgatttggttatggccggaggcggaagcaccggtatggttagaccagagaggcggcgtcggcgccgccgtagaaaccgcgagaggttgttcttaggtgctaattgagacaacaggggctttaccactggaggagtacattgcacaattggttctctggtgcatagcattcatcaatttcaacctcaatttacttgttcatgatcatgtaccaaagtagttgtcttaaccttttagctcattgtttcacttcaatgtatgccatctcacattcattgttgaaaaggaaaataccgcacccatcttgtgcggtttgtgtagcctttatttccagtttttcagaagctctgctaaatattaatccagtggggatcgattttagatctcaccagctcc

SEQ ID NO: 16488 - DNA, 2959 bp, Oryza sativa
  ref <308>: DATABASE ACCESSION NUMBER: AK066978
  ref <309>: DATABASE ENTRY DATE: 2001-12-06
gattccaccaccaagtcctccctcctcacctcacccgcactctctcccgcgaaaagacttcttctctcgtcgttgttgttgtcgttgttgttgcactcgcgcgcggcggcgcggtgccagagatgaggaggatgttgccgttgcttcttcggcggcggtggcgacgagacgggaggtgacgaggagaagaaggcgtcggcggcggcggtggtgaagaacaagaaggcggtgaggcggatgcggagcgcgacggggcggctccggtcgctgtcgctggaggacctgtcgcggacgctggcgcagtccgggctgcaggccttcacgctggcggagctcaaggccgccacgcgcagcttctccggcagcaacttcatcggcgagggcggattcggccccgtctacaagggcttcatcgacgccaagctccgccccggcctcctccaaccccagcacgtcgccgtcaagtacctcgacggcgaaggcgaccagggccaccgcgaatggctggcggaggtggtgtacctggggatgttgagccatccgcatctggtgaagctcatcggctactgctgccaagacgaccaccggatgctcgtctacgagtacatggccaggggcagcctcgagcaccacctcttcaagagtaagcttaatcaccctcactaatcaattgcactatcattattaaccagtaattgctatcattaactgagcgcggttaattgattaatcttgcagatttgctgtcgagcttgccgtgggcgacgcggctgaagatcgcggtgggcgcggccaaggggctcgcgttcctgcacgacgccgacactccggtgatctaccgagacttcaaggcatccaacatcctgctcgactcggtgagtactcctctgattattaattatgcttaattagttttaccaggtctatcttgcacacgtacgtacgatcggctccaataattaagatttcttaatctgcgttggtgactacgacccgttcgcctaatcgccagatcgccactagtcaattctgaattttctgaatctaataaggccataagctataccttagctgcaggggcagcacgcacgtatatagagtagagagtacacgatttgaactatagtttttggccaatctctgtcgattctttgtggcaaactttattagttgtggcggccaacttaagaaatggaggattaattaagtactagtgcatccaaaacttaaagaaatgaacaaattatgtaggactactctcctccgggttggttgtttatttatgcctcctacctaatcggacaaaaacgtccgtgttattctaagcagatatgtaaattagggaaacgtacggtttggtgtcgatcgatcgccggccagattacacaattggttgttgcaaaggctgttcatgagcactgtggctacaaagcctctagaacagtaaaattgtacaggtcaagcgtttgtccgagcaattaattgcaaagctaaccactctctttgactagttaattacccacctaaacagtaaagagaacattctacgagtaaaacacacatgccggcccatggcaggtagcatcgaattttgacacgaaatcgccttgtagtagcaaaatcacacgtgaacattatcgagtctggtacagtttatgttacacagaaacatagactaagctgacaccatatacaaacaaaagttcaaatcaacaatgctacattagagcagttacgcatgctataagccagctataatcacatatcgagaagaaaagagaagagagagaaaaacagctgcaacacatactccaaaatattatgtgtgtatgagaggtgggaccggttattaattgtgagtatatttttatagttaactattgtatgaatagactattagattagttataaatgatttaaagttagtagttggctatactattaaacttgctcttagctatagttaattatgatgttgtggctgacggagagatttatattatgttgggcgatgcaggattacacggcgaagctctcggacttcgggctggccaaggagggcccgcagggggacgcgacacacgtcacgacccgcgtcatggggacccacgggtacgcggcgccggagtacatcctgacggggcacctgacggcgaagagcgacgtgtacagcttcggggtggtgctgctggagctgctgacggggcggcggagcgtggacaagcggcggcgcgggcgggagcagaacctcgtggactgggcgcggccgtacctccggcggccggagcggctgcaccgggtgatggaccccagcctggagggcggctactcggacaaggcggcggggaaggccgccatggtggcgtaccactgcctccacagcgtgcccaagtcccgcccgcacatgcgcgacgtcgtcgccgcgctcgagccgctgctgcagacgtcctgcggcgacgtgctcgccgggcccttcgtctacaccgtcccgtccgctgccgccgttgttgttgctgccaaggacgacgggaagaaggcggccgcggccgcgggtgaggacggcgaggaggaggtggcggcggcggccaaggcgaagaggaggtacgtggcgtcggcggtgcacgcggagggcgcgatgcggaagggggagcaccggtacgcgagctccgtgtccggctcgccgaggcagagcagggacaggggcggctagctcaagatttcaacggtggatgcaaagtgcgaccgcggcagggcgtgaatttgcctgttactgcgtgtgtgcgcgcgtgtgagcgtgtattgttcgagatcgtttcaagtgtacataatagtggtaacatatttctacggtggatgcaaagtgcaggaggtgcagtaacatgttcgttgattccttttcttggtgatgctattttcgatcccaagagcaaaaaatgtaatattgccttttgttttcttg

SEQ ID NO: 16489 - DNA, 1410 bp, Oryza sativa
  ref <308>: DATABASE ACCESSION NUMBER: AK066979
  ref <309>: DATABASE ENTRY DATE: 2001-12-06
tggtcgccttcgtcgtctccgtcaaagcgacgcgagcgcgagagcgaggaggagagcccgagatctcggcggcggcggcggcggcgatggcgctctccgaccgctcccgcgagtcgctcctgccgagcttcctctactcgacggcgggggcgcggccgtacaccgcgggcggcggcggcgccgccttccgcctccccgccgcggcggccccgggaggtgtaggagggggcgcgccgatcgagatccaggcgcccagggagaagatcgagatgtactcgccggcgttctacgccgcctgcacggccgggggcatcgccagctgcggcctcacccacatggcggtcaccccgctcgacctcgtcaagtgcaacatgcagattgatccagcaaagtacaagagcatcacatctgggtttggaatattggctaaggagcaaggagtcaggggcttcttcaggggctgggttcccactcttcttggctacagtgctcagggcgcctgcaagtttgggttttatgaattctttaagaagtactactcagacattgcaggacctgagtacgctcagaaatataagacgctcatataccttgctggctcagcttctgcggaggtcattgctgatgtggcattgtgccctttcgaagctgtgaaagtccgtgtgcagacacagcctggatttgctcgtgggcttggcgatgggctccccaagttcattaaatccgagggtgccttgagtctttacaaagggattgttcctctttgggggcgtcaaattccttatacaatgatgaagtttgcatcctttgagaccattgttgaacaaatctacaagcatgctgttcctgtcccgaagtcagagtgtagcaaatcattccagttgggtatcagctttgctggtggttacattgccggtgtcttctgtgctattgtttctcacccggcagataatctagtctctttcctgaacaatgccaagggtgctacagtgggtgatgctgttaagaagcttggtctctggggtctattcactcgtggactgcccctacgtattgtcatgatcggtacccttactggagctcaatggggaatttatgatgcattcaaagtcatggttggattgccaactaccggtggtgttacgccagcaccatccacttcagatgctggattgaaagctgtcagtgcctgattttctcattaggacaacttggttatttttggaacttatcgttcttcatggatggaaaatatattggtcacatgagttcaattatatttttgtttaaaatttttgtagaggatgactatgtcatctttggaatgagaggaactcgttaaaacagacaatgatatattttttttgtccaagtgtaagttctaatatttggtataaaataagatttagg

SEQ ID NO: 16490 - DNA, 1493 bp, Oryza sativa
  ref <308>: DATABASE ACCESSION NUMBER: AK066980
  ref <309>: DATABASE ENTRY DATE: 2001-12-06
gagtcggaggagaagatggacgccgcccgcgcctccctcctcttggccggcggcctcgccgtatccacctccacctccgccgtcgccactgccgcccaaaccgtctcgattcctcacctatcgccgcacacccgccgaaggcgacagcgccgcttcctccgcctggcctccgctgcggcgtcgtctcccccgccgctccccgctgcttcggcgcagccgcattgctctaggtgggtcgtggtgatggagagaccccccgcgccagcgggaggcggcgaggtgtcccgtgcggaggccgtcgaccactacgtcgccacactggccagggtattggggagccaggaggaagcacagatgcgcatatacgatgcttcgtgggatgggagctacgagttcagctgcgagatcgacgatgaagcgtcaaggaaccttgcgaaaatgcccggggtattagctgttaagccagatacggataaggttgatatgtcagagaaggataatcatggctcaggcctctcagcagctaacctaggaaatttcagtgatgctgtttccaatcactcttcttctagtggggaaaatgagttttggcttgtgcgaatggagaagcctggggttgaagttgtgacaaaggcacaaatggtggatcattatacccaaaccctcatgaaagtgttggggaatgaaaaggatgcacaagtcagcatatatcacatttcatgggagagggattatggcttctgctgtcacattgacgaagaatgtgccaaggagctagctgatgtttctggagtgttatctgttcaaccggacacaaattttggatccgacaacaaaaattacaaaggtgatgacagcttcaaatcgtctgaagctactcaggctgaagtcaaaactaaaagactttttgttacaggtctttcattttatacatctgagaaaactttgcgggctgcctttgagccttttggtgaactagttgaagtgaagataataatggacaagatatcaaaaagatcaaaagggtatgctttcatagaatacaccacagaagaagctggaggtgctgctctgaaagcaatgaacggacagataataaatggctggatgatagttgtcgatgttgctaaacatagatcgagggaccgtcaacccccgtatagtgcatcaggtagatccaatcaagtgcttcgatcgcgttatcatactggatgaacaaagcatgacacctagagattagacacaagattagcagtgagtacgaagtagaaaccatagttttccggtggtgttgtatttttgcgtggcctgctattctaatgtttccaagagatgatagcgggctacagattccataagtttagtaatatctaacatgtactggattgatgcaatatcttttgatactgcattggtaatatgagcttgaatagataatctcatgtaacatatttctatcaacaaataatgtgaaaaaaagagatgtgattaat

SEQ ID NO: 16491 - DNA, 3863 bp, Oryza sativa
  ref <308>: DATABASE ACCESSION NUMBER: AK066981
  ref <309>: DATABASE ENTRY DATE: 2001-12-06
ggttttcctatctcctctcttcctccctgcctagcgaaagtctccccccctctctccttggcctcttcctccctggtcggtagcgcagcacacgcatccgcgtgaacccatcctcctccctcctttccaatctacctgcaccaaccggagacgcccgcgcccagctacccctcgcctgccccccgcgcctcgcgggagccgattcgattcgaatctaggtacacagagaagcggaagcggcagcggcggcggcggcggaggcggagatgaacaggagcaaggcgaagctgtccggcgtcctgcacaagggcttcaagcccgacaagtgcaagacggcgctgcggatggcgctggcgcggatcaagctgctgaggaaccgcaaggaggtgcaggtgcggcagatgcgtcgagaggtcgcgcagctgctcgaggccgatcaggaccagaccgcacgcatcagggttgaacatgtcataagggaagagaagttcatgcaagcatatgacttaattgaagtatactgtgaacttatggtggcacgcatgtccattattgactcacagaagacttgccctattgatctgaaagaagccatagccagtgttatatttgcatcaatgaggtgttcagatgtcacagaacttgcagatgttcgcaagcatttcacaagtaagtatggaaaagagtttgcagcagcagctcttgaagtgcgacctgacagtggtgtcagccgactggtcattgagaagctgtcagctggagcacctgatacacagaccaaaatcaaaaccttgacctctattgcagaggagcacaacatcaaatgggagccaaaagcatttgaggagaaattgccgaagcaaaatgatgatcttctgcatgtgacctcaacatatccgggaggaaatattccaactaggggatcatctgcttctaattctggcatgccaacttcacagcctgctgcaccttctcattcatatatggaatcttccaattctcacatgtctacggcacattcatattcatcagctgaggttccagacaatagggctccatatgtcactgccaattctaatgctttcccccaagaaaacagaaggggttctgatgctccaatgtcccctaggtcccagcatggtcctaacagtttctctcatgatactgctggaggttcaaatgtttctagaccttactcccaatatggtgcaacagttccagatacagatacagcgtccaggagggaagagttcaatcactctagggagagaaaatcttcagttagtggttccaattggaatatagaattcaaggatgcaacatctgcagcacaagcagcagcagagtccgcagagatggctagtattgctgctagggctgctgcccaacttgctagtcgtggaaacctttctgcggagcaaaatactggagcttttgagtcacctgcttatacccatgaaactacacccaggaagcaacaagctgaacatttaatgaaggatgggcagaggagttctaatgagcagagttcaggggcttatgatccaagactcatctcaagtaatgatgctaggaaggatggggggagaacagaaacaagccgtgtaggtagtcagaatatgccaactaattccttgggtcaatccccaccatatagccctcatattcacagtgatgagtatgacatgccaactgatccgcatcgttctcattcacccgatcctcaatattctgatgattcatctgagaaagaaagcaactttggaagacctgaggatcatcagtttaatttacctggagaaagattgtccgaggctcaacttggtgggcacaacatcaaggacacggaaagcaagcatgctacctttgatcaagagaacacagacaactactacagcaactatagctcttcccatggtacattcacccatggcagcagtaccatttgggacagtcagaatgataaagctggacctgattcttcagctgttgtttttgatcaatatgattctgatgtcggagaagaaaatttattggatcctttctcttcaaagcacactgaagaacccactgttgaagatcacaagggattctcaagtgcagattggggtcaacagcatagaaatgaatctccagttaatcatagcagctcaacactattttcaggaacagaagcaaacagaaaagatgtttcctcacctcattcttatgataatgtgccacctacatttgactcggatggtgttagttctgatgaggaaatgaccacaggcatgcatgcaaggtctttaaggtctcattccagaggatccgatttttccgagagtagagaaaatataatttctggaaaggttgtccatgatgttaatgaaaatattgaagatcatgtatccatgtccaggaagaattaccttaattcatctggttctaatgcattcaataaggagcgctacagtgaaagttcacctagatctgattactcatgggttgatggggaattggatcgtacaaaaatcagagatcttgaagaagaaagagtgccacataaattggaaggtgcatcatcattgacaacaggagaaaataagaatcagctgttttctttaggcaggcaaacttcaacatcatctgctgactatgatgaaggcgatccaggcttgaactttggaaggctaactcctggactaagaaacaaactccggcaacctcctccgtacataaaggattctgggaatacctcgttgcataaggttcctaccgccattgaaaaatcagtgcactctgaagaggatacctcgtttggaaatacaagaaatacttctacaggtatggccaggagttcgttcggtgcagattacaacagtgaacttcatgaccaaaatcaaagtgttggagcaagtgtggaagctagatcaaccatgaggaattactatgggtcagaaggtgatagagggaagttatctgagcaatcttataatgctccaagttctgtgatgaataagagttctggaggtgtaaattccagtcaagatctgtaccatgaaaagccaggtgctggagcccgcaggggaactacaacaaaaactgccaaaagttactttgattcagatgatagcgaggacgaattggcacaacgcaaggaggtccagacaaagtggtctagagagcagattcaatcacgcaggactcagatgacatcagatacaaagaaagaaaccggtgtccgagttggagtgcagcatgctgatgaaactgaggcgaaatcacctgctgggtcattttctaggtttactgaacaaaggagagactcacctgtgtactccagggttccagtaccacgaacttcaccaaaacctgtgcgtgtggaacctcccttgggcaaagggaagtcacaagaagctgatctgaatacagtttctgtcacaggaaaggaggaaaacacagaaagcccagcagaaactccgaaagaaagcacctcaaaaactgctccgtcgcatgttcaccccaagcttccgacagactatgattcgtttgctgcacattttatgtctcttcggaccaatcgccgctagttttatgatcgcataccagttgagttttacatgtgaagaagtcgtatttacaaacacagggatacatacattctatagcttcgagttgacatttgtacagtatatcaactcatagcactcggtcttatatgttggtctttttggcgagctattattctttcgttctattttggcctcatgttcatcacatcttaggtattgtcattatgaaaggattgttagcgtgtaataagcacattatgcagtcagatgtacagacgtttacagaacttaagaggtttaccttttttc

SEQ ID NO: 16492 - DNA, 1270 bp, Oryza sativa
  ref <308>: DATABASE ACCESSION NUMBER: AK066982
  ref <309>: DATABASE ENTRY DATE: 2001-12-06
gacgggcgagttcagtagtaaagctaaaggcgcaaggattcctccgggaaataccctaccacccgaatccacgccgccgccgccgtcgccgccgcgctctcctccggcgagagctcagggggattcgatcgcgaccggcggaggaggtgaggtgaggtgaggcttggcgggcggcaaccatggcggacgagaagcacgcggagaagcgggaggaggtctccgagcttactccttttgacccaaccaagaagaagaaaaagaagaaggttgttatccaagatccttctgatgaggtggacaagctggcagagaagacagaaaacctgacagtcacagagcctggtgagctcaacttcactgggatgaaaaagaagaagaagaaacctgtggatcttgatttgtctattaatgacattggtgatggggaggacattttagatgaccaagttgtagaggaggaagaaggggaaggaattgtgcttggaggtgcccctaggtacccgtgggagggaactgatagggactacaattatgatgagcttctgggcagagtgttcaatattctgcgtgaaaacaatccagatcttgctggagacagacgcagaactgtcatgaggccgccacaggttcttcgagagggcacgaagaagacagtttttgtgaattttatggacttgtgcaaaacgatgcataggcaacctgagcatgtgatgatgtttttgcttgctaaaatggggacaagtggatcacttgatgggcagcaaaggttggtgatcaaaggaagatttgctccgaaaaacttcgaagcaactctgcggagatatatcaatgagtacgtcatttgcaatggttgcaaaagccctgataccattctatccaaggaaaatcgtctgttcttccttcgctgcgaacagtgtggatcgtcgaggtctgttgctccaatcaaggctggatttgtcgcacaagttggtcggcggaaggcctgaacataagtcgaagctttggatttgtctattcagtgagctgctatattgtgtgagaaatgattttgctctatcttgtactcttgtgtggccagttttggacctagttttggtcatgtaaatgccgatggcatttagtctatcatagggtgattttgaccgcgaatgcaacaacacgaccaagcaaactaggttgtgtgttgtgaacttgtgattgaaattgggtatcagtttcagggtctgagcaaatggatcatatctcctgggtagattagctccggaagtgc

SEQ ID NO: 16493 - DNA, 3764 bp, Oryza sativa
  ref <308>: DATABASE ACCESSION NUMBER: AK098978
  ref <309>: DATABASE ENTRY DATE: 2002-08-28
gagtgtagcgcgagctgaagaggaggaggggagtggaggaggcggcgctgcagatctggaggcggagcggcgaatggtggtgtcgccggcggccgccgcgatctaggcttgccgcgcgcgcgcggatctgcgagctgcgtagccgtttctcgctgtgagtggaggaggaggaggaaggggaggaggatggcggcgaacgcggggatggtggcgggatcccgcaaccggaacgagttcgtcatgattcgccccgacggcgacgcgccaccgccggctaagccagggaagagtgtgaatggtcaggtctgccagatttgtggcgacactgttggcgtctcggccaccggcgacgtctttgttgcctgcaatgagtgcgccttcccggtctgccgcccttgctacgagtacgagcgcaaggaagggaaccagtgctgcccccagtgcaagactagatacaagaggcacaaaggtagccctagagttcagggcgatgaggaggaggaagatgttgatgacctggacaatgaattcaattataagcatggcaatggcaaaggtccagagtggcagatacagagacagggggaagatgttgacctgtcttcatcttctcgccacgaacaacatcggattccccgtctgacaagtgggcaacagatctcaggagagatccctgatgcttcccccgatcgccattctatccgcagcggaacatcaagctatgttgatccaagtgttccagttcctgtgaggattgtggacccctccaaggacttgaattcctatgggattaacagtgttgactggcaagaaagagttgccagctggaggaacaagcaggacaaaaatatgatgcaggtagctaataaatatccagaggcaagagggggagacatggaagggactggttcaaatggtgaagatatgcaaatggttgatgatgcacgtctacctctgagccgcatagtgcctatcccttcaaaccagctcaacctttaccggattgttatcattctccgtcttatcatcctgatgttcttcttccaatatcgtgtcactcatccagtgcgggatgcttatggattgtggctagtatctgttatctgtgaaatttggtttgccttatcctggctcctagatcaattcccaaagtggtacccgataaaccgtgaaacataccttgacaggcttgcattgagatatgatagggagggagagccatcacagcttgctcccattgatgtctttgtcagtacggtggatccactaaaggaacctcctctgatcacagcaaacactgttttgtccattctggctgtggattaccctgttgacaaagtgtcatgctatgtttctgacgatggttcagctatgttaacttttgaggctctgtcagaaactgcagaatttgctaggaagtgggttccgttttgcaagaagcacaatattgaaccacgagctccagagttttactttgctcaaaaaatagattacctgaaggacaaaatccaaccttcctttgttaaagaaaggcgggcaatgaagagagagtatgaagaattcaaggtacggatcaatgctcttgttgcgaaggcacaaaaagtacctgaagaggggtggaccatggctgatggcactgcttggcctgggaataacccaagggatcaccctggcatgattcaggtgttcttggggcacagtggtgggcttgacactgatggtaacgagttgccacggcttgtctacgtctctcgtgaaaagaggccaggattccagcatcacaagaaggctggtgcaatgaatgcattgattcgtgtatctgctgtgctgacaaatggtgcctatcttctcaatgtggattgtgatcactacttcaacagtagcaaagctcttagagaagcaatgtgtttcatgatggatcccgcactaggaaggaaaacttgttatgttcagttcccacaaagatttgatggcattgacttgcacgatcgatacgctaatcgcaacatagtcttctttgatattaacatgaaaggtttagatggcattcagggtccagtttatgtgggaacaggttgctgcttcaataggcaggccttgtatggctatgatcctgtactaactgaggctgatttggaacctaacattgttgttaagagctgctgtggtggcagaaagaaaaagagcaagagctacatggatagcaaaaaccgtatgatgaagagaacagagtcttcagctcctatctttaacatggaagatatagaagagggcattgaaggttatgaagatgaaaggtcagtgctgatgtcccagaagagattagagaaacgttttggtcaatcgccaatttttattgcgtccaccttcatgactcaaggaggcataccaccctcaacgaacccagcatctctactgaaggaagccatccatgttatcagttgtggatatgaggacaaaactgaatggggaaaagagattggctggatctatggttcagttactgaggatattctgactggatttaaaatgcacgcaagaggttggatatcaatctattgcatgccaccacggccatgcttcaagggttctgcgccaatcaatctgtctgatcgtcttaaccaagtgctacgttgggctcttgggtctgttgagattctgcttagcagacattgtcctatctggtatggttacaatgggcgtttgaaacttctggagaggctggcttacattaacaccattgtttatccaattacatccattccacttatcgcctattgtgtgcttcctgctatctgtctcctcaccaacaaatttatcattcctgagattagcaattatgctgggatgttctttattctgcttttcgcctccattttcgcaactggtattctggagctccgatggagtggtgttggtatcgaggactggtggagaaatgaacagttctgggtcattggtggcacatctgcccatctcttcgctgtgttccagggtcttctgaaagtgttagcaggaattgataccaacttcactgttacctcaaaggcgtccgatgaggatggtgactttgctgagctatacgtgttcaagtggaccagtctcctcattcccccgaccaccgtgcttgtcatcaacctggtgggcatggtggcgggtatatcatatgccattaacagcggttaccaatcatggggtcctctctttggaaagctcttcttctccatctgggtgatcctccatctctaccccttcctcaagggtctcatgggcaggcagaaccgcactccgaccatcgtcatcgtctggtcgatcctcctcgcgtcgatcttctcccttctgtgggtcaagatcgatcctttcatttcgcctactcagaaagccgtcgccttggggcaatgcggtgtgaactgctgatcggcaccgttacgaagatgaacttcaatcaatcaaggtctacccccccttgtgtaaatacctgaggggggctagaatgggatcttctttttgtgtagatgaagaccttttttatctaagttatgccactgtttattagctacttcagtgctggcgctagctgctgatacgatggaactgtgaagccttattttgcctgcgaagaagccagcccagcagcgtaaattgtgaatttttttcttcttttgtgacacccgttattttagtcatttgtttgaggggtcgttgttacacatactatgggatgttatttatacggatatattccaattacattcttttgcggg

SEQ ID NO: 16494 - DNA, 983 bp, Oryza sativa
  ref <308>: DATABASE ACCESSION NUMBER: AK066983
  ref <309>: DATABASE ENTRY DATE: 2001-12-06
cagctctcctctctgtagggcggctggcgggtggggaggaggtccggcggcggcggcggcggcgcgtgcgacctcggggttggaccgtcggagaggcccgggaggcggcggcggcggcgacgacgacacgggagaagggaggtggcggcggctgcaacgcttgagaagggagaagcggccggaggcgccggcgcgggaagaagctgtcttcggcgtcgtgcccgctccgcccaccaccgcctgctccacccgccgctaccccgcgctcacacacacccgccagcgacgccgctgacggcgcggacgaaagatctgcggccatggacgacgacggcggcgacgtcctcgctctccccgtcccgatccccgtcggcgccatcttcctctcctgcggcgcgcctgcccgccgctcgtctgctccgccgaccggccgctccccgcgcagtcggcggcggcgaaggtgaccgtgccggcgtcgaggtcgtggccgacgtggatgttctgctgcgcgaggttcccgaggatggacaccggctgctgctccgttatcgccacgatcgccaggcacagcgtcccttcctgcaccatcacgaacgcgttctccggcatcagcgccaacgtcaagtccggcgtcaagtccgaactccagcgtcaagtccggactcgcctgttcggttcacttcctgctggctgtacacaagaggtcattcaagatcagtaactcatactctattctagcaagctggctgttggtgagaattctgaattctcattgcatcgcctaacgaagatcggagtgctatacatcaatcaatttctcagctgggagtgttactcctgcattgctctacaatttatgggtcatgtaatttgatctctcacagaatgtatagcgaggtaagacagcgaaaccggcgccacaaaatatcttgaaatcctgttcttctgataaaagaacagcttagcttgagattgttctgttc

SEQ ID NO: 16495 - DNA, 2257 bp, Oryza sativa
  ref <308>: DATABASE ACCESSION NUMBER: AK066984
  ref <309>: DATABASE ENTRY DATE: 2001-12-06
gactactatagtgtcattactccgaacacaacgcgagcggccgcctcctcctccgcccagtgacatgccacccgccgccgccgccgccgctggcatcatccccgctcgtcgccgtcgtcgtgctgcgcccgaggaggaggaggaggagccggtgccggtgccggtgccggtggtggcagcgcggacgagatcggggcgccgctatggccgcgcttaggcagggcgacgaccccgccatcaagctcttcggccgcaccatccccctcctcctcgacccccccgccgccgccgccgccgccgccgacgaggtcatgcctaatttaggaaatggtgtaaaaaccaataatgacttacctttagtctcagacaagcttttgattgtcaaaggtattcctttttgtcccaacaatagtaagaaaaatgatttacaaggcatcagcagaccggatggaagaatagaaatcgattccatgactgaggatgttaagactgagcctgatggatctgtccctgagaagatactcaagaagccagataagattctgccatgtccacgctgcaatagcatggaaacaaagttctgctacttcaacaactacaatgttcaccagcccaggcacttctgcaggaactgccaaagatattggaccgctggtggagctatgaggaatgtcccagttggtgctggaagacgcagaaataagcatgtgtcaaaatactgtcaggcgatgatgacgtgcaataatactgtagctcctggagatgtttctgatgtggttcaccatcaggttattacacatggatcttctctccttccggcaacactgaaggaaaatgaaacacctacagaattcatatcagaagtaccaccatgtaagtcttcagcttcaatccttgatattggagagccgaatgatactgaccttgttcccttggcctctggtgataacaaggaagaaaaatcatgtgcatcttctgtggtagtatccagctgttcagagaatctgatgccagataatgcaattatgaaagagccaaacaacaggtcaggatgttgtaatggtgtggcattgcctttccctactggacctgctttggtgctcccctggagtcttggatggaacagtgttgctctcatgccagctacccagtgctcgatgcagcccgttcttgggttaaaaggtgggataccctgcccgccttcatggccaccgcaactgatggtgccggccccaggaatctgtactcctgttgttccaatccctcttgtgccacctctgtggcgctgcttccctggctggcctaatggaatgtggaatgcacaatgccctggaggtaatactactgtgctgccgtcaaccgctccaaacaaaatttcttgttcaggaagcagttctctggtgttgggaaagcattcaagagaagaaagcttgcaggaagaagagaagacgagaaattacttatgggtacctaaaactcttaggattgatgatccagctgaggctgcaaagagttcaatctgggcgacccttggcatcaagcctgacgataaaggcatattcaagtctttccagccaaatgttgcgaaaaatggcacggcaccagaatcgcctcaggctctgcaggccaatccagcagcattttcgcgttctcaatcgtttcaagagacgacttgaggagcttttctgtttgttttctgacataaggatcatactgctacctccacaggaatggtcacaatgtttctatccagtgtgatcttgagctcatatgttgctagagccagatcaaatctagcaactcaaatctggcagagttgccagtgatgaacttggttctgtggtaatgtttatgttgatcaaaaatctctgcttctccccaaggagagaattgtgagcttgtgatccggagctcaaaacatgctccatctgaaatcattagtcaatagctgtcgctgtgatggaggtgaaaaggataactgtgaagtctcttttttcttactttctttgaatttttagactggcattctgacgtttgtatatagcttctcaaaattcatgtaatggcttctatgttaacctgcagaaaatgcataattttgtaactggatggggatcaactccgtttggacataagcaaatcagcctagttatctcatttgcagcattgaaatttaccccaaactaacaccatatctgtcaataccattgggtcaaaatgaacacccatttctaaattatcaaaattcatttacccc

SEQ ID NO: 16496 - DNA, 1119 bp, Oryza sativa
  ref <308>: DATABASE ACCESSION NUMBER: AK098979
  ref <309>: DATABASE ENTRY DATE: 2002-08-28
gtcctctcctccccctcctcctgtctcaacagaaaacccaagtaagttgtcgccgccgccgccgccgccgcaatcgtgggtgatgggtcgtgctcgtcggagcgccggcggggcctccactgctgcctggccttcctcttcaagttcctcgccttcctccaggccttcgccgctgtctccgccctactctacgctgcatggatcctctcccgttgggcgcgccaccaccatctccacctccaagacctactccccgacctctggttcgtctgcgccctcatggctgccggcctcttctactgcctgcttctcctcgccggatgcgttgctgccgagatcaacagcccctgcttcctctgcttctacaccatcttggctgtcgttatgatgctcctcgaagctgctctcgccgctgatttattctttaacaaacactggatccaggatttgccatatgaccgcactggagaactcgataatctactttccttcatccaaactaatctcgacctctgcaagtgggctgctcttgctattgttgctacacaggcactttcacttctcttggcaaccatcttacgatccatgttttctaccccgagtgccgactatgacagtgatgaagattttgtggtcataaggaggccacttctggttgcccaaggtgctcccgcttatcttcctaccaccgccgatactagaggtttccatccaggcctatggagctcaagaatgagacacaagtatggattgaactcaagcaactacacctacaacacactggatccaaatgcaccaccacctcagtaagcagcgtgtgactgatgatgatgttagagatgatgaagaagcatgcctttgtcccaaacacctagtatatacaaacaccatttcttctaatattgtactatcattgtttgcatggttagtaatttttcattttatgccctctggattgtacatagttgcatatttcattgcattttagtactttcatcagttgatatctgcacatttgtgtttatgtgggtggtacatgttggagctctgcatctgtacaagtgtatttgtgcatgagggtgcaacattgtttaatagttgggagtatctcttctttct

SEQ ID NO: 16497 - DNA, 1876 bp, Oryza sativa
  ref <308>: DATABASE ACCESSION NUMBER: AK066985
  ref <309>: DATABASE ENTRY DATE: 2001-12-06
gcttcccctcctctcgccggagactacctcgccgtcgccggagtccccccgccgatccgatcccgacaagccggagatgcatccctccggtgagtactccccttactaccagccctacccctcgcccacctccgcgccgctcgccacctacccctccgcctccgcgccgccctacacgccgtaccccgccaccgactacgccgcccccgccgcgtaccccacctacccgccgccgcccgccgatcccccccagtacgcgcctcccccggccgcgccgcagccgcagccgtactacccctacgagccgcccccgcacaacccggctccctcgccttacccgtcgctagatcgggcaggaagctacggctacggatccggatcccaggagctgtacccgcccaagcctgccgggggcgggtggtcggatgacggggtgtacgcgtacagcggcggcggcggcgacgcgccggagccgtacggcgcgaggggcaccgcgccgaggtcgaattccccgctgtttgatgactacgggaggtcgattggttcgaccaaggagagaggtggcggtggtggtggcggtggaggcagttcggcgagccccaaggtggtgcgggcagtgcccaaggtggagacgtcggaggacacgagtggtggtgtgcagaagttccgggtgaagctgctgccggagggcgcgggcagccccatggatgtgctctgccaggttggtttggatgggattcggatgcttgatcccaatactagtaggacattgagaatatacccccttgaaactgtaactagatgggatgtattagattcttctatctttgccttttggtctaagagctcagttgattttgaagcaagaagaataaggctgaagtcaaacagctatacaaccaacaccattcttgacactgtgacagccgcgagtgtgcagttcaaggaaatgggcggaagtagcatttcgagaagtagagcaattgctgatgctgccaaacctcctgaacaacaaaatgataggaggaaaaatttccttgattggaggaacttaatgaagcccatgaacgaggagaaagaccactgggtcccagatgaagccgtcactaaatgcacagcatgtacagcagatttcagtgctttcaatcgcaggcatcactgtcgaaattgtggtgatattttctgcgacaagtgcacccagggaagaactcctttaactactgatgctgatgctcaaccagtgcgagtttgtgacagttgcatggctgaagtttctcaaagactgaacaatgcaagggaagcggcaaatcggcctattgttcacagccatgaggatcttgccaaaaaacttaaggatgcaatggatataaataagaagtcatcttcagcctcgtcaaggtctacggatggttctagcaggcgaatgagggaggttgcatgccccacctgcacagtccaccttcaggtgcaagtcccaacatctggttcagagaccatagaatgtggtgtctgccagcaacctttcctcgtcagtgctcgatgaattccatcatcacgcaggctctacattgatccacaaagaaaaagattctgttgctgtcaaggttgctgcttcggtcattcattgtcttgatggggtccgttgctcctctgtatatgatgatgatctaatttagtacaatcatattcagaagtaaggaagaggcgaataaagaagagtgttagtgtttgtttaccatgtttgacgtttagcctgttcttgtctgaacttttccttgtgtacattgcggatatattgcttcgagttccatgtgacatggtgtaatttactgctggtatactgcattttgatccatcgaaatcattctgtttagtt

SEQ ID NO: 16498 - DNA, 2272 bp, Oryza sativa
  ref <308>: DATABASE ACCESSION NUMBER: AK066986
  ref <309>: DATABASE ENTRY DATE: 2001-12-06
tccccgcacaacatcaaccagaaacgtctcctcgttaccactcgccacaagtccaccgcagcacggcgccctctcctctcctctcctccgtctcccgcctgccgcgaaaccaaacctcgaaaataaaaccaacagtttccctcgcggccgcgcgcggagacgagtagacgacagcgaatcgctgccggtttggggctcgcgcggatcgcggcggagggaggcaagcctttcggtttggtccgccaccaccaccacggccaccgcgcctccgcctcagcgtccgcgatttttttttttatcttttggttttggatttccccttgtcaaaactggcaggattcttctgcctgcccgagcctgactactgttgggttcgtgctcgctgctcccccacgttttgttttactagtcgccgccgcaccgaatatttttcccacctcgctcgccacgccgccgacacccgccgtccgcttccgcggctgccccgcgcgccggtgctgtgtcgccgggctgcggcggaggagtgccgaccttttcctccggggtgaatgagagagatgtgatcgtggcgaatcccgagctctgccgctgggctgggaggcggggaagggaggacaggagatggggcggcgtggaggaggaggacgagcgggaggcgcgtggattggtggctgtgtacttgcgctcgccgccaccttggtcgtctgcgtgctcgtgatccgtggagctggaggtatgtgcagtggtgtgctctgtgctgtgctggtctgctctgtgggagttttgggggcctccttgttggtctagtttggccaggatcatgcagttccgatcctgaatgctagagtggtttgcttgttagatttttgggttttgagctgccagaacccgagcctgcagcggaagtttcgtactattattaagttttttcacttgggtctctgattcttcgaattggatgggtgattgatgttgaggttgaggacgttgttgtgatttgatgggtgccctgattgtaacatctgctaggatcacagaatattgcagggtctgaagaacatcgccctcttaagcatacgagaaggaataagatggcacgtgtaaattagaaatacagatgcctcaattctatgcacctaaaatttgggggcaggggcgagtgttatgtccatttcgttagctaccttttttatttcctatgacaaatagagtgtttagctgcaaaataaactactgaagcttatttttcagaaggggcataagacagacaaattcaaatggacaaacttttagaacataaatctcggacaaatgctgtaactttgcatgcactatatatgtcaactgataatattttcagttttagttgccatcttattagtttttaacccaaaaatacaatgatcatggacatcactgatcatttttgaccagtcgtattttttgttagcaattcattgttaagttattgcccttgaacaaagctcttgccacttttatattacatttaagctccaaagacaacccattcgttctattatattttggtttctggattatggcttgctatgctgacaaattgttagctattctgttcatgttttgttttcaaaggtttgaagcaatatcatgctcctgccttcgctcgaaaaattcttctttccataacaagcggacatccacaagataacttgaatattgtacttcatccgtcacagttacaaaccccaagactccaaagcttaggactaaatgtaaaaccacctgcagcaactagcagacgtgttaacgtacagcaggaactatatgcaccaagcccaacgatcagccacagaggtcttgctattcctccacttccaacaacttcacccccagttttcccacctcccatcagatcttatcctccacttcctgcaaataggccataccccaatagaccagcagtgtctccagcatcaataatccatcccaccaaccatgggaaggcccatggagttccaattgcagcacattcaaaagaaaggcatcatcattccatgcttgtaaataatacacatggaaatacccatgcaggtccagttgtggcacctccaaagggaaggcatcaccattctttgcctgtaaataatacccgtgtaaaaggacctgcctattctccttcaaattctcccagtatccatagaaaacatggcattccagttgctgcacctccaaagcaacattccagcaatttaccaccttcacatcataggccccacaaaggtatgctgac

SEQ ID NO: 16499 - DNA, 2701 bp, Oryza sativa
  ref <308>: DATABASE ACCESSION NUMBER: AK098980
  ref <309>: DATABASE ENTRY DATE: 2002-08-28
gacaatcacttctccccccggaatatctccgccaagagaagagaagagacacccaacaacccaaaacctagcgcctctgcgctcgaggcccccccgaatccgcgaatccgccgactcccatggcgagccagggagagccctcctcctcctccgatccgaaggggaagaaggatttctcgacggcgatcctcgagaggaagaagtcgccgaaccggctggtggtcgacgaggccaccaacgatgataactccgtcatcgggatgcaccccgacaccatggagaagctccagcttttccgcggcgacactgtgctgctcaagggtaagaagagaaaagacaccatctgcattgttcttgctgatgacacctgcgaggagccgaagatcagaatgaacaaggttgtcaggaagaacctgagagtacgacttggtgatgtcgtgtctgttcatcaatgcccagatgtcaaatacggcaagcgtgtgcacatacttccaattgatgatactgttgagggcatcaccggaaacttgtttgatgccttcctgaaaccgtacttccttgaagcataccgtcctttgaggaaaggagaccttttccttgttaggggtgggatgagaagtgttgaattcaaagttatagagactgaccctgcagagtactgcattgttgcacctgatacggagatattctgtgatggtgagcctattaagagggaggatgaggaaagacttgatgaagttggttacgatgatgttggtggagttaggaagcagatggcccaaatcagagaacttgttgagctcccattgcgccatccccaacttttcaagtctattggtgtgaagcctccgaagggcatactgctttatggaccccctggctctggaaagaccctcattgctagagctgttgctaatgaaacaggtgctttcttctttctgattaatggcccggagattatgtcaaagctagcaggagaaagtgagagtaatctcaggaaggcatttgaagaagctgagaagaatgcaccatcaatcattttcatcgatgagatagactccatagcaccaaagagagagaagacccatggagaagttgagaggcgcatcgtttcacagctgttgactcttatggatgggctcaaagctcgttcccatgtcattgtcatgggtgctacaaaccggccaaacagtattgatcctgctctcagaaggtttggtaggttcgatcgggagattgacattggtgttcctgatgaagttgggcggcttgaagttcttcggattcacaccaaaaacatgaagctggctgaagatgttgacctggaacacattgccaaagacactcatgggtatgtgggtgctgatcttgctgctctttgcactgaggctgctctccaatgcatccgtgagaagatggatattatagatcttgaggatgagaccatagatgctgagatacttaactcgatggctgttacaaatgatcacttcaagactgcactagggacaagcaacccgtctgctctccgtgaaactgttgttgaagttccaaatgtctcttgggaggatattggtggactggagaatgtcaaacgggagctgcaggagactgtccaatatccagtggagcatcctgagaaatttgagaagtttggcatgtctccgtccaaaggtgttctgttctatggccctcctggctgtggtaagactttgttggccaaggcaattgctaacgagtgccaggctaacttcattagtgtcaagggacctgagctgcttaccatgtggtttggtgagagtgaggccaatgtgcgtgagatttttgacaaggctaggcagtcagctccttgtgtcctcttctttgatgagcttgactcaattgctacccagagaggaagcagtgttggtgatgccggaggtgctgctgatagagtgctgaaccagttgttgactgagatggacggcatgaacgcgaagaaaaccgtgttcattattggtgctactaacaggccagatatcattgaccctgccttgctaaggccagggcgtcttgatcagcttatctacattcctctgcctgatgatcaatctaggctgcagatcttcaaagcttgcctccggaagtcacctgtggccaaggatgtagacctgaatgctcttgccaaatacacccaaggtttcagtggtgctgatattacagaaatctgccagcgtgcatgcaaatacgccatcagagagaacattgaaaaggacatcgagatggagaagcggaggaaggacaaccctgaagccatggaggaggacgaggttgatgatattgctgagatcaaggcggctcacttcgaggagtcgatgaagtacgcacgccggagtgtgagtgacgccgacatccgcaagtaccaggccttcgcccagactctgcagcagtctcgtgggttcggcaccgagtttaggttcgctgaccagccagcgtctggcgccggcgccgccgctgaccccttcgcatccgctgccgccgcagctgacgatgatgatttatatagttagatcgctgtgctatttatatttaacctccgtgcttttgttcagtatgtctatttcgctttggtaaactttatcatatgtaacatacggggaaacagtgtactatttttaagttaatattttgagaggtactgaaccgaattgcatgtttctgt

SEQ ID NO: 16500 - DNA, 1080 bp, Oryza sativa
  ref <308>: DATABASE ACCESSION NUMBER: AK098981
  ref <309>: DATABASE ENTRY DATE: 2002-08-28
gggggggatcaatggaggaggagggggagggcctctgcgagatcgcgcggttgccggaggtgctcctctccgccgcgatctcacgcgcctcgccgcgggacgcctgccacgccgccgccgtctccccggcgttccgcgccgccgccgactccgacgccgtctgggctagcttcctgccgcgcaatctccccgatctcgccgacggcgagctctcccccgcgccggcttccaagaaggagctcttcctccgcctctccgatggcccctacctcctatcagaccggctcatgagtatgtggttggacagggagactggggccaagtgctacatgctctcggccagatcgttggtgattatctggggcgatacaccgcactactggcgctggattcctctcaccgactctaggtttgcagaaggtgctgaactcatagatgtgtgctggttggaaatccgtggcaggatacacagcaagatgctctccccaaactcaacttatgccgcatacatggtgtttaagatagctgatgagttctatgggctggatgctccattccaggaggcatcagtcagcctgggaggtaggggatcaacaaaaattgtttgtgtccaaagctatgacagcgaagatgaggaggtgcctgagaattactggcctatgagtattggtccattgctgcgacgaagggccaggagaagagaccgtcgtctagttcttgatgaaggtgtaacggtccctcagaaaaggactgacgagtggatggagctggagatgggtgagttcatcaacgaggaaggtgaagatggagaggtgtgcttcagcctgatggagaccaagggaggcaattggaagagaggtcttattgtgcagggcattgagatcagacttaagaaatctggctgatgaacttctaagatcaaggcgcgtgtaattaaataagactcataatgcgccattttttttgtttgtggttttggcttttgttgccaatgctgtgcaaaactacaggtgtgtttcttttttcttgcgggcaaactgaactttctgccgagaagaaaataccatagtgcgatgcttg

SEQ ID NO: 16501 - DNA, 2202 bp, Oryza sativa
  ref <308>: DATABASE ACCESSION NUMBER: AK066987
  ref <309>: DATABASE ENTRY DATE: 2001-12-06
ggtgcgtctcccctccggctccgcttctcccctcgccggcgccgtcgccggcgttcctcggctgcagatccaatcccgcgccccgccgagtgactctcctgattccctgacggcctattgaagagctgcctagaccaccgccgctcgcgactcgcgagcgctggggcgcccgccggcggccgccacgcccttgttggctaggctgctagctctctgcccctctcgcctgtcggcctctactccggctaaccagagctcctcctcccttgctcccttggctacacgggatttgcggtcttagaaaatttcggtatatgaagttaggcacactcaacaaaatattcctgactacaccacttttcaatgcgttggcataggactagtgggctatggcgacccgcgtcctgtcacagaacctgagaaagttggcttcgttctcactcctcaatctgtcccagagggcaccaatctcgccttcccctgaacctctcaggcctgctattgcttcatttgggaaatgcttaaatcccttttatcagtttagtcctccatggatggttagatgggctagccatagctcagtcaatctagttctatctgatgatgggaaacccaagtttgagattgaggaggtggaaccttccaagaagcgggggtatttgacaaagaagcgattgaagcttcagaggaagagggaaaagaagaagaggaaagaggccaataaaaatgatccacggcgtatcagacccaagggaaagaagataaaacagaaatttcctacacctgaagctcgactcaaatacaagattgagaaggccaaattgaaagaagctatgttggttgagaagttaaagaagtatgagattgctaaagcacaaggccctatggctaaacaagatgatcttgatggcgaggaaagattttatttgaagaaggtttctcaaaaaaagtcaaattatgtccctgttggaaggagaggagtctttggtggtgttattctaaacatgcatttgcactggaagaaacatgagactgtaaaagtcatctgcaaaccctgcaagccagggcaaatccaggagtacgcaagtgagatagccagactgagtggtggtatccctattaatactattggaaatgacaccatagtcttctatcggggaaagaactatgttcagccagatgtcatgtcaccagtcgatacactatcaaagaaaaaggcacttgaaaaatcaaaatatgaacaatcactggagacagtgaggcgttttattgccgtgtctgaaaaagagcttgaactttattatcggcatattgcactttatggaaacccacaatcccagaatgttgatcctgtttattgtgatgatagaagagctgcttctctgaaaatggaagaaccgagtcaagggaaggacctatcgcatatggataacgatggtttctctgatatcactgatgcttcggagtctgacgaagaagctaatcctagtgaatatgatgataatgatgatgagactggagataatataggcactgttctttatgatcatggaggcttcaagttgaatggaaactccgtggatgatcacctgtcacctgcattagcagtttccatgtttatgctttatggcacttggatctgatccagacatcctgcagatggtatgaggcatgttgttgcaaacacttggagactaaaggtctttagctggaagaatttaaacaaatgccaagtagttagtactcaactccaacagcaggattgatctgcattttgtggccaataagacacatcttatgttcttagctaattgtggtccataaagcaacgtcggttggtagatattctcagcttctaaaagtagttgctggcgagcagtatcattttgagaaattagagctgtcggcatgagtatcacaacagcatgtcatgcactaagtacacaattaaattgcgctgttatctacttatcatagaggaactggttgggagtgccaaacagagcacacttcttcataacagtgaatatggctgcatcactttggagtaagctatcaccttatgacatggaccattctcttcgttccatatatatctggcagttctttaggatgatgctaatggtggcctgctgatgtactcaatattgatactatgtagattcgtctttctattatcagctaaatctgtcactttgcttg

SEQ ID NO: 16502 - DNA, 620 bp, Oryza sativa
  ref <308>: DATABASE ACCESSION NUMBER: AK098982
  ref <309>: DATABASE ENTRY DATE: 2002-08-28
ggctagtcgaggagagcacccaacccctgcgccgccacctccgatcgtcagccatgaccttcaagcgcaggaacggcggccgcaacaagcatggccgcggccatgtgaagtacatccgctgctccaactgcgccaagtgctgccccaaggacaaggccatcaagaggttccaggtgaggaacatcgtcgagcaggcggccatcagggatgtccaggaggcgtgcgtccatgacggatacgtcctcccgaagctgtacgccaaggtccatcactgcgtctcctgcgccatccacgcccacatcgtccgtgtccgctcccgcgagaaccgcagggaccgcaggccgccggagaggttcaggcgcagggaggataggcctactggacctcgccctggtggtgctggtggacctggtgcccctgctgctgctggacctggtggcccccctaatgttgctcgcacctaaacagccgtagtcgctcctttgttactctatatcatatcctgttaatggcgccatggatatcatcgttatggtctttcatgaggtcaaagtctttcttggaactagcttgtactttgcgattggcagtgtgacaatggaagtctgaatttttgcctg

SEQ ID NO: 16503 - DNA, 3644 bp, Oryza sativa
  ref <308>: DATABASE ACCESSION NUMBER: AK066988
  ref <309>: DATABASE ENTRY DATE: 2001-12-06
gatatactactccgtatgtggatgtggcccccattggccagtgacccaatatatggaaacctaactgcatccaccattccaccgtcatcctcgccgtccccttcttctgcgccgccgccgccgccgccgccgccgccggagggcggtgccgcccctctcttcctctctcgtcaacgcagcagcaaaagctagcgtgcgccgccggcacgcaaagcttcccccggctcctcttgccctcctctagctcctcccccatccccgacctagggcttcttccaatcctccgctgccgccgccgccgccaccttccatccagcctccgccgaccgctgccaaccatggcgctctaccgccgcctcctccacctccgccgcctccagcccccggccgaacacgcctcctccgtagcctcagcgactccccgcctcttcccgctgctcacgccgtcgcgccccttcgccgccgtctcctcaatcccccgcgtcgagccgccgctcctcgtcgtcccctccggtttggcgcgcgatggtttcttcggacgtaggggggatcgccagttcttttcaactgttggtgctgtcttagttggtcaagcagagaaacctagatgaagctgagaagtttttccaggcagccctacatgaagcgaaagaaggatttggactgagagatccacatgttgcgtcagcccttaacaatctggctgagttttataggttaaagaaagaatacgagaaggctgagctattgtatctggaagcaattgaaatcctggaagaatcatttggatcggacgatataagggttggaactgctttgcatagtcttggaatatgctaccatcttcaacgcaagtttgctctagctcagacatgttatgagcgtgctttgaagatagaaggacgtgttatggggattggtcatccagagtatgcaagcacaatgtaccttcttggcaaggtgttaagtcaacaaggaaaagatgcagaagcccttattgaagagtctatcaggatattggaggagtctgggcttggtgagtcaccaatatgcatacaaagaatgaggtatctctccacggagttgataaagtcaaatcgacttgctgaagctgaaaattggcaaaggaagatattacataatctggaactctcaaaggggtgggattcatttgacactacgaatgcagctgaactcttaacaatgactcttcaaaccatggggaagttgaaggaatctgaagaattattggaaagatgccttgaagtcagaaaaaggattttgtctgaggaacattttcaggtttgtatcatatttaatgtttcacgtgatctttagtggaaataaaacatgaaagcatcatctcaatgaaaaaactcacgagctttcttacatgatcacaattctcttgtttcttaaaattatggttgccagatcacttaccaggtatttgagtttttcaccacaagctctgctttattggcaattaacacagactgggaggtatttgtgccatgtgcccctgccacgatgcttgattgggaagcaatgtaatcactgttgctccatatgtattttactaggtcatggtggcatcgccaattcatgttgattatcaccatttccatagtttgatgattacatgattagattgcttcattagtgtttcacttccttggtgcatgctgtgtcctgagaagctgagcccaagaaatgcaaatgttttgttgaagaatgtaggactcccttgctttaggtagagtattgtccatatcaccaatggcaattgtcattgttgactgatggttgcggcagctacggcacacacaagaccatgtgacctgcatctgctatgttgagttcacggtgcacccctacatgtcaggtgatacagcaaaatgcctagtggtggggaactggggactctagtggcaaactggcaatcaaaactaatactctaatagtagcattatgatgctatgatcctcaaatatttggatcaatctaatgaaaataataattaccatatagatacccttcagtcacaaataagtgttgttttagaatccatgcgacataattattactacatccgtcccagaatataagaagttttagtgttagacacggttattaagaaagtaagtagaattaaatggagaggttgtgattggttgagaagtggaggtaggtgtagaaattgaatggtggagggttatgattggttgggaagagaatgttgatggagaagttgtaatatttttggacaaaattcttagtgctagaagttgttatattttaagacagagggattattgtttagaatatagatctgggtatatgaaaataacatggccaaattcgttatatcaaaaaagctttcataatgtcacgcttctgcaactcattttggatttatggaattgaattaagtggtcaaagttatgtcttattggcttttggctttgaaaagtcgacacttatttgtgactggagggagtacagtttagtcttccacaaatatgttattgcgagatttactgttgaaggtgcatccctggaatcatgaaaagtcaataacaccgagaattgggttttcctgccgtttcatatacaatcaatttaatactggttgtcactagcaactagctggaacctagtccacctggtagctgttactttggtacacttggcaaggctaaccatgctaaactttattagtgacaaggaggacagtgacctagcaagatccaaacttgtcagggcaaggctacttgtcaatgattcaatcaggatagcagaaggaatattatatgattcaaggaaagatctgaacaaactcaataatggacgaactacagacagggataagattgcagcaactagtgcacttttgcaagcacttgaagttgctggacttcttgaaagtggaatgaagaatatgctaactccaggggaacaagatttatatcctgttgaacaggctcttaacaagtgtgtttcgctttacaaagagcctcatacgcggaaattcgtgtcaaagactctcaagaacgagtatatcagatgcttgaggcggctcactggtattgttcagagcgatttcgctgtgtcggaggcattgacattgcaggggttgctagctgaagcgcaacagatacttgaagaacttggacacgagagcaactagaagtatggaaaagtaattattcatgactcggaggaacacctttgttgtgtgcaaggtcttctaggttggttttgcaccaacagattttgatgccagcatggatttttattgtgctctgagctatcgaccatatgctgccgtagttggtggcgactttgcaagcaacaaaggatggtgattttgttttcttctggtttacaggtttatgctgccgtggttttttgtttgacctgcggatgtcatttgcccggcaaattttacttgtatcatgactgctcgattttggaacacttaagtaggcttccacggtgtcaacgaagtgtacgaagatccactctttaggattttatatttttatactcaccttgttcttcagaagcttctttttcctgcctggaacaacttcagaagttgatatttgcaaaaatatataattttcctttggggtcataac

SEQ ID NO: 16504 - DNA, 1241 bp, Oryza sativa
  ref <308>: DATABASE ACCESSION NUMBER: AK066989
  ref <309>: DATABASE ENTRY DATE: 2001-12-06
gaccctactctgcccttgttcttttcttcttctctctctctgctctgcctctgtcttggtttgctttgcttcttctcgatgccatcgatgcctgcatgactgcttgcacctagcaacttcctcttgccaagaacgggcggtcgcagcaaggcttgttcagcttgaacgccggctcatcatttcaaaggtatagatggcacacgcaaacaagaatcacattgagtcatttccacctcctgggaaaaagataacaatcgtgttcgtcataggtggccctggcagtggcaaaggcactcaatgtgccaaaattgttaagcagtttggctttacacatctgagtgctggtgatctccttcgtgaagaagcaaaatatgatactgaacaaggtacaatgatcaagaatctcatgaatgaagggaagcttgtgtcatctgatctcatcgttaagctactatttaaggccatgcgagaaagtgggaatgataagttccttgttgatggatttccacgaaatgaagaaaatcgacatgcgtatgaaaatattatccacattgagccagagttcctgctgttcattgactgctcaaaggaagagatggagcggcgcattttgaaccgaaaccagggaagagatgatgacaacatcgacactattaggagacgctttgatgtttttcagcagcaaactcttccagttattcagtactatgagaaaagggggaaactcagaaaggttgatggtaaccgacaggtagatgaagttttcgaagacgttaaggccatttttgctcagttgaacaatcagaaaattcatggtggccagcaagctagtggtttgagcagagcacaaatgaatccattgaaacgttggttctttgactttttctgcggttgctttgggactaaagaagaagcaagaaactgacagtagaaatgaaagtgacatgatctctctgcgtgtgtgtggtggactgtggagtacctagaggctggtgcagaatttcagaaagagagagaacaaaaaacttgtgatgtcttgagttactactagtatatatggtgatggtgtgttgtgctagttgactgtttcggttcaatagtctagtgtgacctgtgaagatactgcatgttggcttgtttggtttgttgattgcagcttcgagattcattattattgttggctaaaaaatctgtgtgatttaacgttagttaataataaaagagagtggggaatttatccc

SEQ ID NO: 16505 - DNA, 3361 bp, Oryza sativa
  ref <308>: DATABASE ACCESSION NUMBER: AK066990
  ref <309>: DATABASE ENTRY DATE: 2001-12-06
cctactctctttctctctctctctctccccccttctccgtctgcgttgtgctgcgcgagcccccggaggcgaggcgactccgcgtcgccttcccccccgagcgcgcggccggcgagaagggcgggaggcgcgggcggcgaggtgctcctcttctctctctgtgtctctcgtcggcgacctcgcgcggtagcctcctctccggtggtggtcgcgcgcgcgcggacggtcgacgagggaggtttggagggtgggggcgcgactcggggttgaattcgctcgagctgactcactccagagggttttatagtttcaagcacaacgctgctcaagatgccagcactgaggatgaagaggaactttgacgatgatgtttttagggatgagtttgattccaaacccacaaaatctatgaagatctcacattttcaagtcagcgaactagagcagtcagctgtgttgaacttgccttataaagatccccacgatgagctggatttgacaactcagttagctggccaggacattatgatcatggaagctgctagtttggatgatgctcttggaggagcatctttgctcaaggatttaatatctgaggtggcagtttcaccaaatatggagaatgatatgttagttaattatgaagacatcagatctcagttaaatgtagtaaattattttgacaaaggtaaggagcaaccctttcaccttaagtgacttaggatatatatccattaagcgaagtagcaagattaattttgctatgcgctaggtatttacacttccatgtgcgctttgcattttcatattgcaattagcaaagcatttacaatgtgatgccatagattctaagttatctgaaaaccaatcttaccaagaatagaattaaaaacaagatttctttgctagtaatgactggaatattcctttgttacttttaaattatattggactttttggtcatcagtctttatttaatgcatgattctgatcattctttgtgtatacacttttgaaaatgtgtaaaaatatgtatgctacattagcatctggtgttgcaaatttaatatgattatttctgtgcggtcaagctatacagtatacactgaattgctgatagggaattgtatataaatgatccaaatttcagaagttctactgcaagaatgccacattaatctatttatgtccacaaactggacactgtttttgtctttgtgccaacttatcacaaattctgattttgcttggctggaggatttctgatcttttaatttcattgcatctcttgctccaaaaacgatgtgccacatatgtagtttttagctgagatagcaatgcaatcatttcaattccccctagttcgaaaacctttttgtcataatgccatgtcagtctctcaacattatatcgttgaacaaacctaggatgtttgcttaaattgataacttgagatgagcttttgctgtacatgctatctttggcctctgtataaaatcatgatatgcaatatatacttgtccattctattgtggaaagagaaaggtgtgcgctggcgctatatgcaaatgatcataccagaaattcatggtgactgattgtctaggcattttgattggtattgaatctgaataatatgtgatagtggcaaatccatcaaatatatcaccagattaaacccacaagattatcattttttttgtgatagtggcaaatctattaaatatatcatgaactgcttctcttgaaagttgtccattcatctacctattgccaacggacgaattgctaattcttgcagttgtggggcagtaactgataagcatgatttgaattgtgttccttattttgtaatagctccttgaggagaaaatgtagaaatatttatttgggacatgcttatgttgaacatttagttattactactcaaaagcaagtttcagtttgtaaatgtgcgtacttatttataattatgcatggtattttttgcagatgaagatgcaaattctgcatcatataatagctgtaccgttaattgtcatgaagaaagctggggctcgaatgagggttgcagtctgttggacatttataatcctgatgatgctttctctttcctattggatacgccctctgagtttctgggtagttttactgcattatatgatgaagttgtaccaattgattcattggtgaatataagtggccgatgtggagtattcccacttactgagagcactacagaagccagtattggtaatgagccatgcagatctgagggggatatgctatttagtaactcagaggtgttagagtggctcaatccacatctggctgaggaggatttgcctaatctcgttgattttactgagctgaactcacatgctgtatcaaaggagcaaggggccaggaaggtcactcttgtacttgatttggacgaaacccttgttcattcgaccacagagcagtgtgatgactatgactttacctttccagtgttctttgatatgaaggagcatatggtttatgtgaggaagagaccacatctccacatgttcctccaaaaaatggctgagatgtttgaggttgttatattcacagccagccaaagtgtttatgcagatcagctgcttgacatcttggatccagagaaaaaactgttctctaggcgttatttccgggagtcatgtgtatttacaaacactagctacacgaaggatctgacagttgttggagttgaccttgctaaagttgtcataattgacaacactccgcaggtaaactgctgataacttgttctgcgctaatgcacttcgtgttctaaatgttgtcacttatgtttttaagaaggttcagtgttaaagtgtcctggacctacatctctgaatttttgaaatctcccattcatcaactatcgcatgaagtatccgatgagcacctgaatactaatttccatgtttcattcaggttttccagttgcaagtgaataatggtatacccatagagagttggtttagcgacgactctgatgaggcattacctcagctgattccgttcctggagacccttgcttctgcggatgatgtccgacccataattgccaagaagtttggcgacaaaaaggatattgctgagattttccaataaatgttagggatagctttttgtttactcagatagaggaacagaaacttaattaacatgttaaccgggcttgttgacctttttcttttccttttttacagtgggtggttttcataggattaagaattttggtgttagagctagttgtgaattgtacatatcctcgtatttcttaaacagttctgtacatagtatgctgccggaaatgaaagtgaacttc

SEQ ID NO: 16506 - DNA, 2511 bp, Oryza sativa
  ref <308>: DATABASE ACCESSION NUMBER: AK066991
  ref <309>: DATABASE ENTRY DATE: 2001-12-06
gagagttggttggttgctctcctactccgggtccgggccacgacccgccgccgcgccgccaccatggcctaccgccggaagcagggccccatcgccgccgatgatcgccggagctcctacccccagccgccgcagggctcttcttcatcgtacagttacacatcaatcaaaagtatgaacgagcccaagcttgggctatgggaaactttggcaagaaaagccaagggaattcttgatgaggatggcacagcacataagtctgacgagtacacaaaacaaaagacccctcgcaagtttgattcatccactggagctcaggaatctcgatctcgctggtcatttgaaaaccacagcaggacaggagatactggatcccggacaaggtcggaagctcttgctgcttctgtcaaccaacttggtggaagaatcagagatgcgttggaagaaggactcacaattgtggacaataagacatccaatatcattgaggagacaaagaagatacaaattagaaggaagcaagccaattcgaattcttatatgccgaacccagcatttgatacattaagacctcctaatctttcacatgatcaagctgaaactgcagcccaggaaacccaattaaaagcttctcgcgatgttgctaatgcaatggctgctaaagcaaaacttgtgctccgtgaactaaaaacagtaaaagctgatctagcttttgcgaagcagcgatgtgctcagctagaagaggagaacaagttcttgcgagaagcaaagcagaaagggagcaaaactgaagaggatgatgacctggtatgttaatgttttccaagcaagcaaccctggaattattttattctcatgataaagttatcagaactacattcttcttgatggtgaatttgtgatgactcatcccaaaactctggctatgaccattgaaaagtgtgaaatttcttctttcccttgcatttctggacaattttgaaaaagatatgcaaattttgcagtacgttgcacaatgtggttggttgatatgaaagcctgatgtattggtgatgaaaatttgaaccactatatcatgtcggataaactattaagcattggtacttgtaaaaccatgtgtggttatagttcttttgtgatggaaaattgacaagtactggaagtgcaagaagtgtgtgcgtggactaacattggtcagattgcgacatctgtgccgagacaacggttgtttggttcatgtgtgtgcagatgatcggagtcgatcttggtcaacggtggatcgggactagactcagggaggggttgaggtccagaacgatcaaggatgccgggtgacaagattagacacaaggttgcacacggtgggcggacaccgtgtgaggaggtcttcgcaacgggcttcgcaaggtcaagtgtgcaagcgccaggattcgcgaaaaaatcggaaggagaaagaactgtgcaagtgcattgctgctacttactgtagctagcatacatgcatgtacacgtactgtacatgtgcaaggaggagcttgcactgtaccggttgctactagcatggctcggtggaaaagtcaagctagctagccatgcatgggctcagttggcagggaggccaacccgagctggccatttggcttgtgggctggcacgtggctggcccaaggtgatgtacgggaggaggccaagccgagcagccctagacaagacgacggcccagctcggctcggcaggtgcatgcgcgcgcggaggcgggagatcgtatggcacaaggacacgtggtggtctcctgttcgacaagcaagcggagacgcgcgagacgcggtctctcatgggacccacacggtgcacgggattggatcggcgagacgcgcggcgcttttggattggtgcgctcctctccctcgacgcggcatcggtttcacgcgcgggcgcgggacccacgtgaaatttggagcgcgcgcgggagcggcttcggactgggtggctcgctggcatgcgggcccgacatggaggagagagcgcggtctcgcgtgcgcgggatttcggcgcggcaacgtgtcgcactcagattcgtcaagacagggagcacgcagattgatttgcatgtgaagctttggatcaacgccgtggcaagcatccaggaggtttccttcggatgtaaggaagaacgaacagccaggattgcatctgagatagggtttgccttaagggcatttgtgacaatgtcttagggggtcttaggctataaatagagaaatggatgcaagggtggaggttgctcttttttaatccttttgagatgctcggtgagagtttcggtgtgagtttggagtgtgtttgcccgagaggcttttgtattaggattagtttggagtgtgtttgtccgagagattttaagtttgtattaatgttcctctgaaggtgtatgtttgctcctagttgagcggttattttgcatcacctatgaatgaaatgatttgaaagatttcgtttttgccttgttct

SEQ ID NO: 16507 - DNA, 1319 bp, Oryza sativa
  ref <308>: DATABASE ACCESSION NUMBER: AK066992
  ref <309>: DATABASE ENTRY DATE: 2001-12-06
ggccgcccgtcgcatgaccacgaccctcggatcgtggtggccgttggctccccgattagcttctcccattgccgctcctgtaggctgtagccccagccgatatgcttgcgttgattttgattctgtgccgcctagcgacccgcctctcttcatctagggttcaaccttcgagccggcttctcagttgctgcaagtggaggcggcaagctagagacagcaactgcatatcttgcaagaaaatcggttttatggccataccgatgattttcttgcaagctgtgcagttgttgtctcaagcttgctgcctccctttgccagaactattggatatgaaaacagagtcaagaaatgcagaatccaggtttgccaaaagcagcaatataaatatgttgtgtatacccatagaaacatgctgggttatcaactcactagtttttttttaaaaaaaaggaaactcaattacattagacaagaagactatttgaactgaggaagttattgtgtatggtaaaagaagtaacaagaggcaaacaaagaaatttgttgtaaacaaataagggaagtagtattatctttccagtttgaagacagtttttttttccagataagacgatgagctaccaactctattgaatttggtactccattatcagtcctcgttttgcggggtgttaccccctattgtaaaaagcttgtttgtctaagcaaaatgcttccaagtcccaccaaagctagattaactacaaagtatctgcagagtgcacaagtcaggtaaaaaacttgtttgtctaagcaaaatgcttccaagtcccaccaagctagattaactacaaagtatctgcagagtgcacaagtcagataaaaaacttgtttgtctaaacaaaatgctcccaagtcccaccaagctagattaactacaaagtatctgcagagtgcacaagtcaggtaagtgatgattatatcatcctggtacaagctttattgcggtgaaagataagcagttagtctgaaatctgtacagatctgtcagctgttaccgaagcaaaaggttcaatgtgaacttaaagatgcagtactgatccttttaagaggatttaacacagatttaacagggtgttctgtatgcgagctgtgatgggatggttctcttcagaagcattttattttaactaaattcagaagcatttcgatggcatgaggactgttcgattgacaatttgtatgtacatttccaccgtttacgcagcttagggattggaccataattagttgtgtacctgcaagttttgtatacgaattatcctgaagggtgttcggtg

SEQ ID NO: 16508 - DNA, 3411 bp, Oryza sativa
  ref <308>: DATABASE ACCESSION NUMBER: AK066993
  ref <309>: DATABASE ENTRY DATE: 2001-12-06
gggaggaggagaggagaggagggcgcacgcaccacaccaccaccaccgtcacaagcaccgcaatctctttctccctttttcttcttctttctttctttctttcttccccttatccccaagaaccgcgtctctcaagaggtggggagaggaggaggaggaggagaaaaagaaatccaatctttttcttttttcttcttgtgtcaagatgtcttccccgagcaagcgccgcgagatggacttgatgaagctgatgatgagcgactacaaggtggagatggtgaacgatgggatgcaggagttcttcgtggaattccgggggcctactgaaagtatttatcaaggtggtgtctggaaggttagagtagaattgcctgatgcatatccttacaaatctccgtcgattggtttcgttaacaagatttatcatcctaatgtggatgaaatgtctggttctgtgtgtttggatgtcattaaccagacgtggagcccaatgtttgatctagttaatgtgttcgaagtcttccttccacaacttctattgtacccaaatccttctgacccattaaatggagaggctgctgcactgatgatgcgtgatcgtcctgcttatgaacaaaaagtgaaaggtgatgtggtttaaagccattgaactaattattgtttctgcctagtcttagactattgtttggtttaactgtcttgtccataacattttgccacaaattcaagccttaatattatgatgccacaatgcatttttgcaagattggctcacagttttgttttatcctacttccttcattagcgtggcagcaaccaattattggtatgaaggtgtccaatggttgtcctacttatctttattctaacatagtagcaagccctttagtttctctgctttagaatcagtattctcgtgtagttgggtgctttctaaccaggatgtatatgcacttaatcttacctgtgaattaggtttttattagtttagtgatggaacattaaggtgctttgtcataattgtcgacttccttttttttttgggggttagaagccttactagatctttttttgatagttcttattggaaggaggtcaatttgaaattgaaatagcctgccagagtcttttttttggggggttattcagagtcaatagttctgtcatgatctctcaatgatcctatgttctgtggcaaaaccatgtctgccattctgaaaattagcctttgtttgtatataatggcatgacttgtttcattatgctcaagaatggaataaatgcttgctgttggtttgtttccatgtgttatgttacactgggaatcttctttcttttttcgtgtcatgtttatgagatgtttgactatgtgaggtattccagtatttgtggctggaggcagttttctatttgaaaaggctctttctgtatctctataagttcccttttttgtaggtaattaccattttaaagctttttctagtgtatcctaattattattttttaccggagaagaactatcagcgtattggactgtttatttatagcatttgtgttgaagatctaattgtaatgattaactcttatgttacaacttcaggtgctgctaatattgctgattttatattttctaattttatttccatatcagaagtcagattatgtgattattatagttgtgccatgctaatgttggagaacttcattagttgatgttttactgattatcaaggagtatattttgattgtgcatgtgattcttatttgccatcctaggtactggttagtggtgtagtgtgcaccaatcttgtaaaaagtagctaaggacacataaagaaagaggacgagtgaaactattactacttgtcaaaaccattgcagacattatttgcttcataaaccagctaatttagcctgatttcaatttgttgattaataaataaatctgtccaccattcatacatagtctatgcattattgtcagtccagtagctgccagttactataggccttgttcatcatcggcgtagataataaatactaaggtctctgcgaagtaaaatatcagaattgaaatgggaaacatgcttgaggacctcttgaaattgttccttcttgtgctcttaaccttttatgttgttttgctgccaactcaggggttgtctttttcatttcttaaaccctgctctacaccaaactgccgattttgatgattatatcaccagaggcttacagtgtgcatttggaggttggttccataggaataaggacaacattccatattatttctcatcaaagatagcaccgatgactcatcggacagtagcatccgcaacttagggtatgattggttgccattttataggatctgggctgagacatgcctggctggtgggatgcaaggggttggtgtttgattgtggatttgtggtttccctgagtggagattctgtttggttggttcatggggtgcttgattgcgtgtatagacgaggatgatttaaaaaatgttatcaggacttctattttgtgttaatatactatgaagcccatatcttattttaataagccttaatccacttgtaaatacactgatttcatttgctatgcactaactacttgctaattgcgtcattagccggcccgtgcctcgaaagggaatcttgcctagctgctttataacaaaattaaacaaggaactggtgcatcttattggcatggcacaacccctatgcaggcagaataacacatttcttgatccttgagcactcagcctcagatgtattgccaggaactgctagctttgaccacggttttagatagcacagctcacccggcattggtttctattatcgttatagtacaactaatacttttctttctctttatacttgatttcattaagtatgggttgacacttcatattctttcttggtcaaataaaactgcactgttgcgtttctcccacgcgataccagaagctcactcgctttccttttgcttgtgcagaatattgcgaaaaatatgcaaagcccgaggatgctggcgtaacccccgaagataagtcgagtgatgaagaacttagtgaagatgaagatgactccggggatgatgctatactcggcaacccagatccttagtcaagtctggaaccagtttccaaaagctcatcatatacaatgtttggtttgcagaaattgcaagcaaacaaaacatgaaaaaatatctgggaaaaaaaaggctctttgaatctctcatgtaaataagtgtacttgtatcttgtccaatgttgtttccttcaattgaccaattgaattcgcagcagctctcatgttttcccaatctgtcaaagtgtcaagcttgtagatttgtgctcgttccagggaataaacaaggttgtagcttctggtg

SEQ ID NO: 16509 - DNA, 1018 bp, Oryza sativa
  ref <308>: DATABASE ACCESSION NUMBER: AK066994
  ref <309>: DATABASE ENTRY DATE: 2001-12-06
gacagacacaactcgtcttctcctcgaggagctagcaaccggctagcggagaagagcaaagccttcaggaatcaggaggcggccagattcgcgcgcggttcctccctcctgtgcgtgcgatgttggcgaaatccccatcattgcctttcttaactgctactgaaactgctgcgatcagcctctctccaagctgtgatctctttagttcaccaaatgcgagattttccaagaagaaatatggaggaagattaactatccagccaaacattgaatttggaaaaactcaaaatagtaggactcagagaaaatggaggacattctccgctgatcaagctcaagctaccgttgtcgatgctggtgacaacaaaacatgggaagaagccaaacagatactaacatcactggattactccattgaagacgccgacaaaatgctgaagaaggcatttggatggattcattcaccatactggagtgaagagagaaagaaggaggttccaaatgctgaggtggttagtggagtactgaactacattagaactcttgggctctccgatgatgaccttcgcaaattgctgaagaaattcccagaagtacttggatgtgatcttgacagcgaggtgaaactgaatgtaggcaagctggacagtgactggggaataaatggaaaaacactccggagtcttcttttaaggaatccaaaagttttggggtacaatgtggactgccgaggggactgcatggcgcagtgcacccgttgctgggttaggttctagttctgctctacgttaatgtgcagaacttacagttgaattataggttcccagctatttgtctatttctatatcggttactcaaaacctctcttaacataaacaaaacacatttatagtagatggattagcctcagcatgttagttttgtttacatcttgaacagcaccttttccatactatctgtatcagggatgtaaaaacaaatatatcagatacctgaatttctgtgagtgcttcaacgt

SEQ ID NO: 16510 - DNA, 2674 bp, Oryza sativa
  misc_feature (84)..(84): "n"=any one base of a, t, c, or g
  ref <308>: DATABASE ACCESSION NUMBER: AK066995
  ref <309>: DATABASE ENTRY DATE: 2001-12-06
ggttagctaagctgtagggttttagctcaaccgtccacccccatggaaatctcccccaactccgccgccgccaccgcccgccgncacggcggcggctccggcctcttcctcgacctcctccccatccgcccccaagcgcctcaccaccacgctccgcatcctctgcccctccagccgcgcgtccgcgctccgcggggcgtcgcgggacctccacgtggaccagccccccgtcggcgacgaggccgtgctctccatctccgggccggacgcccccgccgtggccgtgagggcgtgggagcgggtcgtggggcacagggtcgggggcgacgaggccgccggggaggaggagagggaggtgcccggcgtggtgggctgccggatgctggcggcgagcgggcaggtcgggtgcgtgctggggaagggagggaagacggtggagaggatgcggcaggagagcggcgcgcagatcagggtgttccggaacagggatcagctccctccctgggctgcgccggtggacgagcttatccatataagtgggaacttttctgcagtaaggaaagcattattgttagttacaacctgccttcaagataaccctaggccagatgcaagcaactttccacctggaagatttgggcctcctggcccagttggcatagatcctcattctcaaagaggctatttaccaccatccatgcctgattatcatgcaaggaattattcaagtaatatggctgcccccggtcctagattctttgttgaacaagagatagtcttcaggatgatatgtctcaatgaaatggtggggagcataatcggaaaaggtggttcaactattcgcgcattacaaagtgaaactggtgcttcgattaagattatagagcctaattctgattcagaagaacgtgtaattgtgatatctgcacatgagaattctgagatgatgcattctccagctcaggatgcagtacttcgggtgcattctagaatctcggagtcatcgatggataaaagttctgctgtaactgcaagacttcttgtaccatcacagcatattggttgcttactaggcaaaggtggttctatcatcgcagaaatgagaaaaataacaggagctggtatccgaattttcgggaatgaacaaattccaagatgtgcacaacgaaatgatgagctagttcaggtcacaggtagttttcaatccattcaggatgcattgcttcatatcactggaaggattagagatgtcatcattcccatgaagccacatccaggtggaggtatgcccccatatccacctggtggaaacgctccacctcaccacccaagacaagaaccagcaccaccgcatcccactggaggcatgcctccatatcctatgccttctttcagagctgatcgtcctatgggtccttttgatatggtcgatcatcgaccacctccccctcattcaatggagcacatgggtgctgataggatgccctactcatatggttgtgaacaaggaggtggtcctcgaccttttctggaccagccatcaccaagtgcctgggctcctgaggcaccaaacagtgaagctccaagaaatatgcctgagacagtaccacctgcagatttcagaaagggagcagtggcaggaacaaatcaagtggctacaccatctaatgcaactgaagtcattattccccgcaagtacataggttttatttgtggagccaatggcagtgaccttgctgagataaagaagatgtcaggtgccacaattactgtccatcatccaaaacctggggatgcaaatgcattggttattatatgtggggatcctgaccaaactaagaaggcacaaagcctacttcacgcgttcatcttttgtggtctctaccaaacttagccctgagctttcagctggattttccgtatggtcgtacgagggatttttttccaggaaactcatcagtggtcactggtcacagatgcaactgttcttttgtgctatctggtaagtcttgacttgctggatcatagacgacctcctccgatgtacaagcaacgacgctggcagtgtcaatcagctagctcgtctttgcttggaatccaaatttttgtcacagccattcccagttcaattcaatttggcaaaatcatttggcaagctttactaccacaagcaatgaaatgcaagttggctggtcagttttacgaactcgaattccttgctgagctagaaacttcgcatgacacagcatagtttcttggaaacataaggagagcacaggaaattggaatatgcaggacatctcacggatgcactcaaaatcatatctaccaattggcagaggcgacgctagactttggcatgaaggtcttcccagttcccaatgaacttgtaggcaattgcaagcctgacatttgtggcatcctgttgctatgctttttgggttgtaatgtattgcttcccttgctttgaacaatgaacaagtcacacgagctttctttgatctgaagcatctcttgctgtcaaagcataggtgttggctggtcacctgctatggcttttagccagataagagcaagttttacagaaggggtaattgtcacatttaattttattcatgtaagataagagaacatctaattttattcaaagtagtcgtaatctgtgtaattagtc

SEQ ID NO: 16511 - DNA, 3020 bp, Oryza sativa
  ref <308>: DATABASE ACCESSION NUMBER: AK066996
  ref <309>: DATABASE ENTRY DATE: 2001-12-06
aaaaaaaaaccgcaaaatctcaccgaatctttcgccgtctccgaggcttgcacaactcttcttcctcatcttccgccgcgggcggcgacggcggcggcggcggccatggcggcggcggagcagagcgcggagcagttcaggggccaggcgaggctcccggggttcgcggcgccccggcggtacgacctgcggctcgtccccgacctcgacgggtgcgccttcacgggatctgtggacgtctccgtcgacgtcacggcgcccaccaggttcctcgtgctcaacgccgccgagctcgaggtctcccccgggggcgtccagttcaagccccatggcgccgagcaggagctgcacccagcggaggttaccaatgtgccagaggatgagatcctgattatccgcttcaatgaggttcttcctgtaggggagggaactttagtaattgcattcaagggaactctgaacgacaagatgcatggcttctacagaagtgtgtatgaactcaatggggagaagaagaacatggcggtaacccagtttgaacctgctgacgcaaggcgttgttttccttgttgggatgagccctcttttaaggctatattcaaaattactctagaagttccgtctgagaccgttgcattgtcaaacatgccagtggttgaagagaaggtcaatggccttatcaaagctgtctattttcaagaaacaccaataatgtcaacatacctagtggctgttattgttggcatgttcgactatgtggaagctttcaccactgatggcactagggttcgtgtttacactcaagttggcaagagtgcccagggaaagtttgcactagaggttgctgtgaagacactggtcctcttcaaggagtattttgctgtgccatacccactcccaaaaatggacatgattgccattcctgattttgcctctggagcaatggagaactatggcttggttacatatcgtgaaacagctttgttatttgatgagaaacactctgcagctgcgaataagcaaagggttgcagttgtggtagcccatgaattagctcaccagtggtttggaaatcttgtgacgatggagtggtggacacacctatggcttaacgagggttttgcgacatgggtctcctacttagctgcagacaatttctttcctgaatggaatgtttggacccaatttcttgaggaatctacaacaggtttcaagttagatgcccttgtagggtcacatccaattgaggtcgacgtaaatcacgttgatgaaatagatgaaatatttgatgctataagctacaggaaaggagctgctgttattcggatgctgcaaagctatcttggggctgaaacttttcagaaatctctggccgcatacatcgaaaagttcgcatattcaaatgccaagactgaggacttgtgggctgcccttgaagaggggtctggtgaaccagtgaaaacattaatgcattcatggacaaagcagcaagggtaccctgttgttaatgtgaagctcaaggatggaaagctagagatggagcagacacagttcctatcaagcggggctgaaggagttgggcaatgggtggttcccgtcacactgtgttgctgttcgtactcacgtcaagagaagttcctttttaatggaaagcaagaggattttaatttgtcagggcttgtagaatgtcaaaagaaagaagacttctggattaaacttaatgtcaatcagactggcttctatagagtgagctatgatgaggaacttgcatctcgacttagatatgcaattgaagccaacaaactgagtgcagcagacagatatggtgtacttgatgacacatatgccctctgtatggctggcaaacagaagctagtctccttattgcatttgattgctgcgtacaaggatgaaaccgagtatactgtgctcgcccgtgtcatagatacaagtctgagcattgtcgagatggtggctgttgctgctcctgaggggttgggcaagctgaaaaagttcctgattgactttcttgagccatttgcacagagaattggttgggatgctaaaagcggtgagggtcacttggatgcattattgagaggtacacttttaactgctctggcagaacttggccatgaagctacaataaatgaagctgtacgccgatttaacatctttgtggaagatagagaaacaccactactccctccagatgttcgataggcggcatatgttgctttgatgcagacagtgaacaaatcaaacagagccggctatgaatcactattgaagatctataaagaaactgatctgagccaggaaaaagtcagaattttaggttctctagcatcttgccctgatcctgatgttgttcgtgatacactggacttcatgctgtcacctgaggtgaggaatcaggactctatatttttgcttagaggagtcggtgcagcgggacatgaggtggcatggacatggttgaaggaaaagtgggactacatttcagacaccttctctggaactcttctcacctatttcgtttccaccaccgtctcaccgctgcgcaccgatgaaatgggcgacgacgcggaggagttcttcaagagcaggacgaaggccaacatcgcgaggacggtgaagcagagcatcgagagagtgaggatcaatgccaaatgggtggagagcaccagggccgaggctaacctgggcaatgtcctcaaggaaatttctcacgaccactgagacgaccgatcttttcctgcgccgttgtcttagcgtgtaagatgcgtactctccagcaacaagttagtaataagaacttggtgggttagacgacctgttgcatgcccctgatacttgcatctatggaccagtttctccaggttatgtcagtttgatagatgcaattgcaatttgcatggagtatttgatagggacatccggacatgaattgcatgcaaatgttgccctggcagttcaacattgccagaatctgggaaattaatgagcatctttcgtac

SEQ ID NO: 16512 - DNA, 1202 bp, Oryza sativa
  ref <308>: DATABASE ACCESSION NUMBER: AK066997
  ref <309>: DATABASE ENTRY DATE: 2001-12-06
gaatgcctccaccactcctcctgcgcctccgctcacccgcgccacccgccgccgtcgccgccgggtccctctcccggcggcggcggcggcgcagggccggcctcgcgccggtgcgagcgtcgtggcaggagcttgcgggggtgctggtgttctccgccgtgcccttcacggccgtcaaggccctcgccaacagccccctcggcgcccgcctctgccgccgcctcgacgaccggaaggccgccgccgccgccgaggccgacgccctccgctccgccgcgcgccaagcccgcaccgccagctcgtggtatggggatgaacggccgcggtggctaggccccgtgccgtacgagtacccggcgcatctcaccggagagtaccctggcgattacgggttcgatattgcaggcctgggcagggatcccgttgctttcgcaaactacttcaactttgagatcttgcattgtcggtgggccatgcttgctgctcttggtgttgttgttcctgaactgttagatctttttggagtagtccattttgtcgagcctgtttggtggaaagttggttacgcaaaacttcagggtgacactcttgattaccttggaattcctggtttccgaatcgctggtggtcagggtgtcattgtcatcgctatctgtcaagcccttttgatggttggtccagaatatgcaaggtactgcgggattgaggctctagaacccttgggattatatcttccgggagacataaactacccgggaggagcactcttcgatcccttggggctctccaaagatccagtcgcgttcgaagatctaaaggtgaaggagatcaagaacggtcgcctggcaatggttgcatggctcggcttctacatccaggcagctgtaactggcaagggtcctattcagaaccttgttgaacacttgtcggacccgctgcataacaacattttgtcctcttttgtttgagccttcttttaatggacatagcagctgtgtcctgtttggtcacatgaacagtaggacttatgtgcagctagcgtttatatttactggttttgaacactagttagctatttacacatgtaaatatgtaacactggataagaagatttatgtggggtttgtaaatggcatgtcttcaaacaaagtttacacgccgcaagaaatcggccacattgtcaataagactaaattgattcc

SEQ ID NO: 16513 - DNA, 966 bp, Oryza sativa
  ref <308>: DATABASE ACCESSION NUMBER: AK066998
  ref <309>: DATABASE ENTRY DATE: 2001-12-06
gttcctgctacgcatactctcccctctgactctttgcgccaagtcaatctccccgtctgtcttctcggcctcaactcccgtctcctcgctagttcgcccgccgcgccgcctgcgtcgatttcagtccatcctgcggaggggagcagcggtgggtgccgtcctcctgctgcttccgcctccggtaattaggtttgttcgttgagacgacatgcctaagataaagacaagccgtgtcaagtatcctgaaggatgggagcttatagaaccaactctgcgtgatttggaagccaagatgagggaagccgagaatgatccacatgatgggaagaggaagtgcgaagctctctggccaatctttcgtatttctcatcaaaaaagccgttacatatattatctttactatcgaagaaaggagatatcaaaagagctgtatgaattttgtttggaccaaggtcatgctgataaaaatctgatcgcgaagtggaaaaagccaggttatgagcgtctttgctgcctccgatgcatacagacacgagaccacaactttgcaaccacttgtgtctgtagggtccccaagcacctcagggaagaaaaggttatagagtgtgtccattgtgggtgcagagggtgtgccagtggtgattgaagtcgctgtcctgtggctacaaataatctgagagtaatcgctcgagatgtttccttgtgtttgatctctgttaagacaagcaccatatgaccatataatcaggcgattcgtgtggtgtactgtaaactcttgggctatggcatgtgtctggtgagtaatgacgatttctcaacatgttgtgttcgcaaatggttcagtagaaactagctggaagtttgatggattactgtaccacgctagacctacttactacaatactactgtatgaacacttccttgctacagaggtattaggatgatgttgagttatcaggttttct

SEQ ID NO: 16514 - DNA, 3082 bp, Oryza sativa
  ref <308>: DATABASE ACCESSION NUMBER: AK066999
  ref <309>: DATABASE ENTRY DATE: 2001-12-06
ggggggggggggggggggccaaaacccagcccactaaaaccacactccgatccgaaaccgtcttcgtcttcgtctccggccgcctctccgcctccactcttcctcctcccggcggcgagcttcccctctccgcccgcgcccatggcgcccacggttctgatggtcgcggagaagcccagcatcgcgctctccatcgcctccgccctctccggcggccgcatgtctacaaggaagggaagtacagatgtccatgagtttgatgggatgtttcagggttctcatgcatttttcaaagtgacatcagtcattggacatgtcttgagtgtagattttccacctgcatatcagaattgggaagggactgatccgatggatctatttgtggctccagttctgcgatctgaatgcaaccctaaggctcatatccgcaggcatctagctcaggaagctcgaggctgcacctacttggtactctggcttgattgtgaccgagaaggagaaaacatatgctatgaagtaattgattgcactggaattcctaaaagtgaggttggcagaagaattttccgagccaaattttcgtccgttactgagaaagatataatggatgctatgaataatcttgttttgccaagtaaagatgaggcactagcagttgatgctcgccaagaaattgacttgaaggtaggagtagcatttactcgatttcaaaccagatattttcaaggaaaatatggaaatctcgactcaagagtaatttcgtatggtccatgccaaacacctacacttggattctgtgtacaacgctatcagcagattaccacattcaaaccagagaaattttggtccttgaaaacttatgttatcaaggatggtaatgaaattcagcttgaatgggataggaagaaactttttgattttgatgttactgtaatgttccaaaagatggtggccagtgatggtattttaaaagtaaccgacatatcagtgaaggaagagtgcaaagcccgcccgcctggccttaatacagttaatttgcttaaggttgcatcaagtgcactaggtattggacctcagacagcaatgcacttggcagagaggctttatacccaaggattcatcagttatccacgtacagagagcactgcctatccttcatcatttgattttaggagtgcactcgctgcacttgcacataatcctttgtggtccaatgatgttcggacgttactggacactgggtttgttaagcccaaacagggtcatgatgctggggaccatcccccaataactccaatgagattggcaacagaagaagctttgggaactgatgcttggaggctgtaccagtacatttgtcagcattttattggcactgtcagtcctgattgtagatatacgaggacttccattgagttcacttcaggtggagagactttccactgtgttggcaaccgggtcacttctaaaggatttacttctattatgccatggctggctgtgagtgagaataatatccctgcatataaaaagggcgatgctgttagcatccataaggttgacatatatgagggtagcaccacacctcctgactaccttagtgagagtgaattgatctctctcatggagaagaatggcataggtacagatgcatcaattcctgtgcatgtaaacaacatctgcgagcgtaattatgttcaggtgaattccggaagaagattagtaccaacacccctgggaactacattgataagagggtatcagtgcattgatgctgatctgtgcttaccagatatccgaaggtttattgagcagcagattactctaattgcaaaaggtgaagctgaccatcttcaagttgtgcagcatgttcttcagcagtttatgaaaaagtactcgtactttgtgaaaaagattgaaaacatggatgctttgttcgaagcacagttttcacctttggctgactctggacgtttactgagcaagtgtggaaaatgtgctcggtatatgaagtacatttccactcagccaatgaggctgtactgtgtaacttgtgaagaggtctactatcttccccagaacggttccattaagctttacaaggaaatcatttgcccccttgatgggtttgagttgctactgttttcaatggttggccctgatgcaaaatccttcccactgtgtcctttttgctacaacagtcctccatttgaaggcatcgacaaactcttcggtgcactcaagcttgatgacactggcaaggttgggaaaggggctggcatgccatgcttcctctgcctgcaccccacatgtaaacaatctatgatcactcaaggagtttgtgcttgtcctgagtgtactggtaccctaattcttgatccagtcagcgcacccaaatggcggctttactgcaatagatgtaactgcattgtcctgctcccacatgccgctcataagatcagtactacagataagaagtgcccaacatgtgagtctactatcatcgaagttgattttaacaagaaaactaccccacttaaggatggagctactttgcatgagggttgcatcttgtgcgatgagctgttgcattcgctcattgagatgaagcatgggaagtcattttttatgaggagaggtagaggaagaggcaggggtagaggtcgagggagaggaagcagtaggggaagacgggggagctcaagacacgatgatcctaagatgagcttcagagatttctgaaagtttcagggcttaaacctatatgtaagtacatgcaacactagttagaaacttaaccaccactgttgttctttccattttcttcctgtataaaccctagatcaagttatctttcatggttttgctaccatgctaagactgttatttctgtttctattggatgaagttaggcttgtttcccaggttgaagaatggctgtgtagcatcgatcttatgtaaacagtggttggtaaatggtaacagggccaacggttgcaagggttggtgagatactgacaattgagaacttctgggtcgtaatgcgtttaccaacgacacaacacgaggcaaattgctaccc

SEQ ID NO: 16515 - DNA, 1239 bp, Oryza sativa
  ref <308>: DATABASE ACCESSION NUMBER: AK067000
  ref <309>: DATABASE ENTRY DATE: 2001-12-06
gtgccaatcacaagagcaagaagctactgatcttagctgagctagagttccagtgatcattaaggaaagaattagcacttggtcaatcacacataggtaattaagattaattgcgatcgagatcatatcactagctagctagctgtgtgtacggagtacggtgccatggcttccaggacttggcattgctggttgttgctcgtcttcttcctcctctccgacgacgcctccgggcagctgtcgacgtcgtactacgcagatagctgcccgtcggtggagaaggtcgtgcacgccaccgtggcgagcgccatccaggccgagcgccggatgggcgcctccctcatccgcctcttcttccacgactgcttcgtccagggctgcgacgcgtccatccttctggacgacgtgccggcgaccgggttcgtcggcgagaagaccgccgccccgaacaacaactccgtgcgcgggtacgaggtcatcgaccagatcaaggccaacgtcgaggacgtctgccccggcgttgtctcctgcgccgacatcgtcgccctcgccgcgcgcgacagcaccgccctgctcggcgggccgagctgggcggtgccgctcggccggtgcgactcgacgacggcgagccgcagcgaagcgaacagcgacctgccggggccggggagcaacctcaccatgctcatcgcgcggttcggcaacaagggcctaagcccgcgcgacatgacggcgctgtcgggctcgcacaccgtcggcttctcgcagtgcaccaacttccgcgcccacatctacaacgacgccaacatcgacccgtcgttcgccgcgctgcgccgccgcgcgtgccccgccgcggcacccaacggcgacaccaacctggcgccgctcgacgtgcagacgcagaacgcgttcgacaacgcctactacggcaacctgctggtccggcgaggcctgctccactccgaccaggtgctgttcaacggcgggtcgcaggacgcgctggtgaggcagtacgccgccaacccggcgctgttcgccgccgacttcgccaaggcgatggtgaagatggggaacatcgggcagcccagcgacggcgaggtcaggtgcgactgcagggtcgtcaacgacagctgatcatccatgggctgtatatattttcatgtggatttgtggtgacgtatctttgttgtaaatactgtgatgcaataaagcagcgtggtaacatcgttgctattttctccc

SEQ ID NO: 16516 - DNA, 2045 bp, Oryza sativa
  ref <308>: DATABASE ACCESSION NUMBER: AK067001
  ref <309>: DATABASE ENTRY DATE: 2001-12-06
ggctttcttcatttcttcacctgatattcccgtgcgtactaatgagatgacctctcgagctacttaaacaagtagagacacttcttcatttgcagccaatttgattgcttgcaaaattgtgccaaattttcagtactagataagataggatcagagttcgaccagctgggatgcgttggcttctccttgccctgttcttggttgctctggtgagcaacggcgccgccgtccatggcgccttcaacaggttcagcttcccggaggacttcatcttcggcaccggctccgcggcttatcagtacgaaggcgctgtgaacgaaggcggcagagggccgagcatctgggacacgtacgctcacattccaggcaaagttgaagatggtagcaacggggatgtagcagtggacttttaccatcgctacaaggaggatctgaacttcgtgaccgacatgaacatggacgccttccgtttctccattgcttggagcaggatcctgccaaatggaaccatcagtggaggaatcaacaaagaggggattgctttctacaacagcctgattaacgaggtcatatctagagggttgaagccatttgtcaccatcttccatttcgacaccccacaggctctggaggacaaataccggagcttcctcagtgaaaacattgtgaaggatttcgtggactatgcggacgtgtgcttccgtgagttcggcgaccgggtgaagtcatggaacacgttcaacgagccgatgatcttctgcgccggcggctacggctccggcaccaaggcccccggccgctgctcgccgtacgtctccaagaaatgcgcccccggcgactccggcaacgagccgtacgtcgccggccacaacctgctgctcgcccacgccgaggccgtccgcctctaccgccaaaagtaccaggcgacgcagaaggggcagatcggcatcacgcaggtgtcgcactggttcgtgccctacagcgacgccgccgccgacaagcacgccgtcaggcgcagcctcgacttcatgtacggatggttcatggacccgatcgtgttcggcgactacccgggcaccatgaggaagttggtcggtgaccggctgcccaaattcacagccgagcagtcggagttggtgaagggatcctacgacttcatcggcctcaactactacaccaccaactacgctaagagcgttctacgacgcccgagcaagctcaaacccgcctacgctactgacaactgggtaaatcaaacagcttaccgcaacggcgtcccgatcggtccgccggcttttaccaagatcttcttcacctacgcgccgggtctgcgtgagctgcttctgtataccaagaggaagtacaatgacactgacatctacattgcagagaacggcaccgacgaggcgaacaacagcacgatccctatcgccgaggcgctcaaggatgacaaccgaatatccttccactaccagcatctccgcttcactcagctcgcaatcaaggaaggggtgaaggtgaaaggctacttcacgtggacgttcatggacgacttcgagtggggcgacggctacaccggccgcttcggcctcatctacgtcgaccgcgaaactctcaagaggtatcgcaagaagtccagctactggttcgctgacttcctcaagcgatgatgaaaaagaagaagaaatcaactagctcacttcactagcctgatctcctgaataaaatgatctcctgaataaaaaagttcctgaataatcttttggcctcaatgattcgactggctgcatgtggccattgtacttgttagctctgagaaataaaagtgcagtcttgactctcgacgaatataagcaatttaacttgtgtactactactgctgacaaatactggggaatataagcagtaattcagagtttcagagacatgaatgatcaattgtaagcagtatttcagcagtagtttagagacatgtaattcagagtttgcttgtacacaaactcagtaattcagagtttcagagacatgaatgatcaattgtaagg

SEQ ID NO: 16517 - DNA, 3674 bp, Oryza sativa
  ref <308>: DATABASE ACCESSION NUMBER: AK067002
  ref <309>: DATABASE ENTRY DATE: 2001-12-06
gttattttcttcggttagttgttgcggcctcgctgggatttggggattttcggcccaatctcgcttgtggcagtcccctcccgccgcagcggcggttctcgataggcggaggcccctcccctgatctcgcgtggagcggaagggagatccatgatccatctagggtgatttgtttttactggtagttttgatctgttgttccaagaacgattttgttctttgctgtgtgcaatcaaatacgtatctcagtatttagtaagacacccaaatccatcatatcacttgtgtggatttaatcgatttagttctaatagcagcttatttccccaaatttttggttcacgccccactttaagacttctcctaagagatggggtgcagtacaagattgttaattcgatgttagaacagccatttacatttcttctattgattttcagatgggtgaaatattgatgatgtatttgtattttagaggggggtatcattaccctgccattttgtagctggagttatgatttttctctctgtcgagttgaaccaattttagttctttaacagtagtagtaggtcataggtactgatttccttataatttacaaagacaaaatatctcatctttagacccccatttgttgcaagttcatatattctgttttgaatcaactctagcaagcggtggatttcacgataagtagaaagtactgattattatttgcacttgaataattatatctggaagctagaattgagtattcaaggaagcatgctctttgaagaaagtattcacttgatccagtccagtttgttgtttacttctacatttctttctttggcaatatatttgggagcagcttgtgaatccagtgaaaatggtccagaccatcattgttacttacacttcatgacctcgttccttcaccaaccagattaaggattccagcatccacctccatgttggccatcatcttgtgggttctggtgccaagcacctgctgcatgttactacagaaacagttccccttttcttttcttttttactgcagaccaaattttcctgctaagtttatttgttctttctaaaacaaatcttacttactggttcttgttgtaaggcagctcttttcataacatctctgtatcttgtaggaagtgttggagaattttaatcataaattgacatgtaaaggagaggaggcaagctatctgtaactgaaatagtttcggtgggataccatggttgacataaaccctgatcacatctttgaggttccggacacccctgaccgaatacagcagtcaacatgccctgtatctagcccagctgctaggagaggtattgcaaaagcagctggaactccattaccatcgcgaagaattaaatttaagatcacaaataactccatccagggtcaatcaagtagaggcaatgcaagtagtgtgtcgcctgcacctttagatgctggcgatatttttaaacaagccgagttggcacgattgctgccagtggcagaagatcctgaagcaagatcatccttgctaaaatcaggtcggacgatagagacatctgttgagaatgaaaaggtgccaaaaaaatctggtttggatcagagcatgaatatttcaaacaatataaattgcaggggctctggagaaagggaccgtagttgccaaatcagaaaaggggatattagtgcacgggatgccaatagctgcaatgctgactttctctgtttaggatcaggtcttcctactactacggtgggaaaaccacgaaacagaatggggactatcacctttaagaagccgaaggaagtagtaggtgctaatgtctgttcagtatcgagtcctagagagggcaaaggggaagagatcactgacaagggcacaacaggaatttcaagctctacaccaagcattgttcctcaaaggcatgtgggccaaagaaagctggtgcggaatggttgtatttctccctccaacatagccaaaagaagtctgaaggttgatgaaaagcgagaaatatgctctacaagtggactcttacactatccagatactcaggttgatgcttctgggaagggaaatgtgatagatcttactgatagttcacctataataagaaggcagggaaacactgcaactgacatggaaaaaaggtcagggagaaagtcggcaataggcagagctggggagacggtaattccactggctgcaaatcaagtgaacagtattttttctgaaggtaacaagaataaaggaaaagaaatttcccatgatgtcgtgggtgctaagcagtctggagaggcttatatgaggagggtttgtccaagatccatgggagattcttcttccgttgcaaacaatgatcacaccggtataggttctgagcaaggttggagaacaacgcacaataatactagtaatatacccatgccactatcaggtaagatgaccaatagttgtggaagagaatctggatcttctgaacagtctaatctggatcgagcatctgcagcaggagacagcaataactcaattgagggaggagacaacaataactcaattggtggagcaaaaacattgcagactgctagttttgttaatagaacaataaggatcagtagcagaaagaggaagcgcatcgcaagttcttaccatcctggtgaaagctctagctctgttgatgttgatcaacctagagttgcatcatcagactcaacagctgctagaaatcataccactcaccgtcatcatattcctgtagtagatattgatgacatatgctctcctgaagtaaggcctagtttgagtgggattggtagcagcaatcggacctcagtggatcccaacataagagaacagttggagtctgatgagttattggctcgccaacttcaggagcagctttacaatgaaactcctcatgttgttcccacagaagagattgatgcgatcatagcaatgtcacttcaacatgaagataatgcgcagccgacatctagaactgcgaggcggttccaaagcactacaagaggtccaagggtattgcgttcaactgttcctcagcatgctaatagggttcgatatgactcaaacaacagaagaataatttaccagataccctgctgcacatattcaacctaatattgatctaaatgattatgatgcactgcttgcattagatgaaaataaccaccagcatgctggtgcttcagaaagccagatcaataatttgcctcagtcagtaatccagtcaaatattgaagagccgtgtgcagtttgccttgataatccctctattggtgatacgatccgccgcttgccatgctttcacatgttccataaagaatgcatagacgaatggctaagaaggaagaaactatgtccagtttgcaagtctgggatcacataaaggtgacaattcggttccatgaatattctgcccttagactcaagaaaacagaaggaagtcgcctgcaacagtggttgcgtttctatctttagacgacagtggtatcggcgggaggttgcgcaatcttgtagagccttgttctaattgccttcggtgctaattctctgttttgtgggtttaggcacgatattttgtatatccatgtgttttattcatcaactggcataaaaggtcattatcgattgattgcttatcagcc

SEQ ID NO: 16518 - DNA, 982 bp, Oryza sativa
  ref <308>: DATABASE ACCESSION NUMBER: AK067003
  ref <309>: DATABASE ENTRY DATE: 2001-12-06
ggcttccactcttctcctccacctccaagtactccgcatccatccatggccaccaccgccctctgatccgatcgatactgatcagccagtagctatgctgggttcggaccagctcgagcaccgcccggcgccgtcggctccccgcgccgagccggacgatgtcgccgacgacgtggaggtggaggcgttccgggacatccacccggagccgtcgcctccgcatctaccgccgccgccgctcaggcagccgtcgtgggacgccgcgagccaccgctcgctgtcgtcctccggcgcgggcggcggcggcgacgtcgagctgttcgccaccatgagccgcgagttcaccgccatggtggcggccgggtcgtcgtccgcgcccagccccgacgttcccggcgacgcccccgccgccgccgacctgaacctgctgcagctggcgcgcatcggcgagaacgagccggcggccgaggcgaacgcgctcgccatcgtgccggcggcggcgggcagcggcccgccggcgccggtggagcaggtgaagaaggaggaggtggaggcgaaggtggcggcgtggcaggcggaggaggtggccaagatcaacaacaagttcaagcgcgaggaggtcgtcatcaatggctgggagagccagcaagtcgacaaggccaccgcctggctcgccaagatcgagaggaagctggaggaggagcgggcgaaggcgacggagaaggctcgcaacgaggcggcggcggcgcggcggaaggcggaggagcggcgggcgtcggcggaggcgcggcgcgggaggaagacggcagaggtgctcgaccgtgccaacttctgcaaggccgccggcagggtgccatccaagcgctccttcttctccttctaaagttctaaccaaagctagctagccttgctcaattatatcatctctagctagctaattatgattattacttgttttctacttaattgatcaatcaatttc

SEQ ID NO: 16519 - DNA, 2485 bp, Oryza sativa
  ref <308>: DATABASE ACCESSION NUMBER: AK067004
  ref <309>: DATABASE ENTRY DATE: 2001-12-06
ggcgtgctctgtatcattattaccatcccgatgcccacctcgggcccggacgcgatgcagccggcgctgcgacggcggcggcggcgccaaggcttcctcctccccttcgcctgcctctccgccgccctcatcgccgctgccctgctccccggcgccgctttcgccgatggcgtcacgccctccgaggcccgccggctccgcgacgaggtcaaagatatgttctatcatgcatttgatgggtacatgcaacatgcttttccacttgatgaattgcggcctttaagttgccaaggagaagattcacttggtggctatgcacttactcttatagactctttggataccttggctttactaggggataaggagagatttgatgctgccgtggagtgggttggtaagaatgtccgctttgatattaataaaactgtctctgtttttgaaaccaacatacgcattcttgggggtctgctatcagctcacctgattgccagtgattatgcaactggaatgagaattcaatcttatgatgatcagttgcttcatttagcggctgacttagctcaaagattgctacctgcatttgacactccaacaggtattccatttggatcagtaaatttattgtatggagtcgatgaaaatgaaagcaagataacttcaacagctggtggtggcactttgacactggaatttggtgtcctgagtcgtttgactaatgatagcgtttatgaacgagttacaaaaaactctgtgcgtggaatatgggcacgcaggtcgaaacttgaccttgttggtgcccatataaatgtatttactggtgaatggacacagaaggatgcaggaattggcacaagcattgactcattctatgagtatcttctaaaggcgtatttattatttggagatgaagaatatttgtatatatttcaggaggcttacaaggctgccatgcattatctccatcatgatccctggtatgtggaggtaaatatgaattctggtgctactgtttggccactattcaacagtctccaggcattctggccaggacttcaggtgttagctggagatgttgatcctgccattcgaactcatgctgccttcttcagtgtatggaaaaaatatggcttcaccccagaagggttaatcttgctacatccactgttcagaatggacaaaggagctacccgctgcggcctgaattgattgaaagcacatattggctgttcaaggctactagagattataggtaccttgatgttggaagggatatattagcaagccttcaatatggtgctaaatgtccatgtggttactgccatatttcagatgtagaaacccaccagcaggatgaccacatggagagttttttccttgcagaaacagtcaaatatctctggcttctttttgatttagctgcaggccctgataatattgttgaaaatgggccatataaatacatatttagtacagaaggtcatctgttgcctgctactcctcagataaccttgttagatgagcattgcttgtatgctggagcattctgcaatggtactgcaggccatggatatggtaccggtgatagttctaataagcatcaaaatgcaaactctgttccgttcgatgatagtcgaacaccttccgatcaatctttatccaatattttgtctacgacaagagggtacatcaagggagtttgtccaggattaactcatgcccagaaacttggcatatcatactctgccgaggaggataactcaatacagcagaattctggaagtagtgagaatcttgatgaatcacacgtgatcaaatccagtgtccaagctcaatcaagttctgttatattgatatcgcatccagtcgcaagccaaactgaggagcctacgtcgggcagaagtcagtacaatgcaaacattgtggcaactgctgagtctgtagggactgatactgccggcgcctcatcccaccccgaggatcttgttaaggaaactgagagcgtctctgaacagaaagaaatcaatgacaaagagatcgcttctcagggtagtcaaccgaccgaaggaagatacctgacctaatgtaggaacgaaaactttcacttaaactggataccatcatttcagggcttaccatattacaagtctgcacgtcaggttacaaaacaacaagtgttgatacaaggcccatagatcagtacctcctgaccacagttgaattatagtgaaaatgaaaaatctcgcaatgggactacccttgagtggatctgtggtctcgatacacaacatttggatttaccacaaggcatcagctgtgttctttctgacaaatttagaacgagcattccttgattcattctgtttgtaactttgtactggtccgatagattcttctgatcaaatagcggctgtatagtattgtacactagagcaatcaacaaactgaatgtccaaatgactcatacatgggccagattccatcc

SEQ ID NO: 16520 - DNA, 1088 bp, Oryza sativa
  ref <308>: DATABASE ACCESSION NUMBER: AK067005
  ref <309>: DATABASE ENTRY DATE: 2001-12-06
ggccctctaaaaccagacactgctgctgcgtgtctgtgtgccgcgccacctatgcacctcgcgcgcgcggcaagcgctcctcctgccggcgccttcccctgtccctcgcttgcctccagctgcagcagaggagcgcgtgtgcgtgtgtgtacggtgcatgagctttccgctggtgtgcttctgccgccagatcccgcggcccatcgtcgcgctgttcaagctgctccaggccgtggcgctggccttcgtgctgatactctgcttcctcggcctctacgagttcccctacaccgtcgaggaccacgcgccgctcatccacggccgccgccgcgatcccctcggcgacgacggcctgcagcccgaggcggtgaagcggggcctcccgctggtcgagtacatgcaactcgccgacctgtcggcggattgccacgacggcgagagcggctacccggccacgtgcagggtgtgcctggagaggttggaggcgacggacgaggtgaggcggctgggcaactgcacccacgccttccacatcggctgcatcgaccggtggatcgacctgggagaggtgacgtgcccgctctgtcggtcccacctgctgccacgtcaacgaaggggcctgcttggcagtaggcggttcggctagattgtctcgcggcacggcgccatgggggcagtttcgtcatttcaggctgtacatctcgccattgttgctggatgggtgcaggccaaccgcagactgattccgatcaggacgactaaccaccaagcagtaccggtgctaatcaattgatagttgtgctcacgcgaaaattaatggcattttggaattccacgggtgtactttaacgcatagttgcatccgacgagctaggtaacgtgcacccgtttagagcgagtacaatggcaggctacaagtaagctataagcatacgtggaagagagaagagataagagagaaggaaaacaggctatatatttacagccagcttcagcacggaatctaatacattgtgcgtgtatgagatgtaggatcatatattaatagtgtactactccctccatttcacaatataagtcattctagc

SEQ ID NO: 16521 - DNA, 4009 bp, Oryza sativa
  ref <308>: DATABASE ACCESSION NUMBER: AK067006
  ref <309>: DATABASE ENTRY DATE: 2001-12-06
gattgccgcagcagcagcagcacaaatcaagtgatccgtagttgctgcttcttcgaattctcctctcaattcaacctgcctcgatctcgctctcgctctcgctctctacccgagtgcaccattaaggaggatgagtgccgcggcgaccaccggcggcggcggcgagcggcggagcctccgtggcatgttcaagttcgcggaccgggtggacgtgctgctcatggcgctgggcacgctgggtgccatcggcgacgggtgctcgaccaacctgctcctcatcttcgccagcgacgtgatgaactcgctcgggtacgcgcgcgccggcgcccacggcggcgccgccgccgccaccggcgtggacttcatgcgcgaggtcgagaagtcttgcctgaatttcgtgtacctggcgttcgcggtgctggcagtggcgtttatggaggggtattgctggagcaggacgagcgagaggcaggtgctgaggatcaggtacctgtacctgcaggccatactgcggcaggaggtgggcttcttcgactcgcaggaggccaccacctcggagatcatcaacagcatctccaaggacgcctcgctcattcaggaagttctcagtgagaaggttccactctttctgatgcactctacagttttcatctctgggctggcattctccacatatttctcctggaggctggctctggtttcttttcctctggtcctgctcctgataattccagggctcatctacggcaagtatctcctgtacctctcccgacaatcgcgccacgagtacacaaacgcaaactcgttggttgagcaagctcttggctctatcaagactgtctactctttcactgctgagaaaaggataatccagagatacacagcagttcttgacaagacgatcaagctggggattagacaaggtattgcgaaaggtttggctgtcggattcacgggcctttccttcgccatctgggctttcctcgcttggtacggcagtagactggtgatgtaccatcatgaaagcggaggaaggatatatgctgcagggatttccttcgttttaggcggcctatcccttggaatggcactccctgaactgaagcatttcacagaagcgtcggttgctgccacaagaattctcgatcggataaaccgtgtgccagagataaatgctgatgaccccaagggacttattttggatcaagtccggggagagcttcagtttgagtctgtccgctttgtttacccatcgaggcctaacatgacggtcctcaaagacttcaacctccagattcctgctgggcaaactgttgccttggttggatccagtggcagcggcaagtcaaccgcaatagcattggttcaacggttctatgatgccactgaaggaactgtcaaggttgacggtgtcaacattaaagaactccagctcaagtggatcaggagcaagatggggcttgtcagccaagatcatgcactcttcggtacatccataaaagagaacatcttgtttggcaaaccagatgcaacaatggatgaactgtatgcagcagccatgacagcaaatgctcacaacttcataagggggcttcctgaggaatatgagactaagattggcgagcgtggagcactgctatctggtggccagaagcaacgtattgccattgcacgggcagtcatcaagaacccggctatacttttgctcgatgaagccacaagtgcacttgattcagaatcagaaaagctggtgcagcatgcacttgaccaagcatctatgggaagaacaacactggtagtagctcataagctttccacagtgaagaatgccgatcagattgcagtggttgatgggggcactatagctgaaattggcacacacgatgaactgattaataagggtggcccatattcacgacttgtgaaactgcagaagatggtgagctacatcgatcaagaaggtggtgaccaatttagggcctcttcagtggcaaggaccagtaccagccgtctcagtatgtccagagcaagtccaatgccacttacaccaggtatttcaaaggaaaccgattcctctgtttctcccccggcaccatctttctccaggcttcttgcgatgaatgcaccagagtggagacaagcagtcataggaagtctctctgctttggtatatggttccttgcagcccatctatgctataaccatcggaggaatgattgctgcattttttgttcaagatctcaaagagatgaatgcaattatcagccgctatgccttgattttctgctcattgtcggtgatatccattgttgttaatctacttcaacattacaattttgcttacatgggagagcatctagtaaggcgtatcagagtccaagtacttgaaaagatcttaacctttgaggcagcatggtttgatgaagaaactaattcaagtggttcactgtgctctcggcttagcaatgaggcttctcttgtcaaaacccttgttgcagatagaatttccctactgcttcagacagcttctggaattataattgcagtgacaatgggccttatagtagcttggaaacttgctcttgtcatgatcgctgtacagccaactacgatgatatgctactatgccaaaaagatagttctctcaaatgtgtcaagggacttagcaaaggctcagcaccaaagtactcagattgctatagaagctgttacaaccacaggatggtgacctcttttggatgctcatcaaaggttcttcagctctttgagcatacacaagaggaaccactgaagagagcaaggaagaaatcatgggtggccgggatcaccactggactgtcaccttgcctttcattcttgtcatgggctcttgacttctggtatggtgggaaattggcacaatctggggagatctccgcaggtgatgtcttcaaaacattttttgtcttggtgagtacaggaaagttgattgctgatgctggcagcatgacatccgacctggctaagggagcaaatgcagttgcttcagtgtttgaggtgctagacaggaaatctatctctccacaaaattcacaggtggaaaaggacaatcagaagaacaaaatacaaggaaggatagagttcaaaagggtagattttgcatatccgacaagaccacaatgccttatcctgcaggattttagcttggatgtgaaagcaggaacaagtattggtcttgttgggagaagcggctgtggaaaatctaccatcattggtttgatccagaggttctatgatgttgacagaggggctgtaaaggttgatggtatggatgtgagggagatggatatcctttggtatcgaggatttacagcccttgttagccaggagcctgcaatattttctggtagtgtcagggacaacattgcttttggtaaaccagaagctgatgaagacgagatcgtggaagctgctaaagctgcaaatgcacatgaattcatatcatctctaaaggacggatatcatactgactgtggtgagcatggattacaactatcaggagggcaaaagcaacgaattgcaattgcgagggcaataatccggaatccagcaatacttctacttgacgaagcaacaagtgctctcgatgcacagtcagagcaagttgtgcaggaagcccttgatagaatcatgtcaggaaggactacaattgtggtggcacatcgactgaacacaatcaagaatgtagattcgattgccttcttaggagagggtaaggtagtggaacgtggtacttatccacacctcatgagtaagaaaggagcattctacaacctagcggctcttcagaaataaactgcttgtataatgtaaagtactgccataagtgacatgacaacttaatatagcataatatcagtgccacttaacaagttttggggtaatttcttcttcttctgtcatcagaagatgtatcttacctagaacttgtctttcaagaggtctaagatatgaataaatgcaaactagt

SEQ ID NO: 16522 - DNA, 2373 bp, Oryza sativa
  ref <308>: DATABASE ACCESSION NUMBER: AK067007
  ref <309>: DATABASE ENTRY DATE: 2001-12-06
gtccacaccccccccaacaacaccaccgcccatttccctttctcttcctcttcttcttccttctcctcctactcctctgcgattgacaaagataagtgaagtgagcaggcgccaatgggtgcttttcttctgttcgtgtgcgtgctcgcgcctttcttgcttgtctgcgccgtccgcggccgccgccggcaggcgggctcgtcggaagcggcggcgtgcggcctgccgctgccgccggggtcgatggggtggccgtacgtcggggagacgttccagctgtactcgtccaagaaccccaacgtgttcttcaacaagaagcggaacaagtacggtcccatcttcaagacgcacatcctgggatgcccctgcgtgatggtgtccagcccggaggcggcgcggttcgtgctggtgacgcaggcgcacctcttcaagcccaccttcccggcgagcaaggagcggatgctgggtccccaggccatcttcttccagcagggcgactaccacgcccacctccgccgcatcgtctcccgcgccttctcccccgagtccatccgcgcctccgtcccggccatcgaggccatcgcgctccgctccctccactcctgggacggccagttcgtcaacaccttccaagagatgaagacttacgcgctgaatgtggcattgctgtccatcttcggggaggaggagatgcgctacatcgaggagctgaagcagtgctacctgacgctggagaaggggtacaactcgatgccggtgaacctgccgggcaccctgttccacaaggccatgaaggcccggaagaggctgggcgccattgtggcccacatcatctctgcccggcgcgagcggcagcgggggaacgacctgctagggtcgttcgtggacggccgcgaggccctcaccgacgcctagatcgccgacaacgtcatcggcgtcatcttcgccgcccgcgacaccaccgccagcgtcctcacctggatggtcaagttcctcggcgaccaccccgccgtcctcaaggccgtcaccgaagagcagctgcagattgccaaggagaaagaggcgtcgggcgagccgctgtcatgggcggacacgcggcggatgaagatgacgagccgggtcatccaggagacgatgagggtggcgtccatcctctccttcaccttcagggaggccgtggaggacgtggaataccaagggtacctgatccccaagggctggaaagtgctacctctgttccgcaacatccaccacaaccccgaccacttcccctgcccggaaaagttcgacccgtcccggttcgaggtcagcatcacgaacccactcttccgtgtttttgttcccttccctccctttcctttcccggtgcggccgacttcctagccaagtcggtccgcggtttgcgagcagtggccggtatgggttttcctgaccccgcgtccgtcccgtcactgttgcaggtggcgcccaagcccaacacgttcatgccgttcgggaacgggacccactcgtgcccgggcaacgagctcgccaagctggagatgctcgtgctcttccaccacctcgcaaccaagtacaggtggtccacgtccaagtccgagagcggcgtccagttcggccccttcgcgctgccgctcaacggcctccccatgagcttcacccgcaagaacaccgagcaggagtgaaaaccgaacagggagacaaaaagaagaagaagaatactagcatcagctaagctggggaaagctggcaaaaccaacatcaacggcgggcagcggcgccacgcagcgcgcgcgagtccattttcgcggcggtcaccgtccggggggacacctgttggcgccgcagtgggagcgggagaccgaacggtggattccgtattagcacggatcatcagagtccttgtacagattcttcagctaggaccacggttggcaatcgagaggaggagcagaggagttgatgaaaaaaaaccaaacactacgtagacatctgagctagggagcgccacaaagaagtggcccttaattgtaaaaccaaccattttttatccttttttgcttagttttttttttggccaacaactataggagaagagtagagaagagaagagaaattggggagaaaatacagggaggatgaagaggccctgattgggatgtaagctaggttgcccgcctgaaagcaggctggcatgcagatgcagctataggtcgaataatcgaggcgagcgatgatggacggatggatcgattcatcgatcgccagagtcaaaagggaagaacgtcgtgatcccccgcgggctaagccaggccacgggagagcgactcctctgtaccgtttcgtccaactcaagagaaaatgaccttcttg

SEQ ID NO: 16523 - DNA, 2586 bp, Oryza sativa
  ref <308>: DATABASE ACCESSION NUMBER: AK067008
  ref <309>: DATABASE ENTRY DATE: 2001-12-06
gctttctctctacccacccgctaccaatccccttcgctccgctccactcctccggatctccgccccgccccttccatctccggcgccggcgagaatggagctgctctgcatcgggacggcggacaccaagctggacgagctgctcttcctcgccgcccgcctccgctccaccctcgccgccacctcctccgcgcaggttcaagtaagccttgtggatgtctccacaactaagaaggtgacatcacaagattttaagggcaccacatttatctcaagagatgcagttctttcgtgtcatttaggtgtcgatcaacatgaacttcctagtgacagaggtgaagcaatcacactcatgtcagaggctctccagagctttctaaaaagaagatatgaaagtggtactctgctaggtgctgttggattaggaggcagtggaggaactgccctaattgctcctgctctaagatccctgccactcggagtgcctaagctattgtatctactgttgctagtggccaaacggcaccatatgttggaacatcggacttggtgttgtttccttcagttgttgacatatgtggcataaacagtgtcagccgtgttatattatctaatgctgctgcagctgttgctggaatggtgcacggaatattaatggaatccaatgaatctgatgaaactgccacaaaaccaactattggtattacaatgtttggtgtgacaacaacatgtgtaaatatggtcaaagaaagactgagcaaagaaggttatgagacacttgtattccatgccacaggtgtaggaggaaaagcgatggaagaactagttaagggaggtttcatacagggtgtattagatataacgacaacagaagttgcagaccacattgttggcggtgttatggcatgtgatgatacaaggtttgatgcaattatcgacaacaaaatccctcttgttctcagtgttggagccttggatatggtcaactttggagctcgagatacgatacctcctgatttcacaggaagaaagatacatgtgcataatgagcaggtttcactgatgcgaactacagtagaagagaacaaaaaaaattgctgagtttatagctgataaaataaacaaatcttcatcgaaggttattgtttgcctgccacaaaagggcatctctgcaatagatgcacctaaaatgccattttacgatctggaggctacatctacgctgctggatgaattatgtagccgtatagagaaaactgacaacagagaggtcaagatgcttccatatcatataaatgatccggaatttgctaatgttttggtggacgcattcttgagtatggatgtaaaggcatctaatacaataagtccagaaaacagcatggtccaaactaatcaagatgtaaatacaaaagaatattgttcaacacagagaacttcagatagttctatcatatggagatctccagtagattttcctgatgcaagaccagaaactttgcaaagacaaagtcagtattacataaactaaagcaacaaattgttgagggtactcctgtcattggagctggtgctggcactggcatatcagccaagtttgaagaagctggtggagttgatcttatagttctgtacaactccgggcggtttcgcatggctgggaggggttcattggcaggactattgccatttgcagatgcaaacgctattgtacttgagatggccaatgaagtgttgcctgtggttaaaggagttccggttcttgctggggtttgcgctactgatccattccgtagaatggagtacttccttaaacaactagaagctattggattttgtggtgtccaaaatttccccactgttggtctttttgatggcaattttcgacagaacttggaagaaactggaatgggctacagcttggaagtggagatgatctcaagagctcacagcatgggttttttgacgactccatatgctttcaatcctgaagaagctgctgccatggccaaggctggagctcatataatagtggcacatatgggtctaacaacagctgggtctattggggcaaagactgctgtcactttagatgacagtgtcaaacgtgttcaagccattgctgatgcagcacttgggattaatcctgacattattgttctgtgtcatggaggtcccatatcagggccgcaggaggcagagtttatcctaaagcgcactaacagggtccatggattctatggtgcatcaagcatggagcggctaccagttgagcaagctatcacaaacaccatgagggagtataaacggatttccataaaataagaatgatagttcagacttcaaatatgtcctttgctctacatggtactgatcttcatactgattcaaagaacaataatggaagaggaagccaggtgtttgtgcattgttgtaccatatgcggcacatgtactcgtgtatttcagtcggaataaagaatgataagcgaatgatttcgtgcttacttaataactatccatactaagacgataagttactgtaaccatgacaaaatctgtgataaagaccgaaattttacggacc

SEQ ID NO: 16524 - DNA, 2628 bp, Oryza sativa
  ref <308>: DATABASE ACCESSION NUMBER: AK067009
  ref <309>: DATABASE ENTRY DATE: 2001-12-06
gggctggtcgaggggagggcgcgagtttccgtggattccgcggctctaccgttcacagccgctcgccatgacgccatccatgatggcgcaagaacggggggagccgctcctgcagagcggcaatggcgccgccggcgggggagccaaggggtggccgccgccggcgctggccaggaccgtgctcaaggtcctcatgtgggcggtgttcctcacctgggccgccgcgatcttcttctacccgaccaagcccgcgcaggcggcgttcgagggttggatggcggccaccaagcagtccctctttggcatcaccgggagtattttcctcgcattcagcgcgccgattctgatcgtcgcggctctggcgtacgtctacatctccgccttcccgagtgaccatatccatgtggagaagaacaagctgaagacactgtgtttccggctctggactttccctgttcttgtggacgggcctttcggggttgtctccgcggtagaattcatcggaatcgtcctgtttatcgtctatgttgtctattcaatgacctattacgctgtggagagcgtgagtctcatctcaaaatttggccagatttcgcttacttacagcgagttgctattgtacattattggcctccggttcggatcgatcgggttgttttgcatggctttcctgttcctccctgtctcaaggggttcagttcttctccggcttattgatattccatttgagcatgctactagataccacgtctggctcggccatctcacaatggctctcttcacattacatggcctatgctatgtgatcgcatggtctctcgaggggaatctacttggagaattggctgcatggaaagaaatcggagtggcaaacttacccggtgtgatcagcttggcagccggcctgctaatgtgggtgacatcactccacccagtgaggaagacatacttcgagctcttcttctacacccaccagctctacataatcttcgtcgtgttcctggcatttcacgttggcgacttcatcttcagcttctcggccggacccatcttcctcttcatgctcgatcgcttcctgaggttctggcaatgcagggccaaggtggacatcatctcggcctcatgccgcccttgcggaaccgtggaactagtcttctcaaagccagcaagtctccggtacaatgctctcagcttcatcttcgttcaggtgagggagctgtcgttcttggagtggcacccgttcagtgtgtcttcgagccccatggatggaagataccacatgtcgatcctgatcaaggtgcttggatcatggactgaaaaactgaggggcatcatcactgatgcccaggaacagggcaggaatggctctgagtcagagaccggccggatcaccgcctgcgtggaagggccttacgggcatgaatcgccataccacctgatgtacgagaatctcatcctggtggccggaggcatcggcatatcaccgttcctggcgatcctgagtgacataatccataggatcgaggaaggcaaaccatgcatgcccaagaatgtgctggtgctgtggtcggtgaagaagtccaacgagctctcgctcctttctgccgtcgacgcgcagttcatcagctcgtctgtctctgacaagctacatctcgacatccaggccttcgtgacccaagaatcccaacctccattggaagaaggcattgttggggatgaccagaaggcgaccggcatgttcgtcaagaacgggacgaccatgtccgggctggtcggcaccgggaacaacttctgggcgggcatgtacttcgccgcgtccacgctgggcttcgtcctggcgtacgcgctggcgcaggcgtactacgtgcggcgcctcaacgtgttcgcgtggtggcacctgggcctcgtgttcgtgctgtgcatggccgccggcgtcgcgctccccggcggcctcgtcgtcctcctgtggcacctgtccgagaagcggaaggcggaggacgacaggtgggacgccgccgccgccgccgtcccgcgcgcacaggacggcgaggaggaggccgagcagacaacgaacggcgccgacgcggccgacggcggcgtcagcctcgccgcggtgaagacgacgcggtacgggtgccggccacagttcgaagcggagttcgcggcgttcgcggagaaggccggcggcggcgcggcggacgtgggcgtgctggtgtgcgggccgccggggctgcaggcgagcgtggcgagggagtgcaggtcgcacaacctcggccgccgcggcgggaggcgccgccgcgccggcgccgtcttccatttcaacagccacagcttcgacctgtagtctgtagaccagagctagtacgacactctgcgcaggtggcgaacatattaatttttaattgataatagtagttaatatgtactgtataaaataactaaagattaaaattatagccgaggccctgcaccaatagtaaatccatccatccatcctgtttcctgtacagtacactacacatacgacaagctcgccgtcgtcggcgcgtgcatgtatatattctgcatgatcggaaacgtgagcatacgtgaaggcattacgaattcacatacgtcatatgaagtttc

SEQ ID NO: 16525 - DNA, 1273 bp, Oryza sativa
  ref <308>: DATABASE ACCESSION NUMBER: AK067010
  ref <309>: DATABASE ENTRY DATE: 2001-12-06
gagagctatcccaattccaattccaattcacaattcccaaagtggaggagaagatggtggcgccatcgcccgacgccgggaagccgctggtgatcctgctgcggccgctctacccggagttcgctgccgcgctggacggccgcttccgcttcgtgcttgccgccgacgccgacgagggcaacgcagcagaggcgagggccgtgctcgtgccggctctgacgcctgtgtccgcagatctcgtggctaggctccccaagctggagatcgtggtggccacgtccaccggcgttgaccacatcgacctcgacgcgtgccgccgccgcgggatcagcgtcaccaacgccggcgaggtgtttgcccccgacgtggcggactacgcggtcgggctcgtcgtcgccgtgcttcgccgcgtggccgccgccgaggcctacctccggcgaggcaggtgggcggcggacggtgactaccctctcgcgaccaaggtgagcggcaagcgggtggggatcgtggggctgggaagcatcggcggcctggtggcgcggcggctggcggcgttcggctgcgtgatcgcctacaactcgaggtcaccgaaggcgtcggcgccgtacaagttttaccccagcgtgcgggagctcgccgcggagagcgacgtgctggtgctgagctgcgcgctgacggaggagacgcggcgcatggtgggccgggaggtgatggaggcgctgggaagggcggcgtgctggtgaacgtggggcgcggcgggctggtggacgaggccgagctggtgaggtgcctgcgggaaggggtgctcggcggcgccgggctggacgtgtacgagaacgagccggaggtgccgccggagctgtgggggatggacaacgtcgtgctgtcggaccaccgcgcggtgatcacgccggagtccatccaaggcgtcgtcgacgtcgtcaaggccaaccttgacgccttcttctccgggaagcctctcgtcagccaagtgcagctctgaacgtactacaaacaagtacactcagtttctgaacctcaacctgcattctcaacctgaaaaataacaagggacaagttgttgcttattcatgtttgtatgtatgcatatgctgcgatttcgatctgagccaatcatacataaattgggaggataatctgagatgattacacattgttgtgttcactgatttgcaagcagccctgtatcttgttgttgtaacacacatcagagtaaactcaatcaatactccattcttgtggagtattattc

SEQ ID NO: 16526 - DNA, 1494 bp, Oryza sativa
  ref <308>: DATABASE ACCESSION NUMBER: AK067011
  ref <309>: DATABASE ENTRY DATE: 2001-12-06
tagcggaagagccgccggggcaccggagattaggaggacatgtggtgcgcctcgtgcctggcgtccgcctgcgcgggctgcacctgcaacctgtgcgcgtcagcgttgtccgccatctcccgccgctccgctcgcctcgcctattgcggcctcttcgcggcctccctaatactctccttcctcatgcgccagttcgccacgcctctcctcaagcaaatcccatggataaatacgtttgattatacacaaccggatgaatggtttcaaatgaatgctgttcttcgtgtcagccttgggaacttcttgttttttgcaatatttgctctgatgatgattggtgtcaaagaccaaaatgaccggcgtgatgcatggcaccatggtggctggattgcaaaaattgttgtctgggttgttctcatcgttcttatgttctgtgtgccgaacgttgttattactatttatgaggtactgtcaaaatttggatccggcttgtttcttctggtgcaggtcgtgatgcttttagacttcacaaacaattggaatgactcatggattgagaaggatgagcaaaagtgggaaattgctttgttggtagtaactgtggtttgctatctctctacatttgccttctctggtttgctcttcacgtggttcaatccctctggtcatgattgtggtctcaatgtgttcttcattaccatgaccattattcttgcttttgcattcgccataattgcgttgcacccccaggtcaatggaagtgttatgcctgcttctgttatttcagtttactgtgcatacctgtgttacactagtctctcgagtgaaccagatgactatgcatgcaacggacttcacagacactctaagcaggtttcaatgagcgctcttatactcgggatgctcacaactgttctctctgtcgtgtactctgctgttcgtgctggatcttccactacatttctttcgccaccatcatctcctagatctggaatcaagaatcctttacttggtgatgataacgtggaggcggggaaaagcaacagtaaagaaattgatgcgcgccccgtgagctattcatatacattttttcacgttatctttgctcttgcaagtatgtattcagccatgcttctgactggctggacgagcgctgcttcagacagctcggagctgatggatgttggatggacaactgtttgggttcgcatctgcactgagtgggctacggctgcattgtacatctggacccttgttgctcccctgctatttccagaccgggacttctcataggcatgtcaagcattgttaaaaacgtggttaaaccatgaaattatatatatatatatgtttgtgtgtgtgtatgtacgtacgtacgtacgtacgtacgtacgtacgttattcgttgtgggaagccagtagttatgtataaagtccttattgacatgtacgccctcccgtttttttaaatatttaatgcaatttgatttttgg

SEQ ID NO: 16527 - DNA, 1455 bp, Oryza sativa
  ref <308>: DATABASE ACCESSION NUMBER: AK067012
  ref <309>: DATABASE ENTRY DATE: 2001-12-06
gagtttccacctttcccgcatcttccgccgtggggaagggagcaatcggcaagccaatccaatccggttgcttctcctccaatccaacctcgtcggcggcggcggcgacccgcgccgcgcaggctgttgagttatcacgtatttgattatggatctgccattgatggctgctaaagcctataagtacaaagcagaactacttgttaaggactacctgctagcagattcgtatgttccatacgcttctgtgcttggcggaattctgatgtgcaagttgtcatatgatttcacacgctttatcagttcattctacttcaaaggctatggttctctcacaaagatgcaaaaggttgaatggaataacaggggcatgtccaccgtccatgcaatattcattacacttatgtcagcatacttagtcttcttctcgggtttattctctgaccagcaggatggaccagtaacatttagaagttcgagcctctccaatttcacgctaggggtctcagttgggtatttcattgcggaccttgccatgatactatggttttacccttcactcggtggaatggagtatcttgtccaccatgtattgtcacttactgctgtaacgtatactatgctttctggggaaggacagttatacacatacatgagtctcatctcagagactactacacctggaatcaacctaagatggttccttgatgttgctggaatgaaaagatccaaaagatacgttgttaatggagttgcaatgtttcttacttggctggttgcaaggataattttgttcatgtacttgttttatcagatctttttacattatgatcagattaagcagatggagacctttggttatcttctggtttgtgttgtgcctgccatactgttcgtgatgaatatgatatggttttccaagatcttaaggggcctcaagaagacactggccaagaggcattgagtggggcaaggggtatgcatgtacagccacgacaaaccacctatctgtaaattcactcagcaggccagcagcctatagcttctcattagtcacgatggctaatcctggtaatatcagcttggccattaagatccagatttatgattgaatgcccagctttttatgcatggatgatatattaatttgtatatatgttccgctatggctgtatgttcttaatacccatcttctttttctcggtataaatgattatatcttagttttaacttaaacaactatttgccccaatttcagtcacattgtcaacacattgctgtaatttgccatcagctttggccatcattcccaagaatagtttgatcatcaacttttagtctccctggactaaactgcctttctttagatctggcttcacaatgatgcccgagtttttaaaacatgtataggctgaagaattttggaatttggaatttggaatcaagaaagttttc

SEQ ID NO: 16528 - DNA, 1191 bp, Oryza sativa
  ref <308>: DATABASE ACCESSION NUMBER: AK067013
  ref <309>: DATABASE ENTRY DATE: 2001-12-06
gggggctcggattagagttggactcggcaacgcgacgagcaccaaaagcgagggaagaaaaccaatccgaatccggagagagaagcgcaggaggcaaaatccactccaattcaacccaatcacccgcggcgagccgagcgggcggcggacacgacgacgacgaggtttaggtaggggttcttggcttgtcggcgtcggcggcggcggcggcggaggaggaggaggagtcagcgatgcggaggaggttccaggactccgtcaaggccctcgaggccgacatcgagcacgccaatgagctgtgagttcttcctcccttcgccggtcgcggctcgtggacggtggtggtggtggggggtttgcgtgtggttcatctctctcttttgcagggcgtcggagttcttgcgggattacgacggggcggtgatccagatgcggatggcgtacagcgccgtcgcgcacttcctcgtgcagtggatcgactgcaagctcgccggcgcgctcggcctcctcaagatcatgatctacaaggtgtacgccgatggcaccacggctctgccggagtgggagagggaggccagcatcaggcaattctacggtgtcatcttcccgtcgctgctccagctgccgagtgggataactgaattggacgacaggaagcagaggaggctgtgccttcagaagttcaggaaggtggaggagagggtctcggaggtggatttggagagggagctcgagtgcggcatctgcctcgaggtgaatgccaagattgtgctgcccgattgcgcgcactcgctgtgcatgagatgcttcgaggattggaacaccaaatcaaagtcgtgccccttctgccgcgcctgcctcaagaaggtgaatccgagcagcctgtggttgtacaccgacgaccgcgatgttgtggatatggatacgttgactagggagaacattaggcgcctgttcatgttcataagtaagcttccacttgtagtgctccatgtggttgaccttgacatttacgagtaccgtatcaagtgaaactgtactcttttgttcataccggtgggtctctgtacatatcaaattcatcggtgctgatctgtgatagctcaacctgaggctgcaaattagcagagttgtttgtagctcaacgagttgataatatttttgtgaaaagaagatgctgaagtgtactcc

SEQ ID NO: 16529 - DNA, 2805 bp, Oryza sativa
  ref <308>: DATABASE ACCESSION NUMBER: AK067014
  ref <309>: DATABASE ENTRY DATE: 2001-12-06
gtgggaccggttttcatctgttcttgtcctgagaggaggcgagcagaaggctcgtgcgaccgccacgagaagggcgacgacggcggcgggatcaaggtcactctcgactcgacgacgacggcttgctcgacggcggcggctggcggctcatccccaaaccctaggtccgtcccaacactccaagaagccggcgcgcggcggcagcgggatcagggtcgctctcaacggcgacggcggctggcggcttgctcgatgatggcggctggtggctcatcctcaaaccctatgtcgagagaagcctcgtcctcggcggccgccgcggcggcgggggtggctgtgagggatgttggggatgacaagcccttgccgtcggcggaggttgacatcacctactgggcggcgcaggaagaggcggctgcgctgcttgagtcgatggccgcgagggctcgtggggaggacgacctaccggaggagcagctgcaagccaataaccaactacaggaagacgaggtaatgcttagtactagtactagttactagttcgcccattgcactagaatgtgtgtataagttcccaaacagtatcagtatgcagaaccatcaatcatgcttatggtgaacaaatttcgaagttactgtttatttgtgcgaagatttattccggatgtactgtgcgcagtagtactcaagtctcctaagacagatattgcagtgaaattacacctatataacattctggtttctctcggaggtcctaaaatctgcccagcagttctgatgagcgcatcactttcaattaggataccaaaatatggagatatatttatcaggaaagattaggatcactcaacttatacgtagctattgcctggcgtaatggattagcacattggaatactgccagttcaaatagcctaagtagtgttatgtttaggtaatagcactgcgagctatttttggtgatgatatggtgatcttggagaataaggacaatcttcgatttattcaggtaacataagtttcttttgaatcttctgttgtcctcaacttctatcttttgagaagattgttcatgaattattccacagatttttgtgcattatacacttcctgatagtatccgtgtgttcttgaatcttcgtcgaagtggagctatggttggaactgatgatagtgaaaaccacaatggcggagaactctatcatcttgcaggttgcagcatttgccacctgttgtgctaacatgtttgttgccacggtcatatccaagtatatgtgctacatattttaccatttcagctaaatggttggatgaaccaaaggtctcatacctgtgtgctgcgcttgatgaggtttggacagagcttccagggcaagaagtcatatacagatgggtggattggctgaatagctcttcgtggtcttccattgctttgaatgatgaaatagtgttagatccagataaaacattaaaaattggagatgaacgagctatcgcgagaagaattttagttgagtctactattcctcttatgcagagttacagtgagaagagatctcataagatatttttggaaagccttctcgtgtgtggaatttgtctaagtgaggatgttgaaatttcatcaagctcccatgccatcattccttttgtttgaagtgtatggagtctcactgcaaaatccatgtgaaagaagggaatttaatgcagctggcatgtcctgatacaaattgccgcaatccacttccgccatccgtattgaaaagccttctacgagatgatggatatgcacaatgggaatcatttgctctacagaaactgttagatgcaatgcctgatctagtttactgccccaggtgttctgctgcttgcttggaagttgacaatgatgctcaatgcccgggttgtttttttaccttctgcactttgtgcaaacgccgccgccatgtgggggatacatgtattactcctgaagaaaaaatacgcattttgaaggaacgacagaaattgtattccataccagaggaacaattgttgaaagaaaagagggaaatagacgagttgataaatatccaggaagcacttcgtgattctaagcaatgccctcgttgtaagatggctatctcaaaaattgaaggttgcaacaagatgacatgtgggaactgtgggagattcttctgctatcgttgtaacaaagcaattggaggatatgatcatttctggaatggaaactgtgatatgtttgagagggaacaagatgaaaacccacagcagcaggatgatgaaaattttggtggcgaccctgacgaagatgctgaactcttagaacctgaatgggtgctgttaacttatccctgtccaaactgtggccgtcggaatgaaaagctcggtaccaacaatcatatactttgcatcggatgccgaggccattattgtgcgttgtgtcggaaaagagttttgaggggcgagcaacactttggacctagaggctgccagcaacacactgaagattgatagagatctcgtatgttgatcgctatgcagaatgttgttttgcctattccaatggcatactcgtacctctgtttctgacacccgctttgtacccaaaattagagttttcctgtagctgtatcatttaatttgcatcaggaatttcataacacttaccagttataggcagttacactgtttatgtttgtggaaaaacagataccatgcacctgatttgaacaaaacaggttttggcttgtaattagtgaacagttcaggtgtgtggagaatgaaaattcaattatccatttt

SEQ ID NO: 16530 - DNA, 4907 bp, Oryza sativa
  ref <308>: DATABASE ACCESSION NUMBER: AK067015
  ref <309>: DATABASE ENTRY DATE: 2001-12-06
gagtgactcctatcccaattcctcttgccacacaccacttatccgctgcagcaacctcgcaatcccctcggcgctcgctggttccagccaagctgcttccgtcctccttcacttcatctgtgcaacagggttattcatcaggccctggtggttttgccgtctgcaaacacctgtcttccattcgcatttcagaagaaaaagaaacacacacacaaaaaaactactcgtcagagttttcttcctaatttcccatccaaaaccagtagttttcattgaaaacaaaatcatttgttgttgtactgtccccgtattttgttcgtagcaattcccatccaaaaaacaaaatcatcctagctttttactttcaccttgttcccatcggtccttgtttagatcttcctagttctaagtttaccaacatttctccatcttcacatccaatatctctgtacctaccaaaattacaaagagagagaacagggagacagcaaattcaatccgatggcggaagtggcattggctagcttacgattggcagcatcaccgatcctgaacaagctcctcgctgacgcttcaacataccttggagtggacatggcgagtgagctccgtgaactggagaccagcatcatgccgcagttcgagctgttgattgaagaagctgagaagggcaaccacagggccaagctggacaaatggatacgggagctcaaagaagccttgtacaatgccgaggacctgctggatgagcatgagtacgacatcctcaagcgcaaggtgaagaacggaggcgaggatccttctccagatctagagcatgcctcctccatcggttccatcattaagaaacctatgcgcgcagcatcaagcagcttgtccaatctgcgaccgaagaacataaagcttgtacgccagctgaaggagctcaaggccatcctagcgaaagcaagggacttccgtgaaatgcttggcttaccggctggtagcagtgtagagggggcacaaactggacatacaaaaacagtggtcgttactgcagcgacatcaaccccaccaccaaaggtgtttggtcgcgacgcggaccgcgatcgcattgttgatcttcttacccaacacaagacttgtgctgaggctagccgtttcgttgtctccattgttggacctggaggcatggggaaatccaccttggctcagtatgtttacaatgacaagacgatacaagaacattttgacgtcacgatgtgggtttgcatctcacgcaaacttgatgtccatcgtcatacaagggagatcatcgagtctgcaacaaaagagaagtgtcaaagggttggtaatatggacgttctccagtacaaactaaaagaaatactgcagaaaaaagagaaagtcctgcttgtgttggacgacatttggttcgataaatcccaggacgttgaggaatgggacctgctacttgctcccatactatcttctcagaatggggcaaccaaagttctggtaacttctcgatctaagacacttccacctgctcttttctctgaagatgtcattgatttggaaaatatgaaagatactgagttccaggcactcttcaaacaccatgctttctctggagccacaattcgagacctccagatgtgtggctggttcgaagagcatgcagtgaagattactgaaaggcttggaagatctcctttggcagcaaaagttgtaggttccaacttgaaaagggtgatgagtatcgatgattggaaaggtgctctcactataaagatagacaatttaagtgaacctaagagagctctgttgtggagttatcagaaattagatccatgtcttcagagatgctttctgtattgcagtttatttccaaaaggttacaaatacataattgacgagttggttcacctttgggttgcagagggatttattgatgcacgtgatacgaataaaagaatggaagataccggcatggattacttcaaagagatggtctctggatcctttttccaaccattttctgaaagatttgatagtacggtgtacattatgcatgacctccttcatgatttggcagagtcactctctagagaagactgcttcagattagaagatgacaaggtgagagaaataccatgcactgttcggcatttatctgttcgtgttgagagtattatacaacataagccaagtgtctgcaagctacaacatttgcgaactcttatctgcattgacccactagtggatgttgggagcaatattttcgagcaggtagtattgaatctgaagaagttacaagtactttatttgtcgttttacaacactagaaagttgccagaatcaatcggtcagctaaagcatcttcggtatttgaacatcaagaagacattgatttctgaactaccaaaatcattatgcgatctttaccatttagagttactttatttgcgtccgaaatcgaggttacctgacaaactctgcaatttatgtaagttacgacatcttcaaatgtactctgatggattggagctgtcacggattcctgacataggccggctaactttgcttcaacgtattgatagttttcacgtcctaaaacagaagggacatgagttgcgacagctcaggaacatgaacgaaattggtgggtatttatcgctcagaaatcttgagaatgtgattggcaaggatgaagctttagagtcgaagctgtatcagaaaagtcgtcttgaaggattgacgcttgagtggaatgatgcgaataacatgaatccagagaattgtttacatgttcagattcttgaaggcctcgtgccaccaccacggttggagcacttatcaattaggggttacaaatcgactacctatccaagctggttactcgagggttcccagcttgagaatctagaatcctttgctctttataactgcagcgctttagaaaggctaccatccaataccaagctctttaggcgttgccgtgaattgagccttaagaatctcccgaatatgaaggaactatcatttcttccagcaggtctcacaacgttgtcaattcgtaggtgcccactgcttctcttcgttaccaatgatgaactggagtatcatgatcatagtgagcatatccactaggacagagcaactggttgcacaatttgctttggttggggtgatgggcccatttttagatgcactgtcatcggatcattcatctatgaagcagttggcagcattgatggactctgatatatcaaaaaatcttcaaaccattgaacgcgctctagaaagagaagatgaagtagtgatgaccaaggatgtcatcaaggcatggatgcgttgccacgagcagaggatgagactcatttatgcaaggaggattgggctaccattggtcccaccgtcaggacttagtgatctctcccttaaatcatgcacaattacagatacagctctatccatatgccttggtggcctagcttctctgagatgtttgtccttatccaagatcatgtctttaactactcttccgtcagaagaggtcctgaaaaaattgacaaagcttgattgtttgatcattgatgcctgcttgtttctcggatcgttggggggcttgcgagctgctacttccctttcgcatttaaggttgaactcttgccctgctttagagttggcacacggtgcagaattcatgccagcgtcccttaagagactcgcaataagttgttgtgtgcttgcacccgacttgttctgtggccactggccgcatctgaaagatattttcatacacgactgcagaagctctgtgtcgttgtttgttggtgatcttagctccctgaaagaattcacactttatcatttgccagatttatgtgtgcttgaaggcctgtcttcccttcaacttcacagcgtgtgtttggtagatatcccgaagcttactgctgagtgtgtgtcaaagtttcgtgtccaggatttactgcatgttagcagctctgcggtgttgaacaacatcatctcggctgaaggtatcacagttcagcgtctctcatccttcaaaggtgcaaggagccatccgtttcatttgaagaaactataaattcctcatctgtcaagcagctgcgattagaaagttgtcaaatgagttccctgcagggaaatctgaagtgcctctccagactggaggaacttgacatcttcagttgccccaatatatcatgtttgccagatctcccatcctcccttcagcgcatatccatagtggactgccccaatatatcatctttgccagatctcccatcctccctgcagcacatatacatacgtgactgtccactactgaaggagagctgtagagtacccgatggggaaagctggccaaagattgcgcatattcgttggaagcgtattgactgaattatgcttcagattcacaagaacaaaggaacagaaagtgctgttccttcgccccctgcattgcagacctccagagtctcacacagctgtttggctatgaacgagagggaccggttcgtattgactgatcggtctgagcttcttcttcttattcttgtgtggttgcatttcgctggctgctggctatggtctatatgcctatggactattaccgagatgtatctgtgtatttggatcttgctctgttatgtttcctgtttgttcttttggactgaattgcttgtagtagctgttatctatggtgtgcaacgtctactgtattactgcaccggtgaagctttgtatgggagtaccatggtgcttttgaactcaggctactgttatcctctcttggagtgtttccttttggacttggtttctattgagtattgactgtaagcctgtaactattatctcttgtatgatgagatgcaagataaggcaaacctgcaatagct

SEQ ID NO: 16531 - DNA, 1276 bp, Oryza sativa
  ref <308>: DATABASE ACCESSION NUMBER: AK067016
  ref <309>: DATABASE ENTRY DATE: 2001-12-06
gccgctatcgcaccaatccaaaatccccaacccaacccaacccaacccaaccgcactatcacgccactcttcgcccgcccgcccgccgccggaatcgccatcgcccgaccgccgccgcgttcgtgtccccacaggcggcttctctccctgcatcaccatgggttctgacttcaaggcaatccccttgatcgacattagtccccttgtcggaaagattgatgatccgagcatggtcaatgacgaggatttgctgcaagttgtgcaaatgttggacgatgcctgcagggaggctggattcttttatgtgaaaggccatgggattgctgactcgctaatgaagcaagttagggatgtgacacagaagttctttcagcttccttatgaggaaaaactcaagattaaaatgacacctcagagtggatacagagggtaccaaagagttggtgaaaatattaccaagggtaaacctgacatgcatgaagcaattgattgctacacgcctattgaacctggtaaatatggagaccttgctaaaccaatggtaggatctaatttgtggcccaaatatccatcaaattttgatgtactgctggaaaactatatcagccttctaagagatctttcaagaaagatcatgcgaggtatagccttggcgttgggtgcgccagttgatgcttttgaaggtacaaccgcaggagatcctttttgggtttgcaggctgatcggttatcctgtatcaactgatattccagaagagcagcgcactgatactgggtgtggagctcacacagactatggtcttctgacattggttaatcaggatgatgacatatgcgcccttgaggtcagaaaccaatcaggtgaatggatatatgccaaaccaatcccaggaaccttcgtctgcaacatcggtgacatgctgaaggtttggtcaaacggaatatatcagccaacacttcatcgagttgttaacaactcccctcgctaccgtgtatctgttgcattcttccatgagtcaaacttcgatgctgccgtagagcctgttgagttctgccgggagagaacaggtggtgttgccaagtatgaaaaggttgtgtacggagaacacttggttcagaaagtcttgacaaacttcgtcatgtaaaatttgtggaaaagaacatgcattgtactccaatgtctgatcgcaacattcgtcactaaaataaaatcatttgtaaatttgtcatagcacagtagaacagtcatattgaagaatggaatgcatccttaattg

SEQ ID NO: 16532 - DNA, 1748 bp, Oryza sativa
  ref <308>: DATABASE ACCESSION NUMBER: AK067017
  ref <309>: DATABASE ENTRY DATE: 2001-12-06
gaaccgcgcgccgctccccaaccctaatctctccctctcacgcggcaccaccgccgtcgttgccgccctcgactgccgcagctccgccgtcgtcgcatccgtcgtctcgccgccaccgatccccgcgccaccaccgtcgccgccgccctcgactgccgccactccgccgtcacccatcgtcgcatccgtcgtcgccgccgccctcgactgccgccgctccgccgtcgtcgcatccgtcgtcgccgccaccctcgactgccgccgctccgccttcgtcgcatccgtcgtctcgccgccaccgatccccgccgccggctcgccctcaaccaatccccatcaccgtcgtcgcatccgtcgtcgtccaggatttacgtcaccgttccgtcaccgcacccacacgatgatccccggcgacggaacgggtcatggtggccttggaggatactcgggcccgacgagctctcggcgtctcaggtaatgtcgccgaagacaagaactccggtcaagctcctcggccgtgaggacgcaagcgtgtgagtgtatcccttttccctcaaatttaattatgtactctgttacttagttctataattcatctgctcagttagtgtcccatcacaatcgcttggtcaggattgaatgttctgtggattggattgggagttgtttgctcaaggagcaattagggaatattttagttggttgcggctgcaaataccatcagaacaacaatggagtatttaacaagagccaacagccttttgtttcagatgaattccctctgaagtcacccgtcaattgactaatgttagacaatctaccatctagaggagatcattcctgaacccaatatggtgataagccgcctctgttgatgtgttacactcattgttacttgttctgaggtgtacaccttgcttgctatattggaagaatgaatttaattcacatggatataatattttgcaatttttgtatatgaaattatatgcatgttcttgtgatgtgagaaggttaaattcctttgtgggatgcccatttaatttctggttgctaattttactgaagaatgagagtaggttatgatgtcttgggttttgataagtagggtgtaaatttttatagtacaataaacatgcgtgctggtcattctgttatgtgggattgaaacaagtgatgctggcaattcaggtgcagaccagcttttggttctgtaaattattttctcaatttaaatagatcatgtattgtgatgatgcgaatataatattatgatgttatcatgtgttcaacagagcttaaaaaatactcacaaactggattctcgtagttatacagtttaaataagttataagcacgatttgggtttgatgtcttccatttgatttttagcgctcctccctcttgctccgatctggccttagtgatgccgccctgttttcgcggttgatcccggcaccagccccttcctctggccgcgtgcgagttcgagattccaagtcccggtggtcggatttctcaaccccggcactggcctcgcacaggctgcgatccgctcgccaacaaggcttgtgtagagaagaaaaggtggaattgtggaaggtaatcgcggggagttttggttcattttttgaagatttctctaattggtacgtactaattaaccaattggagttttggtctcgttactcactgtaaaaacatgatggtaaaaaaacagtttaatcctattggtactcttttatccc

SEQ ID NO: 16533 - DNA, 1699 bp, Oryza sativa
  ref <308>: DATABASE ACCESSION NUMBER: AK067018
  ref <309>: DATABASE ENTRY DATE: 2001-12-06
ggcggaaaaaaaatcagatcaggttccgcatccactccgctccccgccccggcgagaggctgcagctcagctcatcgccggcgggcaagcccgatctcccccaacctgctccgctccttgcgctctcccaatcccgcatctcctcctcctccgaccccgcgaggtgggggtcggaggtcgtcgtcgtcgtcgtcgttgtcgcctgcctcctctccgggcgctcgctgagtttgccggcggcgtgggctgtgtgcggtgtgcggtgtgcgcgcgcgatttgtagctgggagacgcttgacttgttgcctccgctagctcttctggccttcgtgtcgacatggctgcaatgtgatttgccgcgccgcgcgctgttcctctcttctggagggtaaaatggcaggcagagcaaggtgggtagcaaagtatacaaagggtcttgttgatgtgcttcatgagaacaatatttcacactaccgtacccagaatggatggagaaccgatgggtggaggaaaattgttagcgaattcaatgataggtacccagatgcaaaatttactaaagttcaaattcaggagcatgagacacaactgaagagagattatagattggtaaaattaattctccagcgggaaggtgttacttgggatcaaaatgcttccatgattagaacgacagatgaaatctgggatgagataattgaagagatgcccaaggcgcggaagtaccaatttaagagctttccgttacttcaatcacttgaggtgttatttgaaggtgacattcctgaaggggaacacaacttaatgccgagcaaacctcaacttgctggtaggaatgttgatgagggaggcaataacatgagcacagctccgagcatacctggaagaccttgtagcacagttattgccggcattgatgatggggagaacaacatcggcatacttcagagaactccagagttagggcaacaaggtctggatgatgttgatattctgcaaaatccaacagaagaggtactggaaagaccacagcacggtgccgacccaaaaccacaaagtgctgatgaaccggcgcactcaagctcttgcatagaacctcaaaaggacaagcgaaagaagcgtaaggtccctgacatccagcaaaccatggaggcttttctggagttcagaatgaagcaagctcgcttgaaggaacaagcgaagaaggagaagaaggatggtgagccgttctcgatctcgacgtgtatcaaggcactgcattcaatgaccgacgtatctgatcaggtcaagattctagcctctgatgttttcaaggatgcagcgaaccgagagatcttcctttcctacgatctcaggcttcgcacgctgtggatcaagagggaagtcaacaggttactcacttgatcaagtggattgccgcatcttgttgcccttcgtctccggaagattagatgaacgtagaaactataattattatggatcagctgaaagtcatgaactgatcgatttgctaaaattatggatcgggtcagatctgaacctaggagtcatgcaagtcgtcaagcactcgttttccctatgctcagtgcttagtggcattggcttgcccacaaacacctccagatcatttcgtatgctctgtaatagtgtagttttgctgattggtggttgctaaaattagatcgtgtcaattcctgtt

SEQ ID NO: 16534 - DNA, 1321 bp, Oryza sativa
  ref <308>: DATABASE ACCESSION NUMBER: AK067019
  ref <309>: DATABASE ENTRY DATE: 2001-12-06
ccagattttcccagaatttttttttcttctaattttcttcttcccgtttcccgactcaagtcagcggttagggttccgagatctccgcctcgcacggcagccatggcggcaagcacttttagcacagtcaaggtgagcaatgtgtcactgaaagcatcactgcgagatgtaaaggaattcttttccttttctggtgacattgtgcatgttgaaatgcaaagcagtgatgagctgtctcaagttgcctacattacttttaaagacaatcaaggatctgagacggctatgcttcttacgggtgccacaatagttgatatggctgtcattgtcacgccagctaccgattatgagctaccagcttctgttttagctgctctagagcccaaggatagtaagccttctgcccttcaaaaggcagaggacattgttgggaccatgctggccaagggattcattttaggtagggatgcactggacagagcaaaagccttggatgagaagcatcaactcacatcaactgcaactgctagagtatcttcctttgacaagaaaatgggtttaagcgagaagatcagtgttggcacttcggctgtaaatgataaagtgaaggaaatggatcagaaataccaagtctctgagaagacaaggtcagcactggcagctgctgaacagagtgtctctactgctggatctgccatcatgaagaacaggtatgtccttactggagcagcatgggtaactggtgctttcaataaggttgccaatgctgcaaatgatgttggcacaaaagcaaaggaaaaaatagcatctgagcaggagcacaagactgtagagcttgagtctgcagaacctaacagctcagaaggccatggaacacaaaaggatgtggatggtgaattcgccaagatacaggtctctgaatcccctgaagatattcccatctctacgactgcaaccgtccccattactgatgaggattccagtcaggcgtctccacctgccgcctctcccaaaaagccagaacctgcgcaggggttgatactatgattccattgatacatgagtgtaaatagacacgaaatggtcgctgaattcaggctgtagtgttgttgtgatccttcaaactaaacctctttgaagtttggatttgggacctggaataggttgcagtttgtagcatctatttttctcaattgaacatcattttcttgcattagcgaccttcttaataggcaccaaccattgatataccattttgacatgggatattgatgtggatttggtggaatatatgagaaattatgtttgagtacttcactgc

SEQ ID NO: 16535 - DNA, 2707 bp, Oryza sativa
  ref <308>: DATABASE ACCESSION NUMBER: AK067020
  ref <309>: DATABASE ENTRY DATE: 2001-12-06
ccagaccacaccccacgcgctctcgccgttctagggtttccgctccgatccctcccggccgaccaaggtaaccaccctcctctcccttcccgatcccggctactagccggaggcctcgagcctccgtcctccaattgcccctcgattttttttttgttttgtcgcccccgattctctcccggtatctcgctctcgccgcgcattcgagctagattcgagccgagaccaatcgcttccgctagggtgtggtttgctctcgtggggggttggatcggtcagcgtagttctactgcatcttgtggtgtaacgatggcgttgttgattggggcttgaaaggattttgtgtagtagcaacagccgcagcagcagccatggccgacaagggactcttcgccaacgacggctccttcatggagcggttcaagcagatgcaggagaaggagaaggagaaggccgccgccgcctcgtcgtccgccgccgccgcggccaaggccaccaaccccaagccggttgtcgtcgccgccaacaccccgtcggcgagcaagaggccgctggagctcaaggggggcgaggtgaagaaggccggttcgatctcgtcgggcgccaagctcgcctttagcctcaagaagaataaggtcgccgtggcgccagtcaagtttgcggctgacgatgagtatgaggaagatgttggtgcggacagggaggagcctgtgaagcggcagaagtatgcgcaacctgaagctcctgcatcggtggctgccctgtcaggggtcgttggtaatcatttattcacatttgttcctgtaatcgcattcttttcctgtgacatagtatcaaatacttttgttatatgtttgttggttactatgggttatattatagtccatctccaactggattggaactttggatttaatcattggatgtattttgattataatgaaagcacaatcgaaatagtaggtattcatcattattcagtatagcttctgttcatggtttagattagctcattgaatttgttgcagtctttatacaagcatttgatatgtcgtaggtttctgataaactgctgaacatgtaaccggtgatactacataagtatcccttgagctgctgactgactgacatggtctgcctattgtaaagctctcaagctcttataccaggacaatttactgttaaaccaaggagctgtggacataatatatatgattcatgcatatatgatatactgtttaggttgtcaaaaataacatctgttcccagcatatgaaattacttgaactggtattggaaacagaaatttgtgaaggctttggttttttttcttctgactgcagcttatagattaactgtatcgacattgatgggaaggatgttgattgaaagagttggatgcattactgctacagcagtaatttgcattccttgttcatgcgcttgatattaatcagttatttaagtgacatgcagccccatcaccaccaaatgatatgactgtgaagcaagttgctgacaaattagcaaattttgttgccaaaaatgggagacagtttgagaatgtcacgcgtcaaaggaatcctggagatacaccattcaagtttctgtttgataagaactgttcagactacaaatactatgagtttcggcttgctgaagaagaaatgttacttgctcagctcaaaggaggcccaggcatcaaaacatgctagctcaagcactccaagctccagagcaccaagtgccccacagagaagctcatttgaacaaaagactaattatcaaacacctgcttcagctttgtatggggcatatgagggtagttcttcccaaggaagctcatctggctatggtgagcctcccaaggatccagtagcattgatggaattctacatgaagaaagctgcacaggaagaacggaaaaggccaccgaaacaatcaaaagatgaaatgccaccacctccttctcttcaagctccttcttccaagaagggacatcacatgggcgacttcattcctcaagaagaacttgaaaagtttatggcacgttgtaacgatgctgctgcacaaaaagctaccaaagaagctgcagagaaggctaagattcaggctgacaatatcggacacaaacttctgtctaagatgggatggagggaaggtgagggtcttggcagtgagagaagtggacgtgcagatcccattatggctggagacgtgaagaaagaccatcttggtgttggcgctgtccaacctggtgaggtcacatctgaagatgatatctatgagcaatacaagaagcgaatgatgcttggctaccgttataggccaaacccactgaacaatccaaggaaagcatactactgatataatgggaggtcatccaaggggcgatgtaaggcacaattttgttacattttagctaacagaactaactactgcctagggatatcactaacagtattgaaagtttttgttcaccagcagagaagccaagaagttcatttattcagcatataatctttgaatgccagaggcttcccggtgttctgcagtagctttggttttacgtagtgttacatctatgctactttcaacatgtcatttggtgtgtgtttccccttttgtttcacatggtgatgtattcatgttgctattgatgaataatgtatcttcatgattattcaacccatattgaacttatgcc

SEQ ID NO: 16536 - DNA, 902 bp, Oryza sativa
  ref <308>: DATABASE ACCESSION NUMBER: AK067021
  ref <309>: DATABASE ENTRY DATE: 2001-12-06
gctctgctgtgctgtgctgctagggtttaggcggcggcggcggcggcggcggctgcggctttccgattccaatccaacaagaagaagattcggagagattgccggccatgtcttccaccggtcgcccctacggccgtcgcggcggcgccgctccctcctacgtgccgcgcccccgcgcacccaacccctcgccatccgctcccgctcccgcacggccgccgcagcaactgcgtaaaccggtgttcaccacaccctcaccgcccgcgtcctctccgcccgcatcatcctcgacaaccctcctccccgcgctcgtctcgctgagtgcctcgtcggcgacaacaccggcaccgtcctcttcaccgcccgcaaccaacaagttgacttggtgaagccaggcaccacggtcatcttccgcaatgccaagattgacatgttcaaggggaccatgaggctggcagttgacaaatggggccggatcgaggtgacggaccctgccagctttcaagttaaggaagacaacaacgtgtcgctggtcgagtatgagctggtggatgtcgtcgacgaggattgactacttagactttgattggctctcgggctgtggacatagatttttgatgcagcggtagcagtaggttcatcttatcctggaaagctattgaaaagatttggagctggttattacttatgtacaggggaaggttcaactgatgcttttgtgcaagacctgttctatcattaggtttggtttatgaaatgtgttgatgttgccggtggtacctaaatctaaatgttggcaagcctagtggacttgtctctgtcaatttaatggtatggagttggatcttgtgtcgctgatggttctacatatacgatgaagaatatttctgggatgtcttact

SEQ ID NO: 16537 - DNA, 1178 bp, Oryza sativa
  ref <308>: DATABASE ACCESSION NUMBER: AK067022
  ref <309>: DATABASE ENTRY DATE: 2001-12-06
gcaggttgttccaaaaatttgggagttcgaacttcgaacgactcggcgctccattctgcccaccggcggtgatctccacccccgcggagatgggaacggaggccgcagctccggcgagggccatgggcccaccaagctcgcgtacttcgatgacatgtgggccctcagctccaccgccaccgtcgtctccctcctccaggaggaggggggccggcgagcggtgttggtggactccaccgtcttctacccgcaggtcggcggccagccggccgacaccggcgtcatctccgctggcggcggcaccaggttcatcgtcgatgatgtgcggatgaaggatggagtggttttccactatgggagatttgaggatgctggagatggatgcaattccgggttcagtgaagggcagagcgttagcttggaagtcgatgcggaacgccgcaacttaaattccaggcttcattctgcagggcatttgatagacatctgcatgagcaatattggcttatcacatttcgaccctgggaaaggacatcatttccctgatggacctttcgttgagtataaaggagtcattccaccagatcagttgcaggataagaaaaacgagttggaaaaagaagcaaatgagttaattactaaaggagcaaaagtattagcttatattttaccttatgaggaggcagctcaattgtgtggaggtgctctgcctagctacatttcaaaagatagcacccctcgcattgtgaaatttggtgtttatcctggtggcccttgtggtggtacacatgttgccgatatctctatcatcaacaacataaaggtcacaaacataagagtcaagaaaggcctcaccaaagtctcctacagtgtcagtctatgattctttttacccatgcatttggcacctggaatttgtcagaggagtgaagaggcaaacattcagtgaaatcagaaggctgataccaaacgatttttttaaaaaatctatgtttagacaaagagtaattacatgtaatattttggaaagcactgttagttctatgctaaatttcgtgtcacatcactatatgtaacttcctgtaccagcatggactatatgtgtctttttcctgaattatatccaggaaattgtactagattagatttgctggtttaatcttcagattgttgttctg

SEQ ID NO: 16538 - DNA, 1834 bp, Oryza sativa
  ref <308>: DATABASE ACCESSION NUMBER: AK067023
  ref <309>: DATABASE ENTRY DATE: 2001-12-06
gtcgagtcttacaaacatttcttctcctctctctctctctctctctctcaactccaccacatttgtctgtgttcttgctgtctcttcttctcctacttcctctactcgattcgaggtttggctgctgctgctgttgctgctgatagtggtggtggtgggtgggagcagaagcagaagcaggaggcaaagaaaatctcgaggaaggaagcagaagaagcagccaagaaacgccgccatctcatctggatgcgctgaatctatctgccgcggtggaggttgtggaatcatggtttcaaagtcatatacaaatcttctagatatgagtggtgaagatgtgtttgactttcagcaaccatttagatcgcttcctcgttttgtgacttccccaagcatcacatctaatcctgattgggatacaagtaatgctgatgattcagttggtcctgcatcttgctgtgtaaggaaaataatcgtctccaactttcttccactaaactgtaccaaagatgaagctactggacagtggtccttctcaatggatgacaatcaacttcttgttcaacttaaagatggatttccaatggagagcgaagttgtttatgtgggtagcttgaacgctgaagttgatcctggtgagcaagatcaactttcacagaaacttttcagagaatacaaatgcatacctactttcctcccagctgacctccagcagcagttctatcatggattctgtaaacaacaattatggccacttttccattatatgcttcctatttgcctcgacaaaggcgagctctttgaccgctctctatttcaagcctatgttcgggcaaacaaaatatttggtgacaaagttatggaggccatcaattcagatgatgactgtgtgtgggttcatgattatcacctcatgcttctcccaacctttttaagaaaaaagcttcatcgcatcaaaattggtttcttccttcacagtccatttccctcctctgaaatctataggacactgccagtaagagatgaaattttgaagtctcttctgaatgctgatctcattggctttcaaacatttgactatgcccgccacttcctttcatgttgcagcagattgttaggccttaattacgagtcaaaacgtggtcacatcggtatagagtactttggccgtacggtgagcctcaagatccttgctgtgggtgtacatgttggtcgtcttgagtctgtgttgaggctgcctgccacaattagcaaggttcaagaaattgagcaaagatataagggtaagatggtgatgttgggtgtagatgatatggatatcttcaaagggatcagtctaaaattgcttggcttggaatttcttttggagagaactccaaagctaagagggaaggttgtccttgtgcagattataaatcctgcaagaagcactggaaaagatgtggaggaagcaataaatgaagccgtctctgtagctgaaaggataaacattaagtatggttctgctgagtacaagcctgtcatccttatcgactaccccataccttcttatgagaagattgcatactatgctgcatctgattgctgtattgtaaatgctgtgagggatgggatgaacttgataccatatgagtatactgtctgcaggcagggaaatgaggagattgataagctcagaggtgttgataagagctcacatcacacaagcacactaattgtgtctgagtttgttggttgctccccatcacttagtggtgctttcagggtaaatccttggagtattgaagatgtagctgatgcattatataaagcaatggatttgactcaatcggagagg

SEQ ID NO: 16539 - DNA, 1190 bp, Oryza sativa
  ref <308>: DATABASE ACCESSION NUMBER: AK067024
  ref <309>: DATABASE ENTRY DATE: 2001-12-06
ggcatcagctccacccccgaaaaatttctccccaatctcgcgaggctctcgtcgtcgaatcgaatcctctcgcgtcctcaagatgcagatctttgtgaagacattgaccggcaagactatcaccctcgaggtggagtcctctgacaccatcgataatgtcaaggctaagatccaagataaggagggcatccccccggaccagcagcgtctcatcttcgctggcaagcagctggaggatggcaggacccttgctgactacaacatccagaaggagtcgacccttcaccttgtcctccgcctccgtggtggcatgcagatctttgtcaagactctgaccggcaagactatcacccttgaggtggagtcttctgacaccatcgacaacgtcaaggccaagatccaggacaaagagggcatccccccagaccagcagcgtctcatcttcgccggcaagcagctggaggatggcaggacccttgctgactacaacatccagaaggagtccaccctccaccttgtcctccgcctccgtggtggcatgcagatctttgtcaagacactgaccggcaagaccatcaccctcgaggtggaatcttctgacaccatcgacaacgtcaaggccaagatccaggacaaggagggcattcccccggaccagcagcgtctcatctttgccggcaagcagcttgaggacggcaggacccttgctgactacaacatccagaaggagtcaacgcttcaccttgtcctccgtctcaggggaggcatgcaaatcttcgtgaagactctgaccggcaagaccatcaccctcgaggtggagtcttctgataccatcgacaatgtcaaggccaagatccaggacaaggagggcattcccccggaccagcagcgcctcatctttgctggcaagcagctggaggatggcaggacccttgctgatactacacatctagaaggagtcacttctccacttggtgtttcgtctctgtggtggtcagtaatcagtcagtttggtggagttgtcgatgtgtctggttgtcttcgagtctctgttcgttaagtatttgtggtgctgatgtctatttgtgtttggtttaatggtttattgagtttgtatgatatgttagttttatgaaacagtttcctgtgggatagtagtatgttttatgaataagttggatttgaacttt

SEQ ID NO: 16540 - DNA, 1128 bp, Oryza sativa
  ref <308>: DATABASE ACCESSION NUMBER: AK067025
  ref <309>: DATABASE ENTRY DATE: 2001-12-06
gactccactccacctaccctttctcccccctttccccccccctctcaccctaacccctcctctcgccatctccgcatcctctccacatggcgtccatcaccaccaccgccgcagccgcagccgcctcctccttcctccaccgccgccgcgtcgccgcgtccgcctcgccgcccccgcgcgccacagccacagccaccctgcggcaccaccagagggtcgtcggttgccgcgcggcggaggtgtcgggggcggagcgtcggcggcggcgggggaggcgagcggggatgggaactgggtgccggtggtgccgctggcggcgctgccgcgtcggggagcggcgggtgatcgtgcaggacggggaggagatcctgctgctgtggtacaaggagcaggtgtacgccgtcgagaatcgatcccccgccgagggcgcctacaccgaggcctcctcaacgccaagctcacccaggacggctgcattgtttgcccaacaacagatagtacatttgatcttcgtactggtgaaataaaggaatggtatcccaacaaccctgttttaagggctcttacacctgcattgagaaaactattcgtgtaccctgtgaaaatcgatggggagaatatatacatcagtatcaagggggctgttacctccggtggatccgcagagattatattcagtgggaaagcacaacctggatttactgcatccgatgtcaatatcgaagaggtgagaatggtgattgatgaggatgtcggaggttttggtttcactaataagaatgaactaattaatgggaaagccgctataattggctttctcttgttaatagactttgaacttttaactgggaaaggccttctcaaggggactggtttattggacttcatatatgcaatctcaagagctttcagctcataaggatgcttcttctttggtgtagaatgttgtccatgtacatcactcatgtaagtctagattttatttctacatacctttgtatttcatgttatgtttgtctctgttttaagtacagtgtaagatatattttccataatccctcatgaaacatctgaaggtgtatatattcttccttcaaaaggggtataaatatttaccactgcacattt

SEQ ID NO: 16541 - DNA, 2385 bp, Oryza sativa
  ref <308>: DATABASE ACCESSION NUMBER: AK098983
  ref <309>: DATABASE ENTRY DATE: 2002-08-28
gcttcttcctccctgttcccttttcgattcgattggattggattgttttgctggctcgctctctctctctctctcgtggtgtggtgtggacaagaaaggaaggaaagatggagggcggcgtagggggggaggtggaccacctcgccggcgagagggccaccgcgcagttcgacgttgaacacatgaaggttgcctgggctggctcccgccacgccgtcgatgtcgccgaccgcatggcgcgcctcgtcgcttccgaccccgtgttccgcaaggataacaggactatgctccccaggaaggagctgttcaaggacacactcagaaaggcagcccatgcgtggaagcgtatcgtcgagctccgtcttacagaagaggaggcaaatttgctaaggctatacgtggaccagcctggttatgttgatctgcactggggcatgtttgttcctgctataaaaggccaagggactgaagagcagcagaagaagtggctacctctggcctacaggttccaaataattggatgctatgctcagactgaacttggtcatggttccaatgttcagggccttgaaacaaccgccacatttgacccaaagactgatgagtttgttatacacagcccgacactgacctctagcaagtggtggcctggtggcttgggaaaagcttccactcatgcagttgtgtatgctcgtctgataactgaaggaaaggactacggcatacatggtttcattgtgcaactacgaagcctagaggaccactctccccttcccggtgttactcttggtgatatcggcggaaaatttggtagtggtgcatacaacagtatggataatggagttctgcgatttgaccatgtgcgcatcccaagggatcaaatgttgatgaggctttcacaagttacgaaagagggaaaatatgtgcactcagatgtcccaaaacagctgctttatgggacaatggtttttgttcgtcaaacaattgttgcagatgcttctaaggctttatcacgtgctacttgcattgctgtaagatacagcgctattcgaaagcagtttggccctcaaactggtggccctgagactcaggtcctcaattacaagactcagcaaagcagactctttcctttgctggcttcagcttatgcatttaggtttgtgggtgagtggctgaagtggctgtacacggatgtcacacataaactggaagccaaggatttctcaacacttcaagaggcccatgcctgtactgctgggttgaaggctgtgacaacatctgcgacagctgatggaattgaagaatgccgaaaactctgtggtggacatggttacctgaacagcagcgggcttcctgaattgtttgctatctatgttcctgcttgcacttatgaaggagacaatgttgttttgctattgcaggttgcaaggtttctaatgaagactgtatcccagttagcttctggaaaacagcctgttggtacaacggcttacatgggcaacatacagtacttgatgcaatgcaaatgtggtgtaaatacagctgaagattggctaaatcctgctgccatacgagaggtatttgaagctcgggctctcaggatggcggtgaattgtgcccagaacataaacaaggcgccaagccaagaagaagggttttatgagctatcccctgatctgcttgaggtggcggtggcccatatccagttgataattgtaaccaagttcatagagaaattagagcaggacatccctggtgagggagtgaaggagcaactgtgcatcctttgcaatgtgtacgcgctgtatcttgttcacaagcatctgggtgacttcctgtcgacggggagcatcacagcaaggcagggagcgctggcaaacgagcagctgggaaagctgtatgcgcaggtgcggccgaacgcggtggcgctggtggacgcgttcaactacaccgaccactacctggggtcggtgctggggcgctacgacggcaatgtttacccggcgctgtacgaggaggcgtggaaggaccccctcaacgacacggatgtgccggacggttaccaggagcacctccgccctctgctcaagcagcagctcaagctctccaggctatgatcatccatccatcatcctccctttcttgctctatcaatcatatcatactgcatacgatttgagtagtagtaaaataacaccagcatatgcaaggtgctggctggctgctagtattttctttttctttataatttatttatttggggagagctggtattgtcttatttatttgggaagagctggtattgtatgtctggtgatttggtatagctgtaactgtgaacttcaccacatctcccccttctcaagggcatatgcattctactcc

SEQ ID NO: 16542 - DNA, 1718 bp, Oryza sativa
  ref <308>: DATABASE ACCESSION NUMBER: AK067026
  ref <309>: DATABASE ENTRY DATE: 2001-12-06
ggttcgctactcttcttgcgacagaagcaaaaggcggcgaagagagagagagagagagagagagcgagatcgccggagatggccgacggggaggacgccgccgccgcccgccgccgcgcctccgtgacggagtaccggaagaagctgctcaactgcagggagctcgagtcgcgcgtcagcaccgtgagggaaaacctaaaaaatgctaagaaggactttacaaagaccgaagatgacttaaaatccctgcaaagtgttgggcagatcatcggagaggttctccgccctcttgataatgaacgttttattgttaaggctagcagtggtcccagatatgtggttggttgccggagcaaagtggacaaggagaaattgacttcgggaactcgtgttgttcttgacatgacaacactgacaatcatgcgcacacttccacgtgaggtggaccctgtggtttacaacatgcttcatgaagaccctggtaatgtcagttactctgctgttggtggtctgtctgatcagattagagagctcagggagtccatcgaattgcccttaatgaaccctgagctctttcttcgtgttgggatcaagccccccaagggtgttctactctatggtccaccaggaactggtaagacactattggcgagggctattgccagtaacatcgatgccaactttttgaaggtgtgtcgtttgctcacttaataggtagtagccatcttttacaaactaattattctttgtactgataatttggctaaacagattgtttcaagtgctataattgacaagtacattggagagagtgcccgcttgattagggaaatgtttggctatgcacgtgatcatcaaccatgcataatcttcatggacgaaatcgatgccattggtgggcggcggttcagtgaaggaactagtgctgatcgcgagatccagcgcacactgatggaactgctaaatcagttagatggatttgatgaacttggaaaggtgaaaatgatcatggctaccaatagacctgatgttctggaccctgcgctactgcgtcctggacgtctagacaggaagattgagattccgctaccaaatgagcaagcaagaatggaagttcttaaaatccatgctgctggtattgccaagcatggagaaattgattatgaggcagttgttaaactggctgagggcttcaatggggctgatcttcgcaacgtctgcactgaagcgggtatggctgcaattcgtgctgaacgggactacgttgtccatgaggacttcatgaaggctgtcaggaagctgaacgacgccaagaagctggaatccagcgcccactacagtgcagacttcggcaaagagtaaggtgcaagattctgatcctgtattcgatcttctaccatgccgggagttctccgccatggtgcaaaagcaacagagaaatcggtttttcaccgtcaggcttctattctgcactgcaagctgaagccatttgtcatgtgtgcaatcaaagagccatgaatggttgtcaagcttatctctgggactggagaaacataccgagaacttgcaaattttataactgatgcttttgcctctgtttcactccgttttttgagtctcaccttgtgtcagtactactgtgtagtcttagttttgagcagttgcatgtacttttgacaccatgcttggtaaagaatagcaaaatggtatcttgattc

SEQ ID NO: 16543 - DNA, 1093 bp, Oryza sativa
  ref <308>: DATABASE ACCESSION NUMBER: AK067027
  ref <309>: DATABASE ENTRY DATE: 2001-12-06
gtcgagagacccaccgatctgccctccgcctcccaacatggcgacgccaccgccgctccgccgcgtcgccgccctcctcctcctcctcgtcgccacagcctccacccccaccgcacgggccgatctcgtcgtcaccagggcggatcggaaggttgacctgacttcgcacatcgttcgtgtcctcacttcgctcaaggttgagaatagtggaccggaggctgtttctcaatttctactggcgtttcccaatgtccaagcaaagaacttagcagctataagagcatttggtactgaggaaaaggtgaaaggtccaagtatggtccttccgattgaagttgttcagccttctggagtgcccccagaacttacattcttttcggcatctttatccaaacctttggagaaggggaagactcttcacttaggtgtcctgaccgtatttacgcactctgtccagccattccccgaagaaatcacacaagctgaatcgcagcttgttgtctatcaggacagtgctcagtatctgtcaccttaccctgttaaggtacagacacttagtatcagattgcctggtggaagagttgagtcctacacaaagtacccaaacacaaaacttgcagagtcagaactaaaatatggaccatatgaagatcttccaccgttttcctactcccctatggttgtgcactatgagaacaataacccttttgcagttgcaaaggaagttataagggagatagagatatctcactgggggaatgtacagattacagaacattacaacattgctcatggtggtgccaaactcaagggtgaattttccaggattgattaccaatctagaccgtacataagaggggtctcatcttttaggcatcttattgctagactgcctccaagggcacattctatatactacagagatgagattggtaacatttcaacatcacatttatggagtgattccaagaagactcaacttgaagttgagccaaggtttcctttgtttggtggttggcaaacgacctttaccattggttatggtttacctcttcaagactttgttttcaattctgatggaaagagattcctc

SEQ ID NO: 16544 - DNA, 2142 bp, Oryza sativa
  ref <308>: DATABASE ACCESSION NUMBER: AK067028
  ref <309>: DATABASE ENTRY DATE: 2001-12-06
ggacggtttgcccgtgagacgacgcgcgtcggccatggcgctcgccctcctctccccctcatcagcgagtgcccaccgtctgccgcgccccatcagctccccgccgctcgggcgcgccgcctcggccaccagcatcggttcctccttcttccccctctgctcctcccctccgtcctccggctcttgctccttgcggagggccagctccgcgggcggcgcaagcgagccagaagcgtcgggggccacctccctcgacgccgacttgctcaggcgtgtcgccggcgccgcggacgccggcgaggcgctggacatcgtcgcggagtcggcgggaggcacgggcggtctggacgcgtccgactgtaacgcgatcgtcgcggcggcgcttgaccggggcaacgtggagctagcgctctcggtgttcgaggcgatgcgatccggctttgcacgagctggggcctggaggtgggcgaggccagacgtgcggacgtacgcattgcttgtccagcgattggcagctgctctgcgtgtttctgatgctcttaggataatcgattatgtatctcgcgcaggcatttcttcggcagaggaggtcccatttgggatgattattcgctgtccaagctgcatggtagcagtcgcagttgcacagccccagcatggaactcagactgtttcttgttcaaaatgccgatatcagtacgaactattttctggagatatcatgagcatcgagtctgaagaagttagcatggacatttcagctttggacaaggcattgcgatttataaatgtgataaaagacggtcttccagctgctgtgcactctattgtgattcgcacaccttcaggaacagcccgtacccatagatttgctacgcagactgtagaactgcctgctcaagaaggagaaagagtgaccatttccttggctgccccatcaaatgtttatcgtgaaatgggtccccttaagatttctgcacgctcacaagggtttagaccaggagaacccatgtctctcaccaatcacatcaacagacaagtctcaagattgctaagagctccatcaaagaacgagggaccattcgtctttaatccatatttgttggtcggtgctcttgctcttcttgcctctggagatgctgcttctgcattcatcgacccaagcctccctagatttattacagcaactgcttttgcatcagctgctgttggaacagcactaaatcaagtgatcctgccagagattcgaaagcttccacaaaagacagtagatataattgctgttcggcagcaacttttatctcagtacgacatgcttcagactcgtctaaaggatctgaaacaactttccgaaaaggaggtgtggatgctggcaagaatgtctcaactagagaacaagatattagcagtaggtgaaccatcatatcgtgctcgtcgaggtagagtgaagagggtacttgaaagcttggaaagtacactcctggcaaagattgagctgatggaaagttatgcaaaattgtgttctatgattgaaattgaagttgagatggactcagatgttattgttgctgaagcagcaagtagtgcagaaaggatatcagaacaaatacagcaactaatggagattgatagtcttgaagagcaatggcgtatacaagctgaggctaatgacgaagcagaaaggctgcttaattcagattcttcagaaacattttccgctgagcatgtataatgagttattttggatattttgtggcactaaaatgatcgatgtctccatcaacttgctcttgtcaacagtgtactagaaggaaagctggatggatagtcaggcaattgcacagagataccatcagagtgcaggtcaccaatgtaaactcgtttcgggaacaccatcgtagcaaatccaaacgctcaggttattgggcgaacctcccttagccaaattgcctaccttattaagaataaggtacccgattgcttccgattgctcgaatactatggtatccttgcgcccaatactggtttgtttgcttatgcattcattgccaagtatatattgtctagatactgtagaaagttttgcccattttggttctgaatgtcttacatttcaaagtcctgatcaaatttttatggacc

SEQ ID NO: 16545 - DNA, 1294 bp, Oryza sativa
  ref <308>: DATABASE ACCESSION NUMBER: AK067029
  ref <309>: DATABASE ENTRY DATE: 2001-12-06
agctctccccatctatctcctctccctctccgcccatttctcctctccacctgcgatccatccgcgcccgcgaggaggagggagccggacgccgccgcggggagagcaggggagagaaggagaggaggagatcgccgtcgccgtcgccgtcgccgtcgccgatctcgagcgggagcggagatggggctcacgttcacgaagctgttcagccgcctcttcgccaagaaggagatgaggatcctcatggtcggtctcgatgcggccggtaaaaccaccatcctctacaagctcaagctcggcgagatcgtcaccactatccccaccatcggttttaatgtcgaaactgttgagtacaagaacattagcttcaccgtttgggatgttggtggtcaggacaagatcaggcccctgtggaggcactatttccagaacacccagggcctcatttttgttgtggacagcaatgacagagagcgtgttgttgaggccagggatgagctccaccgtatgctgaatgaggatgagctacgtgatgctgtgctgctggtgtttgcaaacaaacaagatcttcctaatgccatgaacgctgctgagatcaccgacaagcttggtctgcactccttgcgccagcggcactggtacatccagagcacatgtgctacctctggtgaggggttgtatgaggggcttgactggctttccaacaacattgccaacaaggcttgaagcatcttggccgggcttaaatgaaaggaagacatggcggatatccctgagtgaacactgcctttttacgtatcgaaactatatagtcatgacagataatgatgtggatgttttgggaagataaagctctttaggttccaccaccaaaggagctagctatcagattgtttttcgtggggtgttaaaaaatcgtgcgtgtttcagtttggtttttaatcgaaaggcttacggtgcctgacttttgtacctctgtactcgccacagatgttgtagtattgacttgtcttgggcatagcgtattgttacgtaatcctgttctgtgcagccacccccaatatccttaccagtttatcccccgttgccttcctggccagcattctgctgcctttcttcttggatggcacttcattccttttcagtagctttccgtatgtttatattgaagtaagcgcgttgtaacgtcagcctgaaaattgcaaaccgatcatttcctgtgggctgtaagggtttcttggaacataagaattttacaggaatgggttttgatctcaatgaaatccgtttgggc

SEQ ID NO: 16546 - DNA, 1987 bp, Oryza sativa
  ref <308>: DATABASE ACCESSION NUMBER: AK067030
  ref <309>: DATABASE ENTRY DATE: 2001-12-06
gtcttctgaactaacccaaagatcaggtcggaggcggaggcaaacacgagaagaagatgccgcggcggcctagcggcggcggcggcggcgctggtcccgcggcggccgcggtgcgcaaggtccccctgcggaagcttctgcgtgcggcgtcggtggcgtgcggcgtgcagttcgggtgggcgctgcagctctccctgctgaccccctacgtccaggagctcggcatcccgcacgccttcgccagcctcgtctggctctgcggccccctctccggcctcctcgtccagcccctcgtcggccacctctccgaccgcatcgcccccgccgccgccccttcatcgccgccggcgccgcttccatcgctgccgcagttctcaccgtcgggttctccgccgacctcggccgaatcttcggcgattccatcaccccgggctccacccgcctcggcgccatcatcgtctacctcgtcggcttctggctcctcgacgtcggcaacaacgctacacagggaccctgcagggccttcctcgccgacctcaccgagaatgacccaaggaggactcggatagctaatgcttacttctcattgttcatggccctgggaaacatacttggatatgccactggagcatacagtggctggtacaagatattcccgttcaccgttactccatcatgtagcatcagctgtgccaacctcaagtctgcctttctacttgatattatcattttggtggtcactacatgcatcactgtagcatcagtgcaagagcctcaatcctttggaagtgatgaagcagatcaccctagcacagaacaggaagctttcctctgggaactttttggatcattccggtactttacattaccggtttggatggttttgattgttactgccctcacatggattggatggtttccatttatcctctttgataccgattggatgggtcgagagatctatcgtggaagtccagatgatccaagtataactcagagctatcatgatggtgtgagaatgggttcttttggtctgatgctgaactcggtccttcttggattcacttctattgtactagagaagttatgtcggaagtggggagctggactggtgtggggtgtctccaatatcctaatggcattgtgctttgtggcaatgcttgtaataacatatgtggcaaagaatatggattatccacctagtggagtaccaccaaccggcattgtcattgcttccctggtagtttttacaattttaggagcgcccctggcgatcacgtacagtataccatatgcaatggctgctagtcgggttgaaaatctgggacttggccaaggtctagcaatgggcattcttaatttggctattgtcataccacaggttattgtgtcactgggtagcgggccctgggaccaactgtttggtggtggcaatgcaccagcctttgcagtggctgctgctgcatcttttatcggtgggctggtggctattctgggccttccacgagcccgcattgcatcaaggaggagaggtcaccgataagaatattgctacatataaattgtcggccattctttgcaattcgactcataagaggcactcggaacgctatgcagtgcatgggggaattgtatattatctccgaatcaagaaggggataatgcttgctttctccatgagctatttttgcctttttcatgccggatcatcatatgctgtcgtacattggatgatcttatgctgttgtacattggatgttggtcatttgtagagatactagtgaataaaagttgcaggagttggttcactcgagaaaattctggtcagtatgtcgtccatctgctgcacgacagcagttaggagccgaatagcatgtccatgggttttcatcaaatgttgtatcatcatttgttttttgatacgttcagacggcttcagtgctgtgtgaatatatatgtatggaatatatcgagaaaatgttgttgg

SEQ ID NO: 16547 - DNA, 2921 bp, Oryza sativa
  ref <308>: DATABASE ACCESSION NUMBER: AK067031
  ref <309>: DATABASE ENTRY DATE: 2001-12-06
gataatccccatacctaaacagagaaaagttcgcacttcttcccctctcgcacgcgcctcgccgccgccgcatcgcatcccctcgtcgtcgcagccgctacctcctccgcttagtcgcctcccccccaccccggcacccccacctctcctctccgcctcgctgttgcctcttccatgatgtccctagtgagagcacggcgagggcatctcctcagacctcacacatgccggcgagccgccatctgctcctcgtcgttgctggatggggaggaagaactcggtgacctcctcggcgcccacgccgtcgccgaacgccgatgaggtccagcaggagatggccgtgggccgctcggcgtcggccaggatccgcgaccgggcgtctcgttcgctgctggggcaggagccatacatgacaatgtaacttattcttctcatgattttgctgggtgaatagcaaatgattttgcttttttgctccagtaaatgggaaaattgctctggttactgagcaattagggagttgatctggttgattttgttttggtggaacatagaagaagctgtcggtggaagagaagtgcttttcactgcatagtagctgatttatgctagatttatgagcgcgcagctgttcttgagttttggccctcttgttcagctattcattcagaagctgtcaccgaagaaagttgttgagcttagactcactgatttataagcacattgctctgggaaaatttataagcacatagcgcctcctctgctcctcacattgctctggtaaaatttataaacataaaatttataagcttcctgtttagcaagcagactcatcggtgtgtcacattcagaagataccagcacattccaactggaacctagatctgttggcctattgcatcatgtacaggcaagtctgaaaactaaataagggtaaaaccgtcttttctcctctagttaacaccatcaagtgtaaaaactaatggaagtgctacatagggaagggaaattttgagggtgcatagatagagaacttttgaagtttgggtggtagagatagaagaacaactttttttttatactacatagggaattttctctacaatatatcagtttgcgaggggtacggcgacggagatagtggcaggcctgctcattggaggacagcacctcaccgtcgtcagagctcatcgttgctgcccagctcctcctactctctaggtcagcccaaacggatgattatcggctctgggttctctattcggaggcaaatgctggccaacattcaaagattcatctgctcggtaggcatttattttccatgtaaataaatcttcaaactctcttcatcgttgattgttaattgctttactgctttgaatgacacaaccagatttggagtacgaaaccacctcgccatcacaggcatactgcctgccatgtggacttcgattataaatctacctcgccatcgcgcccatactgttcggtgtggtgtcgatgctcctgttgagaagtagcgcaattggttggttgcttacttaggcttaatattgggttaatgtagatatgaccctatggccttttattgtctttattttaaaatatatatatatattctgaaatacaggaagtatattttgtcccaaactaaatacatcacagtaacagcatggttgccttttttcttagattattttttcttcaactcaacattagggaactacctgttggtattaaaattttacactaataattaaataagtcaacttataaagcgattcatataaggatgtaatctaactcaatttatttaaagattgttttgtgttgctcaaacctacaattatgatgcattaataattttgtacaagatcatcggcttcatgatatacacttatgtaagacttgtacatatcaatgtagtttttaagacatttatgaactgtgttttgaaacaatcatgttttcaaattatcaccttgcaataaataactattgctacctagcaaggtgagaatgtatagccacctcctcaaggatggttaaaaaaaagatcctttttacggttcttgtagagctacacatctggtttaaatttgtggtatctgctatcatccaggaggtatgatactatgtacatcttcgaggcctgtaaaaaggctttttgtttgtaaataatcaccttttctctatagaaatgtgatacatgccttaatttgtgtttacttgtactgatgatatctggtctttgtctaccaggattttatagtaataatggttaattatttgatgatttcatgtaatgatggacttagtcaattgcgagctataataagatgccaaaaaatccctatttttgaaaattcatgaggaaagcactttctaatttctgactcttaacacggtatttgtgaaatttcagctttgatctgtttgagaccaattaaactctactagcaaatttcatgcctgatgtcgacatcaagcttccatctgcttttggagtaactggtggtcttttctgagcacgactgaacccaccatttgataattttgaaatcttccctatacatccgtttgtggaagcaaatgctgaggactccagtgttggtgctggatcaaaggaatatgtgcacacgctcattcagtgtggcacaacggaagaaaaagactgattattgttcaaggcttgaagagagaatacagccagaacaaaatattctaggatctagaaaaggaatttggctgtaatgttactgtggtccatgattcagagctaggaggtacaaaatagcacgtatattgtgttgtatccaagttgtttggtgtgaatgtgtataataatgaatggtctgctatatatgtttgtaggtcattcagatttcaaggtgatcaacgtaaaaatgttttgatatttc

SEQ ID NO: 16548 - DNA, 1894 bp, Oryza sativa
  ref <308>: DATABASE ACCESSION NUMBER: AK067032
  ref <309>: DATABASE ENTRY DATE: 2001-12-06
tttacaccattagagaggagacagacccagagaagctccttcctaggggaactcgccttactctgtaccttaagcgtgaggacaagggtttcgcacaccctgagaagattcagaaacttgtgaagaattactcacagtttgtttccttccctatttatacttggcaagagaaaggttacacaaaagaggttgaggtcgatgaacctgttgaagctaaagaaggcgacgatgagactaaaacagaggttaagaaaaagacaaaaacagttgttgagaagtactgggattgggagcttacaaatgaaacacaacctatatggcttcggaaccctagagaggtatcaactgaggagtacaatgagttttacaagaagacgttcaatgagtacatggatcccttagcatcctcacactttactacagagggggaagtagaattcagatctattctctatgtgcctgctacaaagaaggaggatataactgataggaagaccaaaaatatcaggctttatgttaagcgcgtgtttatatcagacgactttgatggggaactgttcccaagatacctgagctttgtgaggggtgttgttgactcaaatgaccttccattaaatgtttctcgtgagatcctgcaagaaagccgaattgtgcgtataatgagaaagaggttggtgcgaaaggcctttgatatgatacttggcatctcttgtagcgaaaacagagatgactatgaaaggttctgggaaaactatggcaagttcttaaagctgggttgcatggaagacaaggaaaatcacaagagaattgctcctttgctccgattcttttcttctcaaagcaatgaagaattaattagcttggatgaatacgtggaaaatatgaaacctgagcaaaaggacatttactacattgctgcggacagtttgagtagtgcaaaacatgctcctttcctggagaagctcaatgaaaaagagtacgaggttctatttttagttgacccaatggatgaagtgtctgtcacaaatctgaactcctacaaggataagcgtttcgttgatattagcaaggaagacttggacttaggtgataagaatgaggaaaaagagaaggagatcaagcaggaatacagccaaacatgtgactggatcaagaaacgcttgggtgaaaaggttgctcgagttgatatatcaaaccgtctcagctcatcaccatgtgttctagttgcagctaagtttggttggtctgcgaacatggaaaggttgatgagagcgcaatctatgggtgacatgtcatctctggatttcatgcgttctaggaaagtttttgaaatcaacccagagcatgagatcatcaagggcttgaatgctgcctgcagagccaaccctgatgacccagaagctctaaaggctgtagatatcctgtttgaaacttctatgatctctagtggctttacacctgacaaccctgccgagctaagtgggaagatatatgagatgatgagcacagctatggccagcaagtgggcctcgcacgctcaacccgctgagatgaacctgcagcgagactcacctgtcagctctgagccgattgaagccgaggtgattgagccggagttggtggacgatagccagaagaaataagggaatcgtcgagttttccctcaagttctataaaccttaggttctttttcggatccatttcatacgattatgccgtcctcccagaatattgtagcttaattttgttgccgaaacgctgagattttttttttttcagtttggttgagcggccagtgcaatgagctgtgtgttaaaccaataggattgtgttatgttaggaataatggtttctttgctaggaacaattactttgaaacaatcctttgctctcc

SEQ ID NO: 16549 - DNA, 1677 bp, Oryza sativa
  ref <308>: DATABASE ACCESSION NUMBER: AK067033
  ref <309>: DATABASE ENTRY DATE: 2001-12-06
aaaaagagcccctcgaaaaacttttaattccactccacctaatcctgaatcctcctacctatcgcctccccctcctccgagaccgagatctcgcgctccggcgaggaggcgaagcttccagaagcttccggaggaggaggaggggcgcgccacctcgatgctcttcccgaagcggatcaactacatggccccgatgctggcctccgccgtcatcctcctcctcctcgtctccggctacttcgagctcccgtccatctcctcctactccgccgcgccggcgccgccgctcttcgccacggcgctggacgccgtcggcacccgcgagcggtcgccgttcacgtcgcttctctcggccttcgccgactgggacgccgccgtcgggtgcccgcgcatccgcgccaagctcgacgccgtgggggcgcccgggtacggcgccaactcgaccgcggcggcggccgcgtcgatcaccggcggggccgggtggggcggcggcggcggcgggaggtgcgagggcgtgaggacgcgctcgacggggtgtacacgtgccggtgcggggtgagctgcgtgtggagcaagtccgccgccgccgtcgaccggcccgacgcgctgctcttcgagggcgccacgccgccgccgcagagaatgaaaggcctgcctcttcgtgtatatctggatctggaggctgctaggaaaccaactggtttcgaggacatttttataggttaccatgctaaagatgatgtgcaagtaacatatgctggaaaatcattccacactagccgaagttaccatgtatcaactgaaaagagaaatgatgcacttatttactggtcatcttcaaggtgtcttcctcatagagacaaggttgcaaaagatttcctgtcattggttccgcaccactctttcgggaaatgcttgaataatgttgatggtcctgacatggcattatccatgtatccagtttgttcaaccaatgataatggaaaaccacactggtgggatcatcttcactgcgcaatgtcacattacaagtttgttcttgcaattgagaatactaagacagaaagctatgtgaccgagaaattgttctatgccttggaggctgggtcagtgccaatatacttcggggcacccaatgtctgggacttcattcctcccaattctattatagatgcctcaaaattcagctcactccgtgagttggcatcatatgtgaaagctgttgcaaatgatcccgtagcctatgcagaataccatgcatggaggaggtgtggtaccctgggtaactttggaaggtcgcgtgaaatgagccttgacacactgccttgccgactttgtgaactagttagtaagagaggtggtagaaatgcagatgcattgtgaattgtgatagactggacatgtacctagttggtatgtcaatgaagatgaagtgctcggatatcagaagaaaatagtttgatattgttgtcataacacactttgtttcttttgcgttttttgaatttctttttgtctccagagttgagagatgtatacagtagttagggattcatgtttgtaggaaaaaaaaaaggtatgaatgcacattatatcgctaatattatacggtctttatgaccatctgtcatactgatgtcttgaagaaatgtgataatacagaatcagcattaactg

SEQ ID NO: 16550 - DNA, 1951 bp, Oryza sativa
  ref <308>: DATABASE ACCESSION NUMBER: AK067034
  ref <309>: DATABASE ENTRY DATE: 2001-12-06
ggctcactttctccatcgttgacgggcttctcctcctcctcctcctctcccccctcgtcgccgccgtagccggggggcgccgcggcgaagccgccgatgcggccgggtccagccgcggacgccgccttcgtcgatccacgccgcgccgttggaagaacatgctatgtgtttgagcaaagattttctgaattagtcgtctcctgcagcaggctattaggttattagtgcaagacaacttcctagttcattttgtaaattgtaactcttcgcacaaacagtcaaatagtctccactctccagtggctattgaccaatcaccatggagaccccgacaaatctcaccaacacaatatctgcagttcacctgttaaaaatcaatggatattcagtaaccagagcacttggttgttcagagtatatctcgtcgaggagattggctgcaggtggatatgattgggaagttctttactatccacgctattatgagcatggtgtgtactggatagcacttcgacttatgtttatgagcaaggaatgtaagcatgaggtgaaggcagctcttaaatgtcagttagtacatgaggcacaaatttatctgccatccggaagtaaaagtgtatcctctaaatatacagggcaacgagattgcgggccagcgctcctgcttgtaaaacaagatgatttgccaggatccaattatttcatcggggattcctttgttgtggagtgcaccatcactgtgttaagagagccacaggaagctgtgactaatgtttctccaaatgtttccaatccatgctgtgacttgcaaatgcaccttggtgaactcttgctgagtgaaaagggggcagatgtcacgtttgttgttgcaggtgaatctttcttggcacacaagatcatcctcgctgctagatcccctgtcttcatggctgagttctttggacccatgaaggagagtagctcacagtgtgtggagatcaaggacatagaggcatcagtcttcaaggccatgcttcatttcatttacactggtacatcaccggagcttgatcagcagcatgtcgtcagtgactcggagcaggacatcacaacaatgacacagcatttgcttgttgctgcagacaggtatggattggacaggctcaaactgatctgccaagataggctccacgatgacatcaatgtggagactgttgcgacaactttggctttcgcagagcagcatagctgtacacagctgaaggacaggtgcatcgagttcatcatctcttctcgtgcaaatcttgatgctgttatggcaacagagggttataagcttgtgatagcaagctgcccgtcggttctaagtacccttctgagggcagcggttgggagatagaaagtgctaaatagctgaagatttaccactacaaggaaagcaggaatactggttggaaatgcaatttccaaggggcactcctgcaaattattaaagggaagtactgctcaccaaaaggcagtctttcgtaacctatattcaataggaaaaatgagaaattaatgggaaaaatgtacagcaataataaaattcaagtgacagtatataccatagaagtgcattaaggtccctgcaaaaacaaaagaaaaagaagtgcctcaaggaactccgggaaaacagaagaagaggatggtccatgagcaacctatgatttgagaaacaaaaccagttagtatgttcttatttctagggaaccataatagcatttctttacttacataagaattgagtttgtgcattaggcttgttcactgtgtactccagccactgtatccgacttccttgttgttgacaacatttgtgactacctcatgagtaatatcatgtacttgctggtgtgtgtacagtgactgtctcccattgtttaggatgttgcaggatggtgcacatgttgaatcaacccgatctctatct

SEQ ID NO: 16551 - DNA, 3293 bp, Oryza sativa
  ref <308>: DATABASE ACCESSION NUMBER: AK067035
  ref <309>: DATABASE ENTRY DATE: 2001-12-06
gctctctctctcgcgcgcgcgtcgcagccatggtggaggcgacgcggcagcggaggaagccgctggtgctggcctccacgcaggcgctgctcgactcgctgccgggggaccgccgcgggtcggcccttccgccgccgccgccgccggagccggtgcgcatcagggccggggtgctccgcttccccaactcctcctcctcctcgtcttccgcgggcggaggcgagttcggggaggccgcctccttcgtcgccctcccctcgtccgcgctccgccggctcgccgtcgtcaccggcacgccggtgcttgtgaagaatgctgacaataatgtcggaaggattgccaaagcagtagtacttgatcacccatgccttgatgattccctggcagaacatactgagcctgtggacgcagcctctcccttggataatgccatgggtatcttaccctgtcgctcttttccaacaaacggctttccgcccttggatgaagaggtcgcttatgttagcccacttctggcattcaatctgggagtccatgtctcttgtctcaagcttcttgttcaaaaaggagagaaacctttcaagttctgttctaaagttgaagatagtgatctggctgctggtgaagaaagtaatcctattcttcacttagagattcttccatcccctcaagtgccgaaacatgctttgcatttgcgggtttctgttgtgaggattcctgaatgtggtgtgtttgcttctctaaaggcaaattcagccattggaggaagtgactaccaagatatgattgatcaagctctgaatgagcactttaagtttgataggttcctagcgagaggggatgttttttgcataaggaacaattggaattgtggcgcaacctcctgccttgcatgcaacagggaggacaatagactccatcctcatgatatgatttacttcaaggtgactggcatggaaccatcagatgaaccagttcatcgcgtcaactgtaatcaaacagcccttgttcttgggggaggtgcttctgcttcaatacccccttacagtttgtttgcttctcctggtgcttcagttcctttgcacagtgaaatagtggagcatttagcatctatcattgcaccagcactatgtccttcaaacattttgccaaaagtcaagttttccactttcttatacgggccttcaggatgtgggaagcggacggtagtcaagcatgttgccaaccattttggtttgcatgtggttgagtgtagctgtcatgatctaatgacttcatcagatagcggggcaccagctgcacttgtggctgccttcaaagaagctcataagtattcaccatgtataatacttcttcgccactttgatgctattgggaatacatcctccaacgaagggacacaatctgcgcaatctggcactgcagcaaacattgaatccgtcatcaagcagtacattggacaacattgggttgctacggaatcgctcccagcaagagatataaatggaaatccataccttgtggaacctgaatgtgtaagcccacttcaagttatactagttgcaactgcagatcgtgctgaaggaatgccacaatcaattaggcgatgtttccgccatgagataaacatgaaaagtataaatgaagaacagaggaggaacttgatacctgaaacactccattgtgtttcaacgtcagctgatgagagtataaatgacaagttcgtaaaagatttagcagtacaaacgtctggtttcatgccaagggatatacttgcattggttgcagatgctggcatatcttttgcacataaagttgaaacggataaaaataatagcgaaggtgataagcttaaaggcatccttcctacaagctcttctagctctcaaaatgaagaaaaaactttttgcaaagaatatattttgtcttctctagaacgggccaagaaaaggaatcgtgctgcactgggtacacccaaagttcctaatgtcaaatgggaggacgttggtggtcttgaggaagtgaaaaaggttattctagatactattcagttacctctgttgtataagcaccttttttcttctaaattggggaagcggtcaggtgtcctgttgtatggacctcctggcacagggaagacattattggcaaaagctgtagcaacagagtgctctttaaactttcttagtgtaaaaggtccagaattgattaacatgtatgttggagaatcggagaagaatgtaagggacatttttgagaaggcaagatctgcacggccatgtgtaattttctttgatgagcttgattcccttgctcctgcacgaggatcctcctcagattccgcaggtgtgatggatagagtagtttcacagttgcttgtggagattgatgggttaagcgataacagtcaggatcttttcattattggagctacaaataggcctgaccttcttgattctgcacttctccggcctggccgctttgataagcttctctatgttggtgtaaattcagatgcatcatatagagaaaggatcctgaaagcacagacacgcaagtataagctccatgagaatgtttctctcttgtcaattgctcggcaatgtcctccaaactttaccggtgctgatatttatgcgttatgcgcagacgcatggtatcatgctgctaagaacttggccaaaacacttgaggctgatccttcaagaaccagtgaagccagtgctgatgacgtcattgttgagataaatgatttcatgacagtgttaggggatatcacaccatcgttgtctatagaagaattacaaaactatgaacagttgaggaagaagattgagggaccatctagatgacgtcagttaagccttcattctgtgctaccatagcaacctaagtttcagtgtatttgacacatggtggccatgacgaaagcattggctagtgatgaatgtggcaccatttttctttccaccatgccagatcttccgggctccagttatattttgacttcaacacgagctaactgaccttatctgcaaaggcattatcatctagaatctagacagtttctggttctgctttagttagggttcaacgaattgactcaaaattgcaaacgctgcatagcattcatatatagaaagtgagtatactcatgtatcatctcaactatgtatcctcctgtcctctatccttcagaggacaatactgctacgttttgttggcaaccttttcctttgtcaactagatagtctgcaccttcagcaaactaatcctagcatacttttctttct

SEQ ID NO: 16552 - DNA, 968 bp, Oryza sativa
  ref <308>: DATABASE ACCESSION NUMBER: AK067036
  ref <309>: DATABASE ENTRY DATE: 2001-12-06
gcacggacgcataccaaccgacttcatcgcttcccgtcttggtctgaaggagcttctcccgccgtacctgtcgccggagctgtcgactgaggagctcctcaccggcgtcacttcgcgtcggggggcaccggcttcgacccgctgacgcctcgcctggcctccgtcatctccatgcccgaccagctgctgctgttccagcagtacaaggagcgggtgcgcggcgccgccggggacgcgcgggtggcggacatgatgaccaggggcatcttcgccatctgcgccggcagcgacgacgtggccaacacctacttcaccatgcgggcgaggcccggctacgaccacgcctcgtgcgcggcgctgctggtgcaccacgcggcggcgttcgtggacgagctggtgaaggccggggcgaggaaggtggccatcatcgggatgccgcccatcgggtgcgtgccgtcgcagaggaccatgtcggggggcatggagaggcgctgctcggaggggcacaaccagatcgcggtggcgtacaacgccgggatggagaggaggatggaggagatgcaggccaagaagaagagcaccaagaccaagcttgttttcatggacatctacggcttcctgatggacatgatgatgcgtccacgggcgtacggcttcagcgactccaccatgggttgctgcggcactggcctcctggaggtttccgtcctctgcaacgccctcacctcctccgtctgcacccccgtctccgactatctcttctgggacagctaccaccccaccgagaaagcttacagcatcctcaccgacttcgtctacgataattacgtcaagaaactcctcctcgactaactatatatctctgtccatcattattatattatatatatctggcttttgctttaatttgctccctcttttttgtttcaacttttattggattatataatataatagtattgcttgct

SEQ ID NO: 16553 - DNA, 2492 bp, Oryza sativa
  ref <308>: DATABASE ACCESSION NUMBER: AK067037
  ref <309>: DATABASE ENTRY DATE: 2001-12-06
gaatctgccatgatccatgtttggctgcagattttggttatgttatcacaccctgttcatgccctgtaggtagtgattgtgtatgtgatggattatttaacttgttggaagataatcatttgatccataacgttaatcaagctccagatgttgtaaatggctatggtcacataggcgaaagctatgctgatggacaagatgtacatgccaaagataatggacattatatatcccatagaaggcatgataaagctgctgggacagtggcaagtgatggaagcactaattgtgaaagtgcaaatggctgttctgatgtaggtaagttatatggatacaacttcatgccaaagaacattcagtcaagtgaaaggaatattgcctctccaaaggacctttctgatgtccaggactgtgtgcagcctcagcaaccaattctttgtgaagaatcagccaatggaatgacagggttaaaggctttactgaatactgatcaagattgcataaaacagaaccagttttctggtaacagcaatgaaatattgcaagacccaggctcgctaaaagcaatgagtgaacattggtgttctcaggcacctagtgctcctactaggaagaagtttcagggtgttaatgcacctgacatgctgacagatgtgcatcacaaagagcaagaaattcttgccttttctgatgacaagaaaaaggaaactactaacattgacacattttcatgcaaggtgaatgtggagaatggaatgtctggatctggcttagacgatgcaacagaaggtgaagttatgcactcatgcttaatggatgccagtcagggtgaagactttgagctacttaatagcgagaatattttggattcttctcttgacccaaatctggaaggtttaggcgatcgacatgctaatgttattctgaaggacatctccaaagagcaccttctggacattcctcatgtaagcagtgcctgtggtaacaacacagatccaatccatgagaagcatgatgtggcagatatttctggagtggacatgatatacacaacagaagtgccttttccttgtgctggtattgtgtgcatattaaacaccgaagatcctgaaatcccttgcaatgatgatatctttacacctgggcctgtagcatccacctctacttgtgaccagaattcacagcacaatatgcatttggtttctgccaaacctattcctccactaaatgctgctgacttgaatcacaccgacttggttagtgatgtccaaccattgttacttacaatgaagttggaaccttacaccttggaacaaaaggaaactttggtgggtcttagtgaatcttgtaccgtaagaagcaagtcacctgttatgcctgttgatgctagcaatgcaaatgcatgcacatcaactttccattctgctgcagaatttgttaaaaaatctacatgtggtttagtgcaacatgaatgttttgataacttggggagtgtgtctttggatgagtgtattggagtgcttgatgaaatgaattctaaggttcctgatgagtcaggaataagttgtgatgctactacccaaaacagcatttcagcgcatgcattgccagatgtggaatttcttaatcccataacaaccacttcaagcccagaaaggggaggatctgacagtgaggacggtattccaaactatttcgacatagaagctttgatacttgatcaggatttaattccatgggatcaagagtctgatttcatccagctcgaagtttccaggtttcagtctcttgaaagtaggaaagacttgataagattagaacgaggtgcccgctctaatacaaacagatctattatgtcccatggtgcttttgcagttctttatggccagcatttgaaatactacataaaggatccagaggttacacttgggagagaaacaagtgaggaacatgtcgacatcgatttgggaaaagaaggaaaggcgaatacaatatcccgtcaacaggcaattatcaagatggataaaggtggatctttccacataacgaatataggaaaagctccaatcttcgtcaatagcaaagaagttccatgcaacgaatgcactcacttaatttctgatgcattacttcagataaggcacatgaaattcatttttcacatcaatcaggatgccgtgaggcaacatatagttcgcagtaggagaggaacctcccaaggcaagtacgcagtatttaattgggatgaaaagccatgaattaaggttacgatcaagctcatgtgtgaatttattgtcagtaatatatatcggcaggatagaagtatatagcaccatatctaattcggtcccatcctttgcatgtaaatcgttgtatatttccatgcttatcatttagtatataatagatatatgctcaattatcgtcttcagatccatattgttgtaaggtgccacggttttatgtttgaaatttggatttaaatttcatcg

SEQ ID NO: 16554 - DNA, 4185 bp, Oryza sativa
  ref <308>: DATABASE ACCESSION NUMBER: AK067038
  ref <309>: DATABASE ENTRY DATE: 2001-12-06
gtccaccatccccggaaaaaatctttttctcgcctctccttcctccgagccgtttctctccctctctctctcctcctccttcccctgcgcctcctccaccgcccgtgtcgccgccgcgcgcgtctatcccctcgccgccgccgccgtctacgccgcgtgaggtccggattggttgaaaggctgatcgagtgtagagactctgaagctcatatggttggcattggttgatatgataacgtgtcacgttgtgagatgcagacccccgttatgggggttgattgaatgaagtggatagcactcttataactttcttgctcgaagtttcttgataccaaggcaagtagcttataagaagatttggactttggtggcataaatggatgaactaactggcggcttcaacgtggtgttgattacaggctcttgagctaccaagtatgtcagcttcaaatgagaagtggattgatgggctccagttctcatcactgttctggcccccaccacaggattcacaacaaaaacaggcacaaattctggcctatgttgagtactttggccagtttacagctgacagtgagcaattccctgaagatatagctcagctaattcaaagttgctatccatcaaaagaaaagcgccttgtagatgaagtattagcaacttttgttcttcatcatcctgagcatggccatgcagttgtgcatccgattctgtcacgcatcatagatgggacactcagttatgatagaaatggtttcccgttcatgtccttcatctctttatttagccatacttctgagaaagagtactcggagcagtgggccttggcctgtggagaaattcttagagttctaactcactacaacaggccaatcttcaaagttgatcaccaacatagtgaagcggaatgtagcagcacatctgatcaggcctcatcatgtgagtctatggagaaaagggctaacggttctccaagaaatgaacctgaccggaagccattgaggccactatctccttggatcacagacatattgcttgctgcacctctgggtattagaagtgactattttagatggtgtggtggagtcatgggaaaatacgcagctggtggagaattgaagcctccaacaactgcttacagccgaggatctgggaagcacccacaacttatgccatccacgcccagatgggctgttgccaatggagctggagttatactaagtgtctgtgatgaggaagtagctcgttatgagacagcaaatttgactgcggcagctgttcctgcacttctattacctccaccgaccacaccattggacgaacatttggttgcggggctccctcctcttgaaccatatgctcgcttgtttcatagatactatgcaattgctactccaagtgctacccaaaggttgctttttggtcttctcgaggcaccaccatcatgggccccagatgcacttgatgcagcagtacagcttgttgaactccttagagcagcggaagattacgattctggcatgcggcttccaaagaactggatgcatcttcatttcctgcgtgctattggaactgcaatgtcaatgagagctggtatcgctgctgatacgtctgctgctttacttttccgaatactctctcaaccgacattactttttcctccactgagacatgccgaaggagttgaactccatcatgagccactaggtggctatgtatcatcgtacaaaaggcagctggaagttcctgcatctgaagccactattgatgccactgcgcaaggcattgcttccatgctatgtgctcatggtcccgatgttgagtggagaatatgtaccatctgggaggctgcgtatggtttgctacctctgagttcatcagcagttgatttgcctgaaattgttgtagctgctccacttcagccacctactttgtcatggagcctatacttgccattgttgaaagtatttgagtatttacctcgtgggagtccatctgaagcatgccttatgagaatttttgtggcaacagttgaagctatactgagaagaacttttccatcagaaacctctgaacaatccaggaaaccaagaagtcaatctaagaaccttgctgttgctgaactccgaacaatgatacattcactctttgtggagtcctgtgcttcaatggaccttgcgtccagattactatttgtagtattaactgtttgcgtcagtcatcaagctttgcctgggggaagtaaaaggccaactggtagtgataatcattcctctgaggaggtcacaaatgattcgagattaaccaatggaagaaacagatgtaagaagagacaaggaccagttgctacattcgactcatacgttctagcagccgtttgtgccttatcttgtgagctccagctgttcccttttatttccaagaatgggaaccattcaaatctgaaggactccataaagatagtcatacctggaaaaaccactggtatcagtaacgagctacacaatagcattagctcagcgattcttcatactcgttgaatacttggcatcttggaagctctgttctccttgaagccatcatctgttggtacttcatggagttatagttcaaatgagattgttgcagcagctatggttgctgctcatgtttctgagttatttcgtcgatccaggccatgcttaaatgcactgtctgcgctgaagcaatgcaagtgggatgctgagatttctaccagggcatcatccctttaccatttgattgacttgcatggtaaaacagtgacctccattgtgaacaaagctgagcctctagaagctcacctgacccttacaccagtaaaaaaggatgaacctcccattgaggaaaagaacattaactcatcagatggtggtgcattggaaaaaaaggatgcttcaagatcacacaggaaaaatggttttgcaagaccactcttgaaatgtgcagaagatgttatactaaatggtgatgtcgcaagtacttctgggaaagccattgcaagtttacaggtggaagcttctgatttggcaaacttcctcaccatggaccgaaatgggggttacagaggttctcaaactctcctaagatctgtactgtcagagaagcaggagctatgcttctctgttgtctcattgctctggcagaagctcattgcatctcccgaaatgcagatgtctgcagaaagtacatcagctcatcagggttggagaaaggttgtggatgcgctttgtgacattgtttcagcctcaccgaccaaggcttcagctgctatcgttctgcaggccgagaaggacttgcagccctggattgctcgagatgatgagcaaggtcagaagatgtggagagtcaaccagcggatagttaagctgatagcagagcttatgaggaaccacgatagcccagaagcattggtgatccttgctagtgcttcagatcttcttcttcgagcaactgatggaatgcttgttgatggtgaagcttgtactttaccacaattagagctattggaagtaaccgccagagcagtccatctcatcgtcgaatggggagattcaggtgtatccgtcgctgatggcctctccaatctgctgaagtgccgtctatcaaccaccatccgctgtctttcgcaccccagcgcgcatgtccgtgcactcagcatgtccgtccttcgcgacatcttgaacagcggacaaataaactccagtaagctcatccaaggggaacaccggaatggcatccagagcccaacctaccagtgcttggcagcaagcatcatcaactggcaagccgatgtggagagatgcatagagtgggaagcccacagccgccgcgccaccgggctgacgctcgccttcctcaccgcggcggcgaaggagctcggctgcccactcacttgctgacaaggccacaccatgactgtcactgcaagcagctgctgtaggatcagcgagtaggaaaggatgacttgccggccagtttcctgagatgtgatttaagactgatattagctgatgttcccaagcatgatacggggcttgctcccaagatgtgatttttactttacttttggttaatgtgctaccgctgacattagatgttcaagcatatgaaaactgcttgtgctgtaacttgtatgtctgtaacgtaaaaatctttccatatggc

SEQ ID NO: 16555 - DNA, 1303 bp, Oryza sativa
  ref <308>: DATABASE ACCESSION NUMBER: AK067039
  ref <309>: DATABASE ENTRY DATE: 2001-12-06
gcctctcacgtctcacccacacctacccaatctcccggtgcgcacggcgagcgacatggagctccgcgagctcggcgccacgggcctccgcgtcaccccgtcggcttcggcgcctcccctctcggccatgtcttcggcgacgtcccccgcgacgtcgcccgcgccgccgtccgccgcgccctcgacctcggcatcaacttcttcgacacctccccgtactacggcggcacggtgtcggagtcggtgctcggggactgcctccgctgccgcggcgtgccgcgggaccggttcgtggtcgccaccaagtgcgggcgctacagggaagggttcgacttcagcgccgcccgcgtcacccgcagcgtcgacgagagcctcgcacgcctcggcctcgactacgtcgacatcctccactgccacgacatcgagttcaccgacctcgaccagattgtgaatgagacgattccggtgctccagaagatcaaggagagcgggaaggcgcggttcatcgggataaccgggctgccattgagcatctacacttatgtgctcgaccaggtgccgccaggttctgtggatgtgattctgtcttactgccactatgggatcaatgataccgcgcttgtggatttgcttccctacctgaagagcaaaggtgttggcgtgatcagtgcttcacctcttgcaatggggcttcttacagataacgggccacccgaatggcaccctgcaccgaaagaactaaagttggcatgcagggcagcagcagatcactgtaagaagaaagggaaaaacattacaaagctagctatgcagtacagcttgatgaacaatgagatttccacggttcttgttggaatgaactctccagaacaggtagaggagaatgtggctgctgcaattgaattgtctacttccggtattgataaagaacttctgcacgaagttgaagcaattcttgagcctgtcaagaacatgacctggtccagtggcattgagcaagcctgatatctggcagcagcctggctcattataattcattcatgtattcattgagtcaattgtttgcattgcaatatttcaatggtgagcaaaggaaagtcatcatcggaaattcgttggtatgttgtctgtatcaatttagaagtctgtgaatagacaaacagccaaacatggatgctgataataatggaataagttgtgcccatgcaccttgctgtaatgaggcttgtatattgcttcaactacaaactgtaccaaaaaacaaattgcaaaccaataatttgccgatgcaaaaggaaatacc

SEQ ID NO: 16556 - DNA, 1634 bp, Oryza sativa
  ref <308>: DATABASE ACCESSION NUMBER: AK067040
  ref <309>: DATABASE ENTRY DATE: 2001-12-06
gagccggcgttgctgctctccctctctgcaaggcagcgtgtggcagccggctggagagtagcagggcgcgttggccggtgggagtggagtggttgctcttctctccctccgagatctccaccccctcggctccggctcactcggctccggccgacgaggagggccacgggcggagcgaagcgaagcagcggacaggcgagcgaggcgggtgggcggggagcgaaccaacgacgacctcttcccctcccgcatgcatcccgttgtctctccgctcccctcttgcacggatctgccaccggcgcctggatcccatcctctccgccctcccctcgcgcggatccgccattggcgtcgacgggaggggtggatccggcggcctcttctcctcccgcatagatcccgtcatctccccgctccttgctcgcgcggatccgccgccaacgacgacgggaggggcggacccagcagcctctcatacggtgacaacaacgattggtggacgtgggctgacccagttcccggcatctgctgcggcggcgacagcagagttgccgaggacgacatcatgtgcgacttcctgctcaagctgctccgggcagggagcatggtgggcaccgacgcggctctgctgcaggagctggaatccagggcggtgcatacctcgcctagtcagctctcgaggccgggctacggccgactgacttcgaggagatctcgcccgcgccgtgcctgccagcgaccgatgtccttgactcgccgtcggttccagccacaaccgcctagcatggaagcacaccagataagcacatggattttgttgggctattgtgctgtaacacaagtttgccaaacatttatgtggcatcaacatctatcttggaagttgaagctatagataaacattatcaacaacaaaagcaggatgtatcttctcaaaaacaatggaaaaagatttggatacatattggtatgagcagacagtcctcaatccctgcactgcacaactgcattgccctttgcagggttgagttcattgataacctggaatcgacattgattggaggtgccttgacgtcctagaggaagagccttacgatctatattttcttgtattttggcctgagaaaaaaaatctgtacaatcatgttagtgggagtgctagctaaaaatagcggaaaaaagctggatagaatctgactcgggatagaatctgactcctgaaagctggagtaggaaacagtgtgggggaaccagcctgactcgacgaaagaaaagcgggatataatctaactcggggtagaatctgactcctgacgtcggctgggcaaattccctgacgtgggtatattcctgtgttctattttgaacctgatttgtgcgtgaacctgaacctagactcatgtgttattttttgttttttatttgttcctggactcctgtgcttttgaacctgatttgtaagtgaacctgaacctggactcctatgttttttttgttttttatttgttcttgaactgatgtatttttgtatgggcttgtgggcttgtgggcttgtagatggacctagaattttttttttggatgaaggagtatgggcttgtagatggacctggaatcctagaatctgtttgggc

SEQ ID NO: 16557 - DNA, 3220 bp, Oryza sativa
  ref <308>: DATABASE ACCESSION NUMBER: AK067041
  ref <309>: DATABASE ENTRY DATE: 2001-12-06
gaaagcaaaactttcatgctcatcgatattactcttatcgccaaacagtcccacaaatcaagcatcacattaaatttcgtagcactgaagagtgaaaacttcaggttgccaaagaagctgcagtaatctgaccatcgactatccctttggaattggatcatcccattgctctaggcagcccgatttcgagctcatctgcaacaataccacacaaccaccaaggctgttattcaagaatggcaccactgagatcattgactctcccagtactgaatatttggacgttatgttttcccattccatctccatgaaatccaatgtcagtgtgtacaacatgtcatgggatgctcctgggaaatctttcacccttggatatgctagactaaacatcaccggctgtgatttcgatatataccaggtgctcgatcaaagtggaaatgttcctgccaagctttgcaacgttacatgcccaaacaggggaatcacagaggacattgctaggcaggactgcaatggcaccggatgctgctccatcgatgttccaattcgtgctcagaccttacagcttatgtttgtccgccatggcaaaggggcggtcgaacttgacgcacaatccaaccaaagctccctgtggagcacaatcaatgtaacaacagtttacgctgtcattttgtggagaatcctggaccaaccgacgtgtgccagcaccttcgataacaggaccaactatgcctgtattagtgagcacagcaaatgcatggatggctatttcgcaccgattcttggttacaattgcttatgtgatggtgggtaccaaggaaatccatatatactagatggctgctcacgtgatagaggatataatccattccaacagaaggatgtctgcgacagaaagtgcgggagcattgatgtcccatatccatttggcctagaagaagggtgcgctgcaaggaaatcatttcagctaaactgcacaaacatgttatcgtccagcctccaactgaacgatgaataccatgtaacgtatataaatgtcagcaatgggctcatgggcgtagaagacaccacagattacaaacagtacatgtatgggatgcgtgtgacgcaggagcctcaactctatatcggatctggggaatcagcctcagtgcaatgggctgttgctaatctaacctgcctagaggcacagcaaaatatatctggatatgcttgtgttagcatcaatagcacatgcttgggtgtcaactcaacagatgattacattgggtatcggtgtagttgcacacttggcttccaaggaaatccatatatccaagatggttgccaaggttataatctctgcccttctccctctcccttccgatctcgctctttctctgatcttactaagtgatgttgcagatattaatgaatgtttggtgccaaacaaatgtaaaggagtatgctacaatactcctggaagttaccgttgcactgcttgccctgataaaacacagtatgatatgacaacaatgcagtgcacccggacaagaagacaaagtcttatgttaggtgttgtcattggacttagctgtggcttcagcatcctacttctcagcttaggaataatgcttctcattcatagatggaaaaaagacatacaaaagcaactacgaaggaagcatttccaaaagaaccaaggacttctgctggaacaactaatatcttcggatgaaaatgcaagtgagaacacaaagatattctctttagatgagctagagaaggcaacaaacaactttgatcctacacgtattcttggtcatggagggcatggcatggtgtacaaaggcattctatctgaccaacgtgtggttgcaataaaaaggtctaagcacattgaggaaggagagatcagtcaattcattaatgaggtagcaattctgtctcaaataaatcatcgaaatatagtgaaattatttggatgttgtcttgaaaccgaggtcccattattggtatatgactttattcccaatggttcattatttggtattctccattctggttcaaacaatggtttctccttgtcatgggatgactgcctaagaattgcagtggaagctgcaggagctctctattatctccattcggcagcttcagtatcagtgttccatcgtgatgtgaaatcctctaatatacttctagatgcaaactacaccgctaaagtatcagactttggtgcttcgagattggttcccattgaccaaactcatgttgtcacaaatgtacaaggcatttggttacttagatccagagtattatcataccgggcagctgaatgagaagagtgatgtatatagttttggtgtggtacttgtggaactactactcagaaaagagcctatttttacaagggtgtcaggatcaaagcagaatttgtccaattactttctctgggaactgaaggtgaagccaatcacggagattgttgctgctcaagttcgtgaggaagctactgacgaagagatagagagtgtcgcttctcttgcacagatgtgcttgaggctccgaagtgaagatagacctactatgaagcaagttgaaatgaatttacagttcttgcgaacaaaaaggttgaactcatgccctgatgctctagacaaagctgaagagatgcagcctttgctatgtacaagatctgaagctagttgtgcatcattggcgattaacttgggtgacagttataaccctgagtctcaaagtagccacaaatgctatagcttggagcaagagtttagttcatcagttgggttgccacggtaagttgctcagagccatgctataatatgaaattcaattgagctgtggaggaaaatgattggatgttttcagatctagacaggtctgaaatgtatcaactcctcaatgtggtctaccattttattaattattatcccaaataatgtacaattccttttatatctcttaggtaccaagtatcatgtatgctagagcacttgtttataaacaacaggattagtctgatgcgctattatgctgatactgtgattgctcataacatgcgtacacttctttgttatgagaagcacatacttccaatgtgggtgtttcaaaagtttagtcccatgtataaaatatatgatgaatatatctaggtgagaaatggttggaaaatactacaaggaaatgctatatattttcaacattgctcaaccagttc

SEQ ID NO: 16558 - DNA, 3719 bp, Oryza sativa
  ref <308>: DATABASE ACCESSION NUMBER: AK067042
  ref <309>: DATABASE ENTRY DATE: 2001-12-06
gggccccctgacacttcccaaaaccccaaaccgcccatatctctctcctcttctccgctcctcgcttcccccaaaaccctcgcggtggcggtgggccgccggtctcattccgccggcgtccacggaggcggccggagccaggcgctccgcgggccggggagccaccggaaggctggaaccctagcggcggcgggtctcctccccctccccgcgcgccgggcggcgccatggccattcagcggctgctcgcgagctcgctcgtggccgccacgccgcggtggcttcccgtcgccgccgactcgtttctccggcgccgccaccgccctcgctgctccccgctccccgcgctgctatttaacaggaggtcctggtctaaaccaaggaaagtctcacgaagcatttccattgtgtctaggaagatgaacaaacaaggagatctctgtaatgaaggcatgctgccacatattctgtggtggaaagagaaaatggagaggtgcaggaaaccatcatcaatgcaattgactcagagacttgtgtattcaaatattttaggattggatccaactttaagaaatggaagcttgaaggatggaagcctgaacacggaaatgttgcaattcaaatcgaagtttcctcgtgaagttctactttgcagagtgggagatttctacgaggctgttgggtttgatgcatgtatccttgtggagcatgcaggcttaaatccttttggaggcttgcgttctgatagtattccaaaagctggatgtccagtcatgaatttgcggcagacattggatgatttgactcgatgtggttactctgtgtgcatagttgaagaaattcaaggcccaacccaagctcgtgctaggaaaggccgatttatttctggccatgcacatcctggtagtccttatgtatttggtcttgctgaagtagaccatgatgttgagttccctgatccaatgcctgtagttgggatttcacgatctgcaaaaggctattgcctgatttctgtgctagagacaatgaaaacatattcagctgaggagggcttaacagaggaagcagttgttactaagcttcgcatatgccgttatcatcatctataccttcatagttctttgaggaacaattcttcaggcacatcacgctggggagaatttggcgaaggtgggctattgtggggagagtgcagtggaaaatcttttgagtggtttgatggtaatcctattgaagaactgttatgcaaggtaagggaaatatatgggcttgaagagaagactgttttccgtaatgtcagtgtctcattggaagggaggcctcaacccttgtatcttggaacagctactcaaattggggtgataccaactgagggaatacccagtttgctaaaaattgttctccctccaaactttggtggccttccatcattgtatattagagatcttcttcttaaccctccatcttttgatgttgcatcatcagttcaagaggcttgcaggcttatgggtagcataacttgctcgattcctgaatttacatgcataccggcagcaaagcttgtgaaattactcgagtcaaaagaggttaatcacatcgaattttgtagaataaagaatgtcctcgatgaggtgttgttcatgggtagcaatgctgagctttctgctatcctgaataaattgcttgatcctgccgccatagttactgggttcaaagttgaagccgatatactagtgaatgaatgtagctttatttcacaacgtatagctgaagtaatctctttaggtggtgaaagtgaccaggcaataacttcatctgaatatattccgaaagagttcttcaatggtatggagtcatcttggaagggacgtgtaaaaagggtgcatgctgaagaggagttctcaaatgttgatatagctgctgaggcactgtcaacagcggtcattgaagattttctgccaattatttcaagagtaaaatctgtgatgtcctcaaatggaagttcgaagggagaaatcagttatgcaaaagagcatgaatctgtttggtttaaagggaggcgattcacaccaaatgtgtgggccaacactcctggtgaactacagataaagcaattgaagcctgcaattgactcaaaaggtagaaaggtcggagaagaatggttcaccactatcaaagttgagaatgctttaaccaggtaccatgaagcttgtgataatgcaaaacgtaaagttcttgagttgttgagaggactttcaagtgaattgcaggacaagattaatgtccttgtcttttgctcaacgatgctcatcataacaaaagcactttttggtcatgttagtgaaggacgaagaaggggttgggtgcttcctactatatctcccttgtgtaaggataatgttacagaggaaatctcaagtgaaatggaattgtcaggaacttttccttactggcttgatactaaccaagggaatgcaatactgaatgatgtccatatgcactctttgtttattcttactggtccaaacggtggtggtaaatccagtatgctgagatcagtctgtgctgctgcattacttggaatatgtggcctgatggtgccagctgcttcagctgtcatcccacatttcgattccatcatgctgcatatgaaagcatatgatagcccagctgatggtaaaagttcgtttcagattgaaatgtcagagatacgatctttagtctgccgagctacagctaggagtcttgttctaattgatgaaatatgtaggggcacagaaacagcaaaaggaacatgtatagctggtagcatcattgaaagactcgataatgttggctgcataggcatcatatcaactcatttgcatggcatttttgaccttccactgtcactccacaatactgatttcaaagctatgggaaccgaaatcatcgataggtgcattcagccaacatggaaattaatggatggcatctgtagagagagtcttgcttttcaaacagccaggaaagaaggtatgcctgacttgataattagaagagctgaggaactatatttggctatgagcacaaacagcaagcatacatcatcagctgtccaccatgaaatatccatagccaactctactgtaaatagcttggttgagaagcctaattacctgagaaatggactagagcttcaatctggttccttcggattactaagaaaagaaattgagagtgttgttaccacaatatgcaagaagaaactgttggatctctacaacaaaaggagcatctcagaactgattgaggtggtctgtgttgctgtgggtgctagggagcaacccccaccttcaactgttggcaggtccagcatttatgtaattatcagacgtgacagcaagctctatattggacagacggatgatcttgtgggtcgacttagtgctcacagatcgaaggaaggtatgcaggatgccacgatattatatattttggtacctgggaagagcattgcatgccaactggaaactcttctcataaatcagctacctttgaaaggtttcaagctcatcaacaaggcagatggcaagcatcgaaatttcggtatatctcttgtcccaggagaggcaattgccgcatagagcacactgagcatacccactgaaaatctgatgtactactaactctttataatatgcaatctaatcgaactctaggagagtaaattctgatcc

SEQ ID NO: 16559 - DNA, 977 bp, Oryza sativa
  ref <308>: DATABASE ACCESSION NUMBER: AK067043
  ref <309>: DATABASE ENTRY DATE: 2001-12-06
ggcaaaggccagcgcccagcgagagacagccaccgccaccggagcagctgcgttttcagctacttttccgtgccgttttctgttggggggatcgcgttcgccgacgagatgagcagcagcaggctcggcgggggagatcgggcggggatgtacgaggagggggaggacgacgagctgttcggggagtcgtcgtcggtgtccggcggcgagtcggacgacgatggggaaggggaggaccagttctcggagggcggcgcggcggcggcggcggcgttggaccagatggagcaccgccggttcgcgccgcagccgctgcggcggttgaactcggacagcatctacgacatgtcgtccatgacggagcagctcccagccaagtgagtacccgtcgagaaaccctcgattccatccagaaatctcaactcttctgtcctgtgtgctcaccgtccaagaacaccgtgttaatctgcaggaaagggttgtccaggtactacgaggggaagtcccagtcgttcgcgtgcatgtcggaggtgaggtgcctggaggatctgcgcaagaaggagaagccatacaagtcgaagatcaagtcgtgcaacagctacgccgcgctgggagggatcgccaagacgcagtcgtcgagttcttgcgcgaatctgagcatgatgggggcgggcggattcagggctcccccgatccctgtaaacaagaacggctaccatcagtagtagcgactctgtagcgtagccgcgcggtagattttgttcttgaggtcttttctcccctacctctatttttggggattttgttcgcaggcgcattagcctgtgaatgaatgagcttaattacgaggcgtttcgtgatctgcagcagtcatagtaaggagggttgttcttgttgatgtttgaaaaacgatcgttttgtgtactgtaaatacggagcagaggttaaaagtacattcggatgtgctttccttcgcc

SEQ ID NO: 16560 - DNA, 2258 bp, Oryza sativa
  ref <308>: DATABASE ACCESSION NUMBER: AK067044
  ref <309>: DATABASE ENTRY DATE: 2001-12-06
ggctttttcttccctcccccgcttctcctcgccggcgacgacgacttgcccctcgagctctcccctatcctgcccatctcctggcgctccctccctcccttcgcttgcatcctcacgccatcgtcggccccgccttccccttctcatctgttcccagcgatggcatggggatcaatctgctgacccaggcccttctcttctagcagggggagtggaccatgcggagctagctttgggggcactgtgatagagatcgatggtgtggctgtgtggggatcgatctgttggcccatcgcctgattttgggtaggtgcactcaagctcaacatgaagttctcaatccagtgcgttgcgctcgaggtcggcatagccgccgccgccgcctctctccctcctagctctcccttacgagaaggtgagggactgagtggagaccagagacagcgcaaccactcgatccggtgggatggagcctgacctcgactttggttcaagttggtggcgtgcggctctgcaatttgaattgcgttcgatgttctacctccagcgttgatggtaatcccaggcaccttgagggcttgaggtcgatatggcacaattttgctactggggaagaagatgtgttgttgcaatggccaaataatcacctcctttatgctcgatccactcatgatcttcctcccattctctgtctgcgcctgcagtgctgctttttccatgagagtacagcctcttcattcttctcagcgacttgctctggtcagcacctggtactaattgtttgccaccatgtcagattgctagcatctaaagatgcagttttgcatccatattgcaattacaagggatttcatacacaagtactgctttgctgaaggattctgcgtttcagtgcagtagtgggatgaatcagtggaaagtgaattaattgttgtttactcttttacttattacacagttattttgtgagtttacatgatgcttctttgaaatgaaaaatctccaagaatctgacaaagctagaaactcaggtaagtttgacaaatgtcactatattgttttgattttgcacatgattgtgtgatgaagttcgctttgtcagttaatttgtacccaccgaaggttccatatcagatcccacatgtctgaatgctcatttctactataaccttccattcccaaattctttgtttctttacatacatgagcactccttaatttgttgacaaatcaagtttgcttcataaatgtaatattggtatcggcaagtaacaacaaatctgaaactattatttgctttggaggtaaacatgttctatacatataattgggttgcgtgcttttttttatagggcattgttagcaacttaccatataacaggactgtcagattttttatgtgttgcttgttcttcgctttgtacatgtccattttggtaaatggtgtacgattttttttctggacttatgttcttcaagcattgtagggttgcagtcttattagtcatctactactgtagccttatctataatgtgcattttggaagtgacgtttcagattttggtattaactataaagactgagaacccatgccacatactttgtagaactcccatgtgtattggagtaatgtgattagttatccaaaacattattgttcatcagaaatgatttcagtaatgtattacttgggcatatgacttttctaaagagtgtcttatctaaccaactagcttttctgttgcctcataaaaaacatttagttaatcagagactattttaggggggagctgtcctacaaatgaatttctgcttcattaacataagcagatgtttcttgatatctatgcttttaggtgcatggtctgcaacatataatatatcattgccacataatggtacttaattagctcttttttacaaaaccgaatgattaggtccatttgtatatagacttatatatatatatatatatatatatatatatatatatatattttgttgcttgctcttttaagtaggataagttaacatggattttggactaacttattaggtgattttatcttgcagaattcaagctctatttttgatcctcacgtgatggcagggttcgagttgtatagcggtttctgttagaatgaatacattaagaacatgtttactaagataaatccattgttaaagttgtaacatttcttaccgacaatatgtaatttaaagtgattatagaatctatcgattgtgcttatggctc

SEQ ID NO: 16561 - DNA, 2140 bp, Oryza sativa
  ref <308>: DATABASE ACCESSION NUMBER: AK098984
  ref <309>: DATABASE ENTRY DATE: 2002-08-28
gaccgatccctctccctctcccgccgccaccgcctccgcctccgcctcccctcgcgccgtcgccgtcgccaagagccgccacttccgcttccgcctctgcctcgtccaagtccaagccaactacctaaacctaaaccctattcttcttctttcgcctccgccgcgatgtcgtcggagcctccacccgatgccgccgccgccgccgcctcctccgcgggggatctcgcggccgatctctcctccgccaccatcagcaagaagcagctcaagaaggatgcgaggaaggcggagaaggccgagaaggcgtcgcagcgccagcagcagcagcagccgcaggccgacgccgacgaccccttcgcggccaactacggcgacgtccccgtcgaggagatccagtccaagaccatctccggccgcgtgtggaccgagatcggcggcctcgacgaggccgccgccggccgctccgtcctcatccgcggcgccgcgcaggcgatccggcccgtcagcaagaagatggccttcgttgtgctgcgcgagagcatgagcaccgtccagtgcgtgctcgtcgccagcgccgacgcaggggtcagcacccagatggtgcgcttcgccacctccctcagcaaggaatcaatcgtcgacgtcgagggcgtcgtctccctccccaaggagcccctcaaggccaccacgcagcaggtggagattcaggtgaggaagatctattgcatcaatagggcgatccccacccttccaatcaaccttgaggatgcctcacggagtgaggctgaaattgaaaaggctgaacaagctggagagaagctagttcgtgtgggccaagatactcgcttgaactatagagctattgatctccggacacctgcaaatcaagcaatattcagaattcaatgtcaagttgagaacaaattcagggaatattttctgtcgaaaaattttgttgggattcacagcccaaagctaattgctggatccagcgaaggtggtgcagctgtattcaagctacagtacaatggacagccagcatgtttagcacagtctcctcagttgtataagcagatggctatttgtggtgggtttgaacgtgtatttgaggttggacctgtttttagagctgagaattcaaacactcacaggcatctgtgtgagtttgttggccttgatgctgagatggagattaaggaacattattttgaggtttgcgacataatagatggtttgtttgtagcaatatttaaacacttgaatgaaaattgcaagaaagaactagagacaataaacaggcaatatccatttgaacctctgaagtatttagagaaaactttgaagctcacgtatgaagaaggaattcaaatgctgaaggaagctggaacagaaatcgaacccatgggtgacctcaacactgaagctgagaaaaaactaggccggctcgttaaggagaagtatggaacagaatttttcatcctctatcggtatcctttggctgtgcgtcccttctacaccatgccttgttatgacaacccagcttacagtaactcttttgatgtctttattcgaggagaggaaataatatctggagcacaaagaatacatttaccagagctattgacgaaacgtgcaacagagtgtggaattgatgcgagtactatttcatcatatatcgaatcgttcagctatggtgcacctcctcatggtggttttggtgtcggcctggagagggtggtaatgctgttctgcgccctaaacaacatcaggaagacatcacttttccctcgcgatccacaaaggctggtgccataatttgctttttttcccaagagcaaggtttggactcagtacggactgggcagttttcctcggctggtttttttacctggacattattttcgtatttattaatgtgctgtactgcaaaagctgctcctttccacaacatttggaatagttgccgatacatttggaatagggctcaacgttggcgttgtgatttcgttgatgattccgctattcgtaacaatggcgaatccagagcagaaatgaccctatgtcagaaacatatcacatactcgtatgcctatatttccaaaagataagggattatgaaaggatgacatattcaagtccc

SEQ ID NO: 16562 - DNA, 1147 bp, Oryza sativa
  ref <308>: DATABASE ACCESSION NUMBER: AK067045
  ref <309>: DATABASE ENTRY DATE: 2001-12-06
ggccatccgcaacgacctccacaccgcaacggtccactcgctcgcctccgtctccctcccgcgtctagggtttcgccacgtctcacgcagccatggccgcggcggccgcgtccacctcgctccccgtcccgcgcgtctccctcccgccgtccgctcgcccagccgccgctccccggcacggtctcctcatccccggtcgccgtgggtgcttccgtctccgcggctcaccagcggcaccggccgccgccgcctcgggctccccttccgtgccttcctcttccccggaggctgggtcgggcatcggggatgccctcggtggcgtcgccatctactccgcggccaccggcgagcccgtgctgttcagggacctgtgggaccagaacgagggaatggctgttgttgccctgctaaggcattttgggtgcccttgctgttgggagttggcctctgtgttgagggatacaaaagagagatttgattcagctggtgtcaagctaatagccgttggtgttggcactccagataaagcccgtattcttgctgagcgtttaccatttccattggactacctctacgcagatcctgagcgcaaggcctatgatctcttgggtttgtattttggtattggtcgcacattcttcaatccagccagttgtgttttcacgatttgactccctcaaggaggcagtgaagaactatacaattgaagccaccccagatgatagggctagtgttctacaacagggtggaatgtttgtgttcagagggaaagaattaatatatgcaaggaaagatgagggcactggtgatcatgcacctctggatgatgtcctcaacatctgttgtaaagcccctgcggcatgatattgtgtaatcaatgtcccatgagaattttcatagcctggttctgttcgtgtcccaaagttgtatgcagaaaagcatctcttgattttggaaggctggcttctgcaaggatagtatctctttgtctgtacgtctgatctaccatgctgttgatatgtaatatatcagttgaaaacttgagggatgtaggcagaccaaaggactttctcatgccataagctcagcagttcttttccttttcctcatagaaatgtactaattatagaagagaatcttacactgt

SEQ ID NO: 16563 - DNA, 883 bp, Oryza sativa
  ref <308>: DATABASE ACCESSION NUMBER: AK067046
  ref <309>: DATABASE ENTRY DATE: 2001-12-06
tagtctccactcctgcatcacctcaccaccatggctcagctcctctcctcctccgctcctccccgcctccatctcgccgccacgccagcttgcttctcctcctcttcaggccatggcgtctcccgcttgtccgtgacgtcagcatgctctgccgctcccggtagcagatttcttctcgatttttctctttctttcgtgattccgtccccatttctgggcatcttgagagcttaattctattgtttcgaacgggcagggtcgctggtgagcatgaggaggcagaaggcgaggtccctgaccgtccggtgcgagcagggagccaagggcggcggcggcggcggcggcggtgggctggacgtgtggctcagccgcggcgccatgctcggcttcgtcgccgccatcaccgtcgagctgaccaccggcaaaggcgtgctccaggtttagctcctctgcaaaattcattctaacctgtgaaaaaaattctctgaagaatttcgccgttgaatgtttggtctctccgatcctgcgccgcagaacgtggggctgacgtcgccggtgccgacggtggcgctggcgctcaccggggtggtcggcgtcgccaccgcgttcctcatcttccagtcggcgtcgcaggactgatcggacgatcgccgccgacgacgcagcttcttgctgcttaccaatgggccaatggcgtcactccattggtctccgtgttcttggtgcgttttgcgtgatgcgtgtgtgtggggagatgtgtttcatagggaggggtcaaactgtaccggtgttaaaattatagagatctttcttgttcagaaattactattattatagtactacctctgttttcgtttccaaataaatgacgttgtttagtgcc

SEQ ID NO: 16564 - DNA, 1403 bp, Oryza sativa
  ref <308>: DATABASE ACCESSION NUMBER: AK067047
  ref <309>: DATABASE ENTRY DATE: 2001-12-06
gggagcgacctgagagagagagagagagaaggcaagggaaggaggagaagaagggggacgaagcggacgaggcgcgcgcgcgccatctttgctttgcttcctctctcttccctctcctctcctctcctccggtcgtcggcctccccggccggccggcgcctgcccgtgcttgaggcgcggcggcggatacggggggtgacgacatggccgacgggggagagaagtgccgggacgcggccggcgagggcggcggcggcggcgacctgtacgccgtgctcgggctcaagaaggagtgctccgacgccgacctcaagctcgcgtaccggaagctcgccatgagatggcatccggacaaatgctcatcctccagcagtgcaaagcacatggaggaagccaaggagaagttccaggagatccagggcgcctattccggtcttaatcttccttatctcaaactccaccctgttctgtaatcacttcacttgttacaacgattatgctacagataatgaactgatcacaaccaaagaaaacggatttagctagttggcaaacttattgcatggagccctcgtgctcccatcccattgttcttgtgcagtcctctcagactcaaacaagcggttcctctacgacgtgggggtatatgatgatgacgacaatgacgatgacaacctgcaggggatgggggacttcattggtgagatggcccagatgatgagccaggcacggccaacgaggcaggagagctttaaagaactgcagcagctattcgtagacatgttccaagctgatcttgattcgggtttctgcaatggaccctcaaagtgctaccatacccaggcccaaagccagactcgaacatcctcaacctccccttcgatgtcaccgtctccaccgcctccagtagctactgaggcagaatcgccatcatgtaatggtattaataagcgtggttcatcagcaatggactctgggaagcctccaagagccagcgaagtcggttctggacagagtcaatcagggttttgtttcgggcagaagagtgatgctaaacaagcggcgaagacgcgaagcgggaacacggccagccggaggaggaacggccggaagcagaaggtgtcgtcgaagcacgacgtctcgtctgaggacgagatgccaggttcgcagtggcacggcgtggcctgaccttttgttcgtgactggtttggtcctttgatgtgccggagcaccgagctgctgccgctgccactctgccgtggcggtggcgctgctcggagtgagtgaccgggcgtgccaaaactcgtcgatgctgctgctactgcgcaattctttctctccatccgtgtcgcggctgtgttgtactacgtagacattgcattttacaattgattctcagtacc

SEQ ID NO: 16565 - DNA, 1257 bp, Oryza sativa
  ref <308>: DATABASE ACCESSION NUMBER: AK067048
  ref <309>: DATABASE ENTRY DATE: 2001-12-06
gccccccatctctctctacctcgccggtggcacacggcgagcccttctcctccgcgccgcctcgcctcgcctccgcgcgcgctctcgccgccgcggaaccggcccgggaggcacggtgcggactgcctcgtcctcttacctgaaccctgccctgctcttatcccccttggtgcggcgcaaggacggcgatcaatcgatcatctcggttcgaatcggattgcagggggagaaaaattgtgaatacacttttgctggtattctcatcgttcctaggttcagctacaaaaggttgaagcaaagtaccaaagatgacatctgaagagaataaagctgttacacctaatgaacccatagaggcatcaagctctggttctaagcgtaagcgtgttcgtccacggaagtctgagtatggcatgcatgaaaaaccatatagtgtacagcccattcagagcgtcccacctcttcacagcacagaagatagctcaaatatccaacaggatgggatacagatcaatcataaatcaggtggtagtgttggtccgtctgccaatctggttaagacttctctcagccaagcctccacttatactagtgcttccttgcaaagtaattcagtcaaagatggtattgttggcaagtattttgttggtaagatgtccaacaaagttcctgggttttctctcattacggtgaaagtgaaggacaatctggtcctcaaaggttggattccagatgaaagtgacctccgcccaataacaccaaaggatgacctcgccccagatcttcccatgcttcggccaagtcaagttcgaaagaggccatctactatttacaagcaagctgctggtccaattccagtccccttggaggatgttacatttgcaaagcctctacagatgaggaagcctgttgagaaatctgtcgctaagtgagagaacctgaacttctgtagaaattctgaagtctggagaagttcaaagaaggcaaaggctagtttagattaagggaacagaactgcggttgtgatttctctgtactgctccatatggcattggacggttggaattgattgatgtaatcactgttgctgtaatctcttttcttaaatactgaggtgtcagcatttatgtctgaggctttgacgaatcggttgccggatctgaagctggatgcactagttgcatttacaagtgtgtatggcaccttgtagaagctttgtagaactgtacttaaagtaaactccatattttgtgaact

SEQ ID NO: 16566 - DNA, 2159 bp, Oryza sativa
  ref <308>: DATABASE ACCESSION NUMBER: AK067049
  ref <309>: DATABASE ENTRY DATE: 2001-12-06
gcccatcgcatccgcatctcggcatctcgcgtcgcgacccgcgacccgcggcggcgcgtcccgaatggcggccgatcgcccgctcgcgagggttgatgagatagcaaggcgccatttccaaatatttcgatccgcagcgtaatctctctcgcgtgcgccggtgcgcgatcccctccctccctcctcctcaatcccccagatcgcgtgcgccgcgggctctccccgcgttgactctccagcatctagatccgcgcctgcgctcccgacgaggtcggccggtctacggtcaccctcgtggtttccattgacttgtttttctcttctttttctttttttcccctcttctccccaacctcgcaacaaaatcggcggctatcctcgtgtttcttcttcgctccgtggccgcagaatccccccaccgctgttcttgcggcgccggtgttcgtttgaaagttggctgcgctgtcctgggaggcctcagcagcagcagcagcgagctttgctcttgtgagcgcttcgtgtgcttgcagctgcgttttattattgcgtcttggagctgtcacgacgtggttgttgagaggaatctatcatcccttcacagttgcgaggaaagcttcctgtgatgtctaatctatcagagccctcaaaagaagctgcatcagctgatgtttcaagtgctgtccagaaaactggagcatggagtaacacgttgaacattcttctgcaacaagcttcagtctatggtgtggctgctggttattgcctgtcagcatccctgctctccattatcaacaaatgggcagtcatgaaatttccataccctggagcattgacagctttacagtacttcactagtgttgttggagttctcttatgtggacaactaaagcttattgagcatgatggccttaatttgaggaccatgtggaagttcttgcctgctgcggtgatgttctacatctccatcttcacaaacagtgaacttctactccatgccaatgtggacactttcatcgtgtttcgctcagctgtgccaatttttgtggccattggagagaccctttatcttcaccaaccatggccatcactcaagacatggctttcactttcaactatacttggtggaagtgtgatctatgttttcacagacaaccagttcactgtgactgcttacacctgggcagtggcatatcttgcaagcatgtccattgactttgtctacatcaagcacgttgtcatgaccattggcctgaacacatggggccttgtgctttacaacaatctggaggctttgatgctcttccctcttgagatgcttctaatgggggagcttaatcagatgaagggcgacagcgctaaagtgacaaactggctttcatctgatgtcattcttcctgttgctctgtcttgcttgttcgggctatctatatccttcttcgggttctcctgcagacgggctatctcggcaactggatttaccgtgctcggtatagtgaacaagctcctgactgttgtgattaatctccttatctgggacaagcatgcctcctttgtgggaacaattgggctcttgatctgcatgtccggtggtgttctctaccagcaatccaccacaaaaccaaaggcccccaaggctgagccaaaagaggagaatgatgaggagcagcagaaattgctggagatgcagcaagggctcgaaagtagctcaactcagaagcaagcgtcatcttaagcctggtaggaaatttggcgtcgatatcttactctcaacctcaagacggcttccctgtatcatattatgggatgctaaagaagaatcatttggccaaaggatgtttgttcgtcatgctagaatcctgtaatgctgttggcatgaaaaatctcagagaaaacttaatgtcactttaaaattctttgtttagtggtataccgtaattcatttgttagacctgtggtagggtatcaattatcaaagaatcctgaaacatactcgaacagaatactccgtatacaatatgctgtttcattgataatacagggtggttacccttttccatgcagtatatttgtttttgcttttcgttttgtgatgaaggaaaattatcttttgtactcaaattgcctgtatattatgtattctgtattgtgttgaaggctcg

SEQ ID NO: 16567 - DNA, 1650 bp, Oryza sativa
  ref <308>: DATABASE ACCESSION NUMBER: AK067050
  ref <309>: DATABASE ENTRY DATE: 2001-12-06
ggtctctccctctcgcggattactgctcgctcgcttcacgcatcgtccctcctgtctcgctcgctagctgtgttcccacttctccccctcgcactacttaaaaccgccgatcccccattccaatcctgtcgcgatacgacttgattcggcctctctctctccgcgcgcgcagcagcagcagccgccgatggacctccccctggtggacctcgcgccgtacctcgaccgcgccgtcgccgggggcggcgcggcgggggaggaggcggtgcgcgcgctgtgcgcgacggtgagcgccagcctgcgggacacgggggcgctgctggtgaaggacccgcgctgccccgccgccgacaacgaccgcttcctcgacgtcgtcgagcactacttcgcccgatccgccgactccaagtgcctccaggagcgccccaacctccactatcaggttggtgtgacacctgaaggcgtggaggtacctcgcagtcttgtcgacaaggagatgcaagacaagatcaagagtatgcctgaggagtttcagcccgccactcctaagggtccagacccgaaatggcggtatatgtggagagtgggtcctcgcccagcgaatacccgttttaaggagctgaattcggaacctgttatccctgatggattgcctgaatggaaagagaccatggattcctggggttctaaaatgatttctgcaattgaggttgttgctgagatggctgcagttggatttggattgccaaaggatgcatttacctctttgatgaaggagggaccacacctcctagcaccaactggaagtgaccttgagcggcatggttctgagggcactgtttttgctgggttccattatgatctcaatttcctgaccatacatggtcgaagtagatttccaggcctgaacatctggctaaggaacggcaaaaagatggaagttaaggtccctgttggctgtcttctaattcaatcagggaaacagctggaatggcttactggtggggagtgtttagctggaatgcatgaggtagtggtaactaagagaacactagaggcaatagcattagcaagagagcaaaatagaagcttgtggagggtttcatcaaccctgtttgcacacattgcttctgatgcaacccttaagccattgggccactttgctgaagcatccgatgctcatagttatccaccaatctgtgctggcgactacgtcgaacaggaactatcagtaatcaatctgaaaggaaagaatggattctagacgttatgcagatttttcgttaaccttacaattcatatgatcagcaaacggaacaacagtccaggctgatatgtatcttcattgctggaggctcacatgctgaaactgttgggttgttccctgcacagcccgtacatgtccatgcttcaaacctcttgttaagatagattgtctctcttcaaatgtactaaactggtatcaattgtgcaaataaaatatttactctttaacttccgaacggggtgttggacgggcctcacctgtgggtgatccgttttgggatgtgttcttagtaggagggattctttgatcaaaggaatcccttctttgtaattgtaaatatttcttcttagtgaaatgaagcacaattctccagtgcatttggg

SEQ ID NO: 16568 - DNA, 1397 bp, Oryza sativa
  ref <308>: DATABASE ACCESSION NUMBER: AK067051
  ref <309>: DATABASE ENTRY DATE: 2001-12-06
gacatcgatcaactccttccccaagtcgaagcaaaatccctagcgatgtcgtcgccgccgcccgccgccgccgccgcgatggccgtcgacgacgccgacgacgaccagctcgcctccatgtccacggaggacatcgtcagggcaacccgcctcctcgacaacgagacccgcgtcctcaaggatgagctgcagcggacgaaccttgaggtggaatcctacaaggagaagatcaaggagaaccaggagaagatcaaactcaacaagcagctgccttaccttgtcggcaacatcgtcgagatattggaaatgaaccccgaggatgaggctgaagaggatggtgcgaacatcgatctggggatttggttggagtcaacaaagacagctacttgatactagacacgctaccttcagaatatgattcacgggttaaggcaatggaggtagatgaaaagcctacagaggattacaatgacattggtggccttgagaaacagattcaagagcttgttgaagcaatagtattgcccatgactcacaaggaccggtttcagaagttgggaattcgccccccgaaaggtgttcttttgtacggaccacctggcactggaaagaccctaatggctcgtgcatgtgctgcccaaactaacgccacatttctgaaacttgctggtccacagcttgtccagatgttcatcggtgatggtgcaaagcttgtccgtgatgcctttcagcttgcaaaggagaaatccccctgcatcatttttattgatgaaattgacgcaattggaacaaagcgttttgatagtgaagttagtggtgacagagaagtgcagcgcacaatgttggagttgctgaatcagctagatggattcagtagtgacgagaggataaaggtgatagctgcaactaatcgcgcggacattcttgatcctgctttgatgaggtctggtaggctggaccgaaaaattgagttccctcatccatccgaagaagcacgagctagaattttgcaaatccattcaagaaaaatgaatgtaaaccctgatgtcaactttgaagagttggcacgatctacggacgacttcaatggtgcacaactgaaggccgtttgtgtagaagcaggcatgcttgccctacgccgagatgctacagaggtgacacacgaggatttcaatgaagggatcatacaagtgcaagccaaaaagaagtccagtttaaattattacgcttaattcttccgagagagttattaggcctaaggaaacgctccgtccaaaattgtttgtttgtaacactaccgttttatatatttgtgtggttcaagatgtgattgtacgaaacatgtcttgcgctgttccttctctgcttgatatatactgatagaagttgactcgtcc

SEQ ID NO: 16569 - DNA, 2267 bp, Oryza sativa
  ref <308>: DATABASE ACCESSION NUMBER: AK067052
  ref <309>: DATABASE ENTRY DATE: 2001-12-06
tgggtattatccaatccttccgccacgcctccgcctccgccgccgcctcgccgtccgcctccgcggccgccgccgccgcctcgcggcaaaaccctaaccctcgaactcccccccaccccactcgcccccgcgcggagcaggcgagcggctaccccaacccgaccccatggcgtcctcgacggcggccaacctgtgggttctgctcggcctcggcatcgccggggtcctcctggcggcgaagcggctgcggcggcccgcgcggcccgacaacggcgcgttcatcgcccgcctcgagctcctccccccgccgcagccgccgcccccccaggcgcgacacccactcacggggctctgcttcgccatcgccgacgcattccacgtaactggttatataacaagttttggcagcttagaatgggcaaagacacatgatgcagcaacacaaacatctctagtcgtttcatctcttgtagatggtggtgctatgtgtgttggaaaaactgttattgatgaaatggcatttagtatccatggtgagaataaacattttggcacaccaacaaatcctgctgctccagatcgagtacctggaggatgttcaagtgggtcagctgttgctgttgctgctggcattgtagatttttccttaggtattgataccattggaggagtaagggtaccaggtagttattgtggcgtcttggcattccggccttcacatgctgttgtccccaacaatggtgttattcctgtcgctcctagcctggatgccataggttggtttgcgagggatccaagtgtactgcgtcgtgttggccatctccttctgaggctaccctacgctgatattcgacaacccagacatttctacatagcagatgattgctttgaaatgtcaaaggtgcatgcaagaagattgactcaggtggtgacgaaatctgtggaaaagctatttgggagacaagtcctgggtcatgttaatcttgaaaattatttggcttcaagaatacccagcctgaggaacaattcaaatggtcatggtgactcaaagttttcttcattgctagcactttctagggctatgcagtttcttcacaaacatgaattcaaagatcaacatatggagtggataaactctgttaagcctgctgttgatgcatgcatagttggtaatttgtctgatgatggtgagtcaactatcaataacagtcaagatgcaaggaaagaagtccgtgcagctctcggtgctcttcttaaggatgatggaattctggtcattccaactgttctgggatgccccccaaaactaaatgccagggaactttcatctcaggactacaatgttcagacatcatgtcttacatctttagctagcatgtcagggtgttgccaggtgacggttcctctgggtacacatgataagtgtccagtttcagtttctttgattgcaaggcatggtggtgatcgatttttattggacaccattcaaacaatttatgctaccatccaagagcaagttgacgctctagcaaagtctaatgtctcgagtaaacaggcgatgagtgaagaagctgctgaagctgctaaagagaaaggtaacattgcatttaaggagaaacaatggcaaaaggtaataaatttctatactgaagcaatcaaattaaataataaagtggctacatactacagcaacagagctgctgcttttctagagctagctagttaccgccaagctgaggcagattgcacaagtgccatcgatgttgatccaaagattgtaaaagcttatttgaggagaggcactgcaagggagatgctgggttactacaaggaggctgttgatgatttcagccacgcccttgttctagaacccatgaacaagacagctggtgtggccatcaataggttaaagaagctatttccgtaaatactgggctgttggattttttttctgcataaagatactcaagttctgcatgcctggggggtgaaaaagaaggtacctgagtgccaccgattgatgctgctatccaagttcataaggtactaactaccgttgctactggcgatagaactgtctatcatctgtgttttcaattagttgttaccccccaagttttggaaaagtggaatcgaaaacagaattttgggagttgatcatagtaaacaatgcctttaaatatgctctagtggtgttcttggcccacttccatgtataatatcggttttggcaattatttgttgaggcacccatatttttcctgtcg

SEQ ID NO: 16570 - DNA, 1821 bp, Oryza sativa
  ref <308>: DATABASE ACCESSION NUMBER: AK067053
  ref <309>: DATABASE ENTRY DATE: 2001-12-06
gggcgtgtgaaagccgcttctttttttcccatcatttgctgctgctgctgcacactcctcggcgcgagcccaactccgtccctaccgcccgccccgatccggccgccgccgccgcgcattcccaaaaccccctcctctctgctcttgccctgacccccgccacggaactcctctccgccggcgtggtggtagccccccccccccccccccggcgctccggccggcggcctccggatcgcgcgatctgactttgtgctggaatccccgtcgcgtgtgatattatagctgttgcccttacctcgctgtttcggttgcggtgcggggggttagggttcttgcacaccgctgtggaattgtggatcctagcggctgggatctctctccctcggtccacccacacatgatcttcgcggggaatttggtgtggttttaccaccattacgtgtagggagactagggctcgtgttgtcgtgtgtttgttgttgttgttgttgtactagcttggaggaggctgctgctgcttgctgcttattctcgcgtggttgaccatgaaatcctgaatccccgttttgctttcgattggcgctattgaattgagttttagttttcagctatctttgacttagggaaaccaaacccaaacaaagaagctgcactttccccctactctacctcccatagcagtttgctcattttttgtttggtggcgtgcacatcactatcaaagtagtagtagtatctaaggtccatctcttcgcaagcggtcatcaatcacttaattcttgcaatgcattttgtaattcaatcatagggaatcaaggtgcggtggttaagcccatgcaatttggtaataagcactatagctcatcagtgttatagataagagatcttgtgagtgtttagggttttcgataattcggtcgaccattcgttggttcttggtggaagggagggaggttcttgtttggtgatgtcttgtacctccccagacccgcccgattactgctcggccgcatcgcctgagcttaagctataccaagccttcatcttctccgtgccggttttcttcacgttcgtcttgcttctcttcttctacttgttctacttgcgacggcgcagagcaaactggcagtccttgcgcatgaggactaataacttgatacggggagataaccccagattggagtgcggcataaagaaggagatgcgggaaatgttgcctgttgtggtcttcaaggagagcttcttgatcagggaaacacaatgctctgtctgcttagcagactatcaaccggatgagcggctccagagaatacctccttgtggccataccttccacatcgattgcatcgaccactggctctcgacaaacaccacttgccctctttgtcgagtatccctccttccatcccccaaaaccgccagcattgatccagtggatttggaagcacagaccgttgaagagaacagctctttggatgtacagtatcaggagggccgcattgacgagaacacgcgacaggaggatcagacattgcaacaaggtagtgagggtccaacgcatcaagctgaagaaaacgaagagacatcagtcagagtaaccactgagccccaagtagaggccgaggggtctccaagcacaacctgccggccttgtaaaacgaagaaataaggcttctgctgatgtaccatgtcgtggcgatctgtattttagatgctcattaagagcgtataaagatgtcaggttatagatgggtaaatggtctaatctctgtattcagacagaaataatggtgatggttcatacaaaatttcagatcc

SEQ ID NO: 16571 - DNA, 1645 bp, Oryza sativa
  ref <308>: DATABASE ACCESSION NUMBER: AK098985
  ref <309>: DATABASE ENTRY DATE: 2002-08-28
ggcggtttcttcctcctcctcctctctctctctctcctctgcttctctcccaaattcgccacctctcctcctcctctgatccctccccacgccgccggcgagggcacggccacaacggccgcggcggcctccgtgcgccggagacaactagactactacaactactactactactactactactctttctctctcttgttgagaggagcggagatccatccgtgcaggctccggggggtggtttcgtgtgggatatgccacacgtgcagtcagctcctgcggcggcgaccgcggcggggatgtccgcggcgtcggcgcccgcgccgaggaggtgggaaggggtggaccaggcgctggagcggatggtgctcagggcgtgcctcgaccaggcgcccgagcgccgccgcgtccgcgacgcgttcaaggacgtgcagctcagcatcgaccactgcctcttcaagggacagtatagcgatattggaacaaaggagtcatacgagaaaaactccaggggcgtggagattttctcaaaatgttggtatccagagaatcatcgcataaaagcaattgtttgtctctgccatggttatggagatacctgtaccttttttctcgatggtattgctaggaagattgcttcagctggatatggagtgtttgcattagattaccctggttttggtctctcggaaggacttcatggatttataccaagttttgacactcttgttgatgatgtagcagaacattttactaaggtcaaagaaaatcctgaacatagaggtcttccaagctttctgtttggtcaatctatgggtggagcagttgcattgaagattcattttaagcaaccaaatgaatgggatggtgcaatactagttgcgcccatgtgcaagattgcagatgatgtgattccgccttggcctgttcagcaagttctaatttttatggctagacttcttccaaaagagaagcttgttccacaaaaagatttagcagagttggctttcaaagagaagaaaaaacaggagcagtgttcttataatgtgattgcgtacaaggataaaccacgtctccgaacagctttggagatgctgagaaccacaaaggaaatcgagagtcgtttggaggaggtttcgctgcccattatcattttgcatggtgagggtgatttggtcacagacccagctgtgagtaaagctctctatgataaagcgaagagctcagataagacgcttcgcctttataaagatgcatatcacgctatcttggaaggtgaaccagatgaggcaatttttcaagtcctcgatgatataatttcttggctggatcagcattctacaaagaaagttccatcgtcataaactgcaaaggcagcattgggaaaatttctttgctactgatgtatccttcgttgccgttgatccaagattccaacagttgcgattccattttggcaccagccctgtcatgtttcttttctgattgcaaatgtgcctgttgctcatcaagctgtgtacataatgtatattatccatcacaatttgtttcacaaaatttaggtaaggttttgcatgccatatataaatttgtaatatattcaaatgtttttctcgttatgtaatattttttagatttgattgcc

SEQ ID NO: 16572 - DNA, 2192 bp, Oryza sativa
  ref <308>: DATABASE ACCESSION NUMBER: AK067054
  ref <309>: DATABASE ENTRY DATE: 2001-12-06
gacaccagcatcttggttgcccttttgtttatgccatcttgagccttgtgccctcgaggccttgacttccttcccctacccccacccccaacatctccctgaatttagctgctttcgcggcacagatcagtgcgcaagccataaagatcgagccttagcttcgagctggaatttatcggcggatcggctggcattttttcagtttgtgcgcgcgcctcaagctcaagaaccgggagagagatgagctgcttcccgtgctcggggtcgtcggggaagggcggggttgacgccaagagcgtggcggcgctctcgccgggtccgcggcccgcggcgagcgcggcaccagatcgatcaaactcatcacgtggttcaggcattaagaaggacgattctgtccgaagaggaggaagctctgcgagtgatggtccagccaaaattttcactttccgagaattggctgttgccaccaagaatttcagaaaagactgcctgctgggtgaaggtggctttggtcgtgtctataaaggacagatggagaatggacaggttattgccgtgaagcaacttgacagaaatggcctacaaggaaaccgagaatttctcgtggaggttctcatgctaagtctcttgcaccatcctaatctggtcagattaattggctactgcgcagatggtgaccagcggctcctagtttatgagtatatgctattggggtcactagaaaaccatcttcatgatcgcccaccaggcaagaaacctcttgactggaatgcaaggatgaagattgctgttggtgcagcgaagggtttggagtacctgcatgataaggcaaatccaccagtcatatatagagatttcaaatcatcaaatattcttctgggcgaagactattacccaaagctatctgattttgggcttgcaaaacttggtccagttggtgacaaaactcacgtatcaacaagagttatgggaacatatggctattgtgctccagaatatgccatgacaggacagttgacagtaaaatctgatgtttacagctttggcgttgtcttccttgaactcattacaggacgtaaagccattgatcacacccaacctgcaggggagcaaaatcttgttgcatgggctcgtccactgtttagagaccgaaggaagttctgccaaatggccgatccatcgctgcaaggttgttatcccaaaaggggtttgtaccaggctttagctgttgcatctatgtgcttgcaggagaatgcaacatctcgacccctcattgcggatattgtcactgcactttcttatctagcttcaaatcattacgatcctaatgcaccttctgcaaagagttcgaggacttgcccatccaccccaaaggcaaaagcacatcgacgaacaaccagtgttcctgatgcccaacatgctgccgattcacttaactggaacttcccagacttggggaggaaggaaactactagaggggaattcgagcaggatcacagtgaaggttatggcagtggcagtagctctggaaggaatgatggtctagatgttccagaactgctggccttgcataatggacaaaataacagtgaagctgatatatatcacaagtccagtgtcaagcttgatgcccatgagaaacagagatcagggtcaggcaaaggcagcaggcagttttgatgcacatacaaacagacattgttgcaattctttccccgattgctgccaattttgccagacatcttctctgcttctgttgagggttggatactctttgttggtacagttgcgcgctgttatggtccaggtgctgtatgactgtacccatggttgtattttagttgtttccaaaggtatacatgaagatcatgatctggttgaagcaagaaaccatcttgtcgcagataaggagcatgcattttgatcggtgtcaattgcattctacctgtaaagatttttattctctttgtaattaggtcacagtttgtgccatacctatcattcaggaattaggatgttttatacatacagaaaacaattcttaccagaatgcgtgtacagacctacatgctacagtggattgtttgtgttttttttacatgtaacacaattattttgcggacaatgacatactgtatagaccatagagtgtatgatcatataatgtgaaagactcctgttgttagaaattt

SEQ ID NO: 16573 - DNA, 2873 bp, Oryza sativa
  ref <308>: DATABASE ACCESSION NUMBER: AK067055
  ref <309>: DATABASE ENTRY DATE: 2001-12-06
ttgatttagcttatgttattctacaagagattaatagggagaaggttcctgttgaggccatggcttataacatggtaatggatggactatgcaaagaaatgagattggatgaggcggaaaagctcttggaaaacaaggccagacaaggatccaaccctgatgtatatggttatagctatctgattcagagttattgcaaaatgggcaacctaataaaggctgtggatcattatgaagccatggtttctcatggtattgagacaaattgccacattgtgagttaccttctgcaatgcttcaggaagttaggcatgacatctgaagtaatcgcgtatttcctgaaatttaaagattcagggcttcatcttgacaaggtgatttataacattgctatggatacttattgcaagaatgggaacatgaacgaggcagttaagctactgaatgaaatgaagtgtgggggtttgacacctgacaaaattcactacacatgcctaatcaatggttactgtttgaagggagaaatgcaaaatgcacagcaggtatttgaggaaatgctgaaggccaatattgagccagatatagttacatataacatattggctagtgggttttgcaagagcggtcttgttatggaggtgtttgatcttctagaccgtatggcagatcacggtttggagcctaattcactcacctacggtatagcaattgttggattttgtagaggaggcaaccttagtgaagcagaggttctatttaatgtagtagaagaaaaaggaattgatcatatcgaagtgatgtacagttcgatggtttgtggctatttgctttcaggctggactgatcatgcttacatgctttttgtaagggttgctcgacaaggaaatcttgtggatcatttttcatgttctaagttgataaatggcctctgtagagttggaaatgtccagggggcttcaaatgtttgtaagattatgttagaacataatgttgtacctgatgtgatttcatatagcaaactcatatcaatctattgtcagaatggagatatggacaaagctcacttatggttccatgatatggttcagcgaggactttctattgatgttattgtatacactatactgatgaatggttactgcaaggctggtcgtctgcaagaagcttgtcaattgtttgttcaaatgacaaacttgggcataaagcctgatgtgattgcatatacagttctactggatggtcacttaaaggagacccttcagcaaggttgggaggggattgctaaagagagaaggagctttcttcttagagcgaatcataacaagttattaagttccatgaaagacatgcaaattgaacctgatgtaccctgttacacggtgttgattgatggaaagtgcaaagctgaatatctagtggaggcccgggaactatttgatgagatgttgcagaaaggacttactcctgatgcttatgcttacacagctcttataaatggatattgtagccaaggggaaatatcaaaggctgaagatcttttgcaagaaatgattgacaagggaatagaaccagatgaattgaccttttcagtattaaatcagagttccttgaggtctaggaagattcagttctgtgcatgattccctctgtggtaccatgtttagtaaattctttctactgagaacacctatgtcaacagcaaggaggtcaacattgatgatgaagaactttctgtagaaattcgcaaagaaaatgaggctcctgttgttgagagaaaagtcaagaacatttcagataccaacattaagaggttgtgcatcctacatctcagtctgcttttcaagcagacctccttgcaaatctctgagtcttcgtgcaattgatggccttgttaaaggattggaggccaatcaacgtctagtaggtgacttgaccctagcaacccttgaggacagttgaactcagttcaggctctgattttacctccctagacattcaaaatgggaactctcttcagttccagatactgttcctcaagaacacaggtccaagttccacttaggttgtgagtctctgtgcaagtagagatgtgatttgtcaaatttggaacggcactagttaatgtcaaacttcgattccctgttgtattgaattaattcatggaacctacaaatcttccacctgaagattttttgcctgcctggaattctggaaagcattagctgctcagtctctgaaagtttaagatgtggagttcatcaaagagtctttaattgatcgattatccttagggataattggttctaattaggtctacattgcaagccataattccttcagaagtacctgtcacaatggcagcacaatgaaaagtggaaaacaaaagcatcctgccggcaaaacgacttgtggctgaagaacaatgatgaagcaaggggtgacgcagaagtatttattttacttttggccgggttataacttataagtcccttgatcgctgcaggttataagctctgggaatcttcattgccctaggtctagtgttgaatctatgtagttttttatgtagttttttcaaccaaaatcaatcttgaagtttgctgtttatgtgtaattacgatttgtaccaacaagattagaatgtttagctatatgccttggattgattaactaggctcagtttttctctcattcaagtgttcaatgaatgaaatgtatggttctctagcttttcttttgtttcaaaatccttagtttttgggggcttgtgtgtagatggcagctgtatctttcctgtatataaagctatggttgtagaaaattatagggcgtattataaattattataggatgtattatatttgatggttaag

SEQ ID NO: 16574 - DNA, 1291 bp, Oryza sativa
  ref <308>: DATABASE ACCESSION NUMBER: AK067056
  ref <309>: DATABASE ENTRY DATE: 2001-12-06
gagttattagttggtgatcgcttggggcagcttccttccttccctcccaaaatccacctcacaaccacacgagacgagagccaaccgcgacgcatcgtcacatcacagaggaggcggtggccatggaagagagacctcgcgatcgcaccgtcgaggaggccgcggcgttctccggcgatgagtccgatggggaattcgagttcccgttcgtgagcagggagacggacgccgggggcgtggccgacgagctcttcgcggacggccgcatcagggcgttctacccggtgtttggccgcgtgctcgacgacgtggcggtgacgctgcggcgcggcggcggaggagcggaggccgccgctcgggaggctgttcctcgaggaggggcggacctcgtccgtcgggtcgacgtcgtcgtcgtcgtcgtccacggacatcgccgagctggacggcgtgtcgcccgacagctactgcgtctgggtgcccgggtcgtcgccggcgtcctcgccgtcgcgccccccgcggaagagcgggtcgacggggtccatcgagcgcgtggcgccgcatcagcgagctcgtcgtcggccgcagccacagcgacggcaaagagaagttccgcttcctctccgcgccgtcgtccccggccagggatcacccaaaaccgaagcccacgacgaagggcggcgccgccgccgccaccaagctccacaccgagctcgacaccatcgccgccggccaccggctgtcctactccccaaaccacaaggcgcacggcggcgcgacgcggcggacgttcctacagtaccgccaggatctcatgggcatcttcgccaacgtgaacggccacagccggactcaccaccgccccttctgatcgccggacacaagccgtcaccgtcagggcgaatgaccacttcaactcaaaaaagtgagaaagagagatttcgagtttgaattctccgggatttgaagtttcgaacctttgacttgaagcctactgcaatttgaagtttgtgtgattagcgtaatctatagctttgctattgcacgggggattaatgaagtcaaaattggaggcgtaaagtcagaacagacgaaatgtgggggattcgctaaggaatacagctctgcaagtcggtttattgcgaacgacatgtgaagttgtgaacgtggtagggaatcacacacggggaagttgtgagagaaaaaaaaagaagagcttccatgtgattatttgtacttgtacatatgtgtatgtgtattattggatatgtagattgacaggagtcgttttttt

SEQ ID NO: 16575 - DNA, 933 bp, Oryza sativa
  ref <308>: DATABASE ACCESSION NUMBER: AK067057
  ref <309>: DATABASE ENTRY DATE: 2001-12-06
gactcgccaccgcctctccagccgaagccgctcaccctcctccgcctccctcctcctctccccgtcgctcgccatggcagccttcgccaccgcgaccccctcgccggcgatctccgtgtccccctggagcagtcgtcgctccgcgccgcgctcccctccccctcccgcgcctccccggcggggaagctccggtcgtcgttctcgcccgcggcggcggccacggcggcgtcggtcggctgcctcagctccttctccggcctcacccccatttcgcctctcctctccctcggggaagagacttcaagctttgagcatcgattgtttggtattgatgcccgtggaaggatagtggcaatgagacatgggaggcgtgttcctaaacttagcagacctccagatcagcgaaaggcacttctgcgcgggctgaccacgcagctgctcaagtacggaaggataaagactaccaggccaagagcaaaggcaatgaggaagtatgttgagaagatgatcacactggcaaaggatgggtctcttcacaagaggaggcaggctctggcttttatctatgagaagcatatagtccatgcgttgttcgctgaggttgcagacaggtatggggaaagagaggggggctacacaaggatcatcccaacatttccaagacggggagacaatgcacctatggcttacattgagcttgtctaggaggccgttcatttgagcgcgctgcctaggtggaggggtcaagggagtgcctttttgaatatctgtttacatattttcttttgtaacaaaatgtagatcatgtgtgaagttttgaacagtggaatttctatcctgtaactacgaaagcattgtgctacattttggaagtgtacctggcaccataatctggtgcccttgaagttatggattgttttccagtcagttact

SEQ ID NO: 16576 - DNA, 1243 bp, Oryza sativa
  ref <308>: DATABASE ACCESSION NUMBER: AK067058
  ref <309>: DATABASE ENTRY DATE: 2001-12-06
gagtcgtcgatccccgcttcccccttcctctgctgggttcgcccgcacgcccgcccgcaccgccgcacgccgccggtcgcccctcctccccgccgacgctgagcaccgccggtccccgtcccgctaggcagcggcgccgccgtcctccgaccgagcccctcgccggttcctgctcctattgctcaagccattaggttgcatcgaaacagtatgagctctcatgattttgcaagaagggttccgaagaggcggcggactaacaagttgctttcgcaacttcttccggacctgaactcactcccagctgaaggagctgatgatgggggatcaccttccagtagtgtgctcgtctcacacgcccagacttctgctgtagctgtggctggaacctcgcagtatttggtgccagcagttgttgcggggccgcacattggaatgagtagttgtcccattatcgtggatgatatcaatgatgatgttgtgatttattctgcaagctcgttccctcaagtgaggcagcaggctccaaggacagaacctgttgtgaccatagaagatgattctgaaactacccctggacaagcaggggatgcagttgatgagcatgtggatatactactatctctgactctgggcaggtatcctaggcatggtcatcagagatcctccaacatcagcaccagccctgtgatacatataattgacacacctagcaatgtactcaaacttgaatttcttcaatacacctatcaggtctgtgatgttcagttaaataatgcagcgtttggtggtaatgcaggcactccctgaacccgagaaggccgttccgaaggaaccaactttcaattgccctgtctgcatgaacgagctggtcgaaccgtcatcgaccatctgcggtcacattttttgcaagcagtgtatcaaggcctcaatccaggctcagaagaagtgccctacctgccggaggaagctgaccatgaacaacttccaccgcgtgtatctcccttctgcggagtaagccggtttccaccattctggaaatcagcgtccctcctcccaccctgactctcgccacattggcgttctgatgattgtatctgaaaatgtttgacaggcttgctagcataccgttttgctggagcagttttaacagatgttgtactgttgttggatccgttaaaagaatacgattgtatgtcctgtggaaatgatccatgctattaaaggtctagattttgtgggg

SEQ ID NO: 16577 - DNA, 2127 bp, Oryza sativa
  ref <308>: DATABASE ACCESSION NUMBER: AK067059
  ref <309>: DATABASE ENTRY DATE: 2001-12-06
gggcgatcgcaaggaggcagcggcagtggccccttctccagcggcggctacccccttctccttgcagcggtaccttctcccggtagcggtggcggctgcaaggagacagcggcggcggccgcaaggaggcagtggtggaggtccccttctcattgcagcggcggtggccccttcttctggcggtcaaattagggtaaattaagtgactgtaagctttgttaaacgccatggatttgatgaagagtaatccgcttcaggggagcccatggagcttgttgaacttgctggtattgatcattgtcgccgccatgatctgcggcgagctatgtcgtcgtcgtcgtcgtcgtcgtggcgacgagaatggtggcgccacgaggctgcctccggggccatggcggctgccgttcgtcggcagcctgcaccacctcgcggtgatgaggccgcgcggggtggtggtgcaccgcgcgctggccgagctggcgcggcggcacgacgcccccgtcatgtacctccgcctcggcgagctccccgtcgtggtggcgtcgtcgccggaggccgcgcgcgaggtcctcaagacgcacgacgcggcgttcgccacccgcgccatgagcgtcacggtgagggagtccatcggcgacaaggtcggcatcctcttctccccctacggcaagaagtggcgccagctccgcggcatctgcaccctcgagctgctcagcgtgaagcgggtgcgctcgttccgccccatccgggaggagcaggtcgcccgcctcgtcgacgccatcgccgccgccgcggcgtcgtccacggcggaggcggcggcggtgaacatcagcaggcagatcaccgggccgatgacggacctggcgctgcgcgcaatcatgggggagtgcttccggtggcgggaggagttcctggagacgctggcggaggcgctcaagaagacgaccgggctcggcgtcgccgacatgttcccgtcgtcgcggctcctccgcgccgtcgggagcacggtgcgcgacgtgaagctgctgaacgccaagctgttcgagctggtggagtgcgccatcgagcagcatcgggagcagattagagcggctcacgacaacggcggcgacgacgacgacgcgcatggccatggcgacaaggagtgcttcctgaatactctgatgagaattcagaaggaaggtgatgatcttgatgacactcaccatggcaaccgtcaaagctgtcattcttgacatgtttgcaggtggaagtgaatcaacatcaacaacacttgaatgggccctgtcagagcttgtgaggaaccctcatgtgatgcaaaaggcacaagcagagatacgacatgctttgcaaggcaggactagggtaactgaagatgatttaattaatttaaagtacccaaagaacataatcaaggaaacactacggttacaccctgtagcacctctacttgtcccaaaagagtgtcaggagtcgtgtaaaatcctcggctatgatgttcctaagggaacaatcatgttcgtaaatgcatgggctatcggcagagaccctagatattggaacgatgcagaagtgtttatgccagagcgttttgagaaagttgcagttgatttcagaggcacaaactttgagttcaaaccatttggagcaggacggaggatgtgcccaggaataacatttgcaaatgcaacaatcgaaatggccctcactgctcttctataccacttcgattggcatctccctccaggtgtaacaccggatgggttggacatggaggaggaattcggcatgagcgtttcaaggaaaagggatctttatctacgaccgacactccatatgggacttgaaacaatatgatgaatacacgcgtgttgtcatggaaaatgttgataatagccgaatggtgtatgtacctagtagaaaaaaaatactttctgcaaattatagtacctatacttacaagatgtttgggaggtaggaactcctgagatattcagatattccagagctccgagtgcattagtatagaaattcatgcacgaacacaatatatataaggcgttgctgtcatgtacaagagctgtgttttttaaagataaaagtactgtacgtttccagttgtaatgt

SEQ ID NO: 16578 - DNA, 1285 bp, Oryza sativa
  ref <308>: DATABASE ACCESSION NUMBER: AK067060
  ref <309>: DATABASE ENTRY DATE: 2001-12-06
gacaagccattgaacagagacgaccaacgacttaaccacacttcttctttgtgctgtccaacctccagttgttgggtgtgaaagctttggcgcaggtgccatgtgtggaggatccattctcggcgaccttcacttgccggtgcggcggacagtgaacgccggtgacctgtggggagacgccggcaagggtagagatggtggcgacggcttgaagaagaggaaggggagttcttgggatttcgatgttgattgcgatgatgatgatgatgatgactttgaggctgattttgaggagtttgaggatgactatggcgatgatgatgatgtgggtttcggggacgacgaccaagaatccgacatgaacggtctcaagctcgccggattcagcaccacgaagctcggcctcggcggcagcaggaagaggaagacgcgataccgagggatccggcagcggccatgggggaaatgggcggcggagatcagggacccccgcaagggcgtccgcgtctggctcggcacgttcggcaccgccgaggaggccgccatggcgtacgacgtcgaggcacgccgcatccgcggcaagaaagccaaggtcaacttccccgacgccgccgccgccgccccgaagcggccacggcgttcttcggcgaagcattcgccgcagcagcagaaggccaggtcgtcgtcgtcgtcgccggcgagcctgaacgccagcgacgccgtgtccaagtccaacaacaaccgcgtcagctcggctgggagcagcaccgacgccaccgccgccgccatcgccatcgacgacggcgtcaagctcgagctgctctcggagacggatccttctccgcccatggccgccgccgccgccgcgtggctcgacgcgttcgagctgaacgatcttgacggatcaagatgcaaggacaacgcattcgatcaccagattcacaaggtagaagcgctgtcgctgatgaattcgcgttctacgacgatccgagctacatgcagctgggttaccagctcgatcagggcaactcgtacgagaacatcgacgcgctcttcggcggcgaggccgtcaacattggtggactctggagcttcgacgacatgccaatggagttcagagcttattgagcatttgattctatttaggagggagtgaattatttgggaggaagaatcgatgttgtaacttgtaaaatctctgatgatgatctctgcatcatatgatcaatttgagtgcagttttgtttttgtaaatacgaattctttattatgatgttaggttctt

SEQ ID NO: 16579 - DNA, 3266 bp, Oryza sativa
  ref <308>: DATABASE ACCESSION NUMBER: AK067061
  ref <309>: DATABASE ENTRY DATE: 2001-12-06
gggagaagagagagagagacggacacaagccacgcagcagcagcagccagcagcggcagcggcagcggcagggacacaaactgacgtcgccttcatcgtcctcctcctccgcctacataaatcccaccccgacctcctccgccgcttcctcttctcccctccgccgcaggtgtgggggttcaccggtgagcgagcttggacgtggcggagggcggaattgtgggggttctttcagttctccgagcgattcggggaagggggagaggagaggtggtggatgtgagatccgatggctgctgcagcgacggcggcggcctcgccggttgaggggctcaccggcggcggcggcggtggtggtggaggagtggacgggctgttcgtggagctgtggcgcgcgtgcgcggggccgctggtgacggtgcccgccgtcggggagagggtcttctacctcccgcagggccacatcgagcaggtggaggcatcgacgaaccaggtcgccgagcagcagggggctccgctctacaatctgccatggaagatcccgtgcaaggtcatgaacgtcgagctcaaggctgagcctgatacggatgaggtgtatgcgcagctcaccctgcttccggagaagcaggatgggaatgggagtggtaacgggaatgtgtccaaagacaaggtggaggaggaagaggtggtgccaccagctgcaactgagcggccccgggtgcactccttctgcaagacgctcactgcgtcggacacgagcacgcatggtggcttctcggtgctgcgccggcacgcggatgagtgcctcccaccactggatatgagtcagcatcccccaacacaagagctggtggccaaggatcttcatggggttgagtggcgcttccgctcacatcttccgaggtcagccacgaagacaccttctccagagtggttggagtgtttttgtgagtgccaaacgccttgttgctggagatgccttcatatttctcagaggtgagaatggggaactacgagttggagttcggcgtgcaatgagacaacaagctaatattccatcttcggtcatatcaagccacagtatgcatcttggtgttcttgcaactgcatggcatgcagtgaacactggaaccatgttcactgtgtactacaagccaaggactagtccatctgaatttgtggtaccacgtgatctgtacaaggaatctctgaaacgaaatcattcaatagggatgagattcaagatgacatttgaaggcgaagaggctgcagagcaaagattcactggcacaattgttggagtaggtgattctgacccatctggttgggctgactcaaaatggcgttcccttaaggtgcgatgggatgaagctgcttctgttcctcgtcctgatagggtttctccttggcaaatagaacctgctaacagcccttcccctgtcaaccctcttccagcaccccgaaccaagcgggctcgtccaaatgttttagcttcctcacctgacttgtctgctgtaaacaaagaagttgcttcaaaagtcatggcaaactcgcagcaaaatggtcttccaagggccttccacagtcaagaaaacatgaatttgagaagtcgttttggtgatagcaatgagctaaatacttcccaaaagcttaccatgtggtcttcaggaagcaatcaagagaaaaataatgtttctgtccagagggagctaggttcacagagttggatgcagatgagaaggcctgatggttcctctgagatattatctggatttcaaccactgaaagatacgcggaaccctctgagttcatttcctagtcagatatctggaaaccgttcaaatacgtggaacacaatcaatgttcattatcccgaccaaaatgccaatcataatatgtaccctggcacatggtctcttatgcctccaaacactggttttggtgtgaatcagcagaactacctaatgacgcctgacatcacactccctcaaaggtctcttaatgccaagtttggtgggaatggagcattcacttcgcttcgggcccatggcatagatcagcgctcctctggttggcttgggcatattgagccaagttctcacattgatgatgcctcatcgagtcttatcaagccacagcctttggttattgatcacaatgttcagaaagctaaaggctcttcatgcatgctatttgggatttctcttgacagccctgcaaaacctgaactattgatatccccaccaagtgttgcatttgatgggaagctccaacaggatgcacttgaagaggatgaatgctctgatccttccaagactgtgaagccacttgatggagctcagcacgattctgctagagagaaacatcagtcatgtccagatggtaccaaaaacattcagagtaaacagcaaaatggttcctcccgaagttgcaagaaggtccacaagcaaggaatcgcactcgggaggtcaatagatcttacaaagttcacttgctatgatgagttgattgctgaactggaccagatgtttgacttcaatggtgagctgaacagttcaagcaagaactggatggtcgtttacactgataatgagggtgacatgatgttggttggtgatgatccttggaatgaattctgcaacatggttcataaaatcttcatctacacgagggaggaggtccagaagatgaatccgggtgccctaaactcaaggtcagaggatagccggtctacttccgtggaacgagggctagttggcgaagggctccaaggtggtctatccaccccatcactgaattctgagaactgctaattcgttcggtcactgaggtcttttgtggtttgcaagaacagaagacgacatatccatggtaggaaggaatcttttcgtggtgtagtagtagtagctggtgctttatatgtatcgggtaagccccgcagtaccccatttgtagatggtgcttgtcctggtatcagttgcccgctcttcgttttcgacaagttttgggtgtgctttgttgaggttttaagttattgtatgatatgccccgtagtagtgaaaggtgctgaggccaagctgccgcgcccggtgcgcttgcttgcttgcgctcttcctccctcctaagccttgtaaatagctttgcttccccccctttcttcagtcagttctaatatgttgcgaactgcggtaatcggtgtacccctcaagaaggcaaggcaatttgaccctaaaatgttgccattttaacatcctgtttgtttgccc

SEQ ID NO: 16580 - DNA, 1666 bp, Oryza sativa
  ref <308>: DATABASE ACCESSION NUMBER: AK067062
  ref <309>: DATABASE ENTRY DATE: 2001-12-06
ggtgtagttgatccgaagttgggagtggagatgcgagcggcagcaggaggccgcggcttcctcctccacccgcggccgccatggcgagctcccgcgactcctccttgtcctcctcctccagccaccgccaccgcgctcgcgaggcggcttcaccaccgacgcctacctgaaggtattttgtccaccctggaacgaggtgtttctacactgcatttgcgttgttgggttcactgtgcaacatgtggtgttacgttacatgacatatcacaggcagaacctgtgaatggagcaaagtccgaccttgttcaaaagcatgagaaggtaggtgcatttcagagaataccaatggtgatgcctgcaactgatatacttatgtcagcacaaagaaaatcaagaaatgtaccacctacaaagggtatagcaaatattgctaaacgtgaaaggaacaaaggggcaaaacaacttgatgccttaatgaaagaaatttcagtacctctgagaacatatacagaaaacttccctaagaggagggatcttcacccctatgagagatctctcattgagttgacttttggggagggatattacgagaaggtaatagcacgagtggatgctctcaggaaaaagattaattctgtcgggaagcaacatgcttctgtctgtgctaagtcattaacgaagcgtgaagcaggggagcgactcagtgaggggcggaagaaacttgaggaagctttcgagcatgggaagtgggtaattgatgatttagtaaacattgcaaagactttgcgttctatgccagttgttgatccacatatacctacactttgtcttgttggatcacccaatgtggggaagtcatcattagttcgcatattatcgtctggaaaacctgaggtctgcagctaccctttcacaacaagaggtattctaatgggacacattgtatccaatcatgaacgttttcaggttactgataccccaggacttcttacaagagatgatgatgaaaggaataacattgagaaattgacccttgctgtcctttctcatctaccaattgctgtcctgtatgttcatgatttatctgaggactgcgggacctcagtggccgatcagtacatcacatacaagcatataaaggaaagattcggtgatcgcttgtggcttgatgttatatccaaatctgatcttttggacaagaaaacatcctcagaatttgatgatgctgatgatgaagtagggagatacagaagattcgggccagaatgtgccatccgagtatctgtgcagggccaagttggagtaaaagagctaaaagagaaggtgcatcagctactaacctctcagatgtctcggatcaaagctggcacaatctatcaggaaacccagagaacggatgataatgctcccgggcaaacttagattatggaaaggttatgtacacatttatgtaaaccttttaactcgtgctgacagtcggtgcatctaatgtagtagtacctggaattttgtacggaaggagaaaattttgggcctgttcactttgatgaaaaaaaaaaccttactaaattttggcattgccaaattttggtatagttgccaaaattttggcgaacttgtcaaaattttgacatgatttcttatatagttaccaaaatttggtagc

SEQ ID NO: 16581 - DNA, 2295 bp, Oryza sativa
  ref <308>: DATABASE ACCESSION NUMBER: AK067063
  ref <309>: DATABASE ENTRY DATE: 2001-12-06
tttccctccccgaccagatcgcgacaccgccaccgccgatccgaaggtcggcgacgacgaccaccaccgccgccgccctcgtcctcgccgccggcggccatggcgttcggcgaccgcatcaccaccttcgaggactccgagaaggagagcgagtacggctacgtccgcaaggtctctggacctgtggttgtggctgatggaatgggaggtgctgccatgtatgaactcgtccgtgttgggcacgataatcttattggagaaattattcgtcttgagggggattcagctacaattcaagtttatgaggaaactgctggactgatggttaacgaccctgttttgagaacacgaaagcccctgtcggttgagttgggacctggtattcttgggaacatttttgatgggatccagcgccctctgaaaactattgctattaaatctggagatgtgtacattccgcgtggtgtctcagttcctgcccttgacaaagatgctttgtggcattttaagccagaaaaactaggtgttggagatattatcacgggtggagatctatatgctattgtcaatgaaaatactttgatgcaacacaaggttgctcttccacctggcgctatggggaaaataagttacatcgccccagctggtcaatatagcctgcaggatacagtgctagaattggaatttcagggtatcaaaaaggaatttaccatgctccagacatggcctgtgcgttcaccaaggcctgttatggaaaaacttgctgcagatacacctcttcttacaggacagcgtgtacttgatgcattgttcccctcagttcttggaggaacatgtgccattcctggagcttttggttgtggaaagactgtcattagtcaggcactttccaagtattccaactcccaagctgtggtttatgtcggatgtggcgaaagaggaaatgagatggctgaggttctcatggactttccccaattgacaatgacgacagaggatggacgtgaagagtctgtgatgaagagaacaacactggtggctaacacatccaacatgcctgtcgctgctcgtgaagcttccatttatacaggaattacgatagctgagtattaccgtgacatgggttacaatgtcagcatgatggctgattccacctcacgatgggctgaggcattgcgtgaaatttctgggcgtttggctgaaatgcctgcagatagtggttaccctgcttatttggctgcaagactggcatctttctatgaacgtgctggtaaagtaaggtgtcttggaagtccaaaacgggacggaagtgttacaattgtaggggctgtctctccacctggtggtgatttttcagatcctgttacctctgcaacccttagtattgttcaggtcttctggggattagataaaaagcttgcccagaggaagcatttcccatcagtgaattggctcatatcttattagaaatattctaaggcgcttgagccgcactatgagagggaagatccagatttcattgatattagaacaaaggcacgtgaggtgttgcagagggaagatgatttaaatgaaatagtgcagcttgttggtaaagacgcactggcagaatctgacaagattacactggagacagcaaaacttctgagagaagattatttggcacaaaatgcattcaccccatatgataagtattgcccattctacaaatctgtttggatgatgcgcaacattattcatttcaacacattggcaacccaggcggtggagcgggcagctggtgctgatggacagaagattacatacagtgtcataaagcatcgcatgggcgatctattctaccgcctagtgtcgcaaaaattcgaggatcccgcagagggcaaagaagttttgattgcgaaatttcagaagctgtacgatgaccttaccgccgggttccgcaatctagaagacgaagcacggtgaataattattgtagattctgtgtaaacaataaggatatatcaccaaatgttctataaaaaaaacatggaagcattccatttgctgctaccgaggctctaggtcgagatcatgtagaaattttcctgcaactatacgcgccgtcgtcgttttgtcaggttttgatcccaagtgctcgatggacacgccattatttctactctatgtatcatttatttatcatcttcattcacatcattgtaataaacatgggcatgtttatagtcgaataaatacgatgtccatctgtttaaaagtcttcgttgaaggtcattcatctttatttgttcgttg

SEQ ID NO: 16582 - DNA, 1774 bp, Oryza sativa
  ref <308>: DATABASE ACCESSION NUMBER: AK067064
  ref <309>: DATABASE ENTRY DATE: 2001-12-06
gtcttcccctcctctcgcactgctgctcctcacgcctgtacgttccgctccttcacatcagccacccccgtcgcgcacaccaatccccttcggtgacctcgctggcgtcgtctgttcctcttctccagattgtctgatggactaccagcctaccactagctacccacgggatgattcctctttctgaaaccatcgccagcaacaagcagtcgggagtatcttcttaagccttttttaagtcctcaaaatataccatcgtcagcttctaagactcttaatccatcatccccgtgcgaccggccaacccaaccatatgcatcatcaccatgattaagataatggaaaaatgccagaatttttgccacaccaatttctatgaacgagattgatatcgtactggtatttttgtttgatttgcttcagatttatgcaagacaacatttgaacaggatcagtgccatctgtgcacaagtatctcacaaccttttttaatgaacccaaactctttgcccagaccttttgatgtgttttacagtattatcagcagtttgcacggcttttctctgcactgcttggtttcatcattttgtttggacaccattaaccagatcttgcagtgcttgctttgtgtgagcttgaccaaagaatgtggtgtactgatccttatcactatgcacccctttattcaataatattgtgttcactttatggaaatcatttttttttactaacagttgttctttaatccttttacctttgattggctaattgatgtatatatctcatatatactttataatctgatctgatgatttgcttgcttggctgcaggtactcagcgagcaatatttctttaccactaactagatttgtctttaattaaaatgatattaaaaggcattcatagattttagctctgaaaaaatggatgcatagctagcaggtatacattttttctcattctcaacacaaatatatccttaaacattgcacgatcctgtgatgttttagagagaaatttgtatgctttattatcctctaatgtactgattcagtgtttgttcagctaaatatctaccttatttcatattattcttgagttgtttgcaggtcgctcaacatatatttggcctattctatgattctgcaagctatcaaatactatgttatttaaaggcgacagatccagcgacggctcgaggcgcgggcagcgggtctggcggcggagctcgaggcgtgggcagcggatccgaaggcggctcggggcacaggcggtggatccggcaacgacacgtggtacaggcggtggatcgggcttggggcagcggcggagaggcaagagagagggaccccactgccgccgccgccttctacctccacgagcggacgccggcggggctccgcatcacgccgccgccgccccctcgctgacgcctccccaacaccccctcagagctccaccgcgcgcactcggagcgccgccgccgccacaccctcagatcaccgccgctacacgagtcgcacgagagagaatgtgtgttgcacgagagagagagagagagttgcacggtggatggatagggtttctgagggtattttgggcattacgaatattagttacattctcttctctctttttttggtattttgggcattacgaatattagttacattctctctctctctctaacccatgtctctggtggattctccaggcgaaaacttgtttcggatgtccgaaatagctacggcgatattatattctagattttgc

SEQ ID NO: 16583 - DNA, 2340 bp, Oryza sativa
  ref <308>: DATABASE ACCESSION NUMBER: AK067065
  ref <309>: DATABASE ENTRY DATE: 2001-12-06
gggagtgagagagctcgcgcgcgcgcgcgtgcgttcgcctactacattctttcccctccaaccttttcgaggaggaggaggaggcggtggcgattgatggaatctgatcgaatgccgcttcaggctgggtcaatcgagctggctgcaacgatcggaggtttcctatcccctcgtgaaggtgtcaaatcagtatccttgtgccggatggtttggggataattttcgtagtgagttcataatagcgtctcatttgggattcctctggttgattcagttccctttgcaagtttgcgggtttgttcacggatttggttggcttgagatcgatcttcattcattgggagatggatgatgatgactactcctgggtgcggcgcaccaagttctcgcactccattgttaaatccaactctggcagggagcagtttggtgcattccttgatccgtttgacagttccactgcatggaggcagaaaggattcagtggagagctcatgattcatggacataatttacagccgagggcaaaaggagcagtctcaaagtcacctaggccttcaatcccgttggcgaaatcaccagtttcacaggcagagcggaagctgaaagctaagttttcagatggtgaattgaaacaacgggggaaaattagtgatggctcgttgcgagaagcatcgaaagagaaggatcgcaaggttgggcataaaggagaaggccttagcctggatatttcttgtccaattctggatcggacagttcaggatgacagttcagacacgcttgacttctctttccactcagaagagcaaagtttaaggttgctgagagtatgctcgagtccagctcctttctattcgaaggatacaactacgtttggtgattccaaaatacatagtacgtctgttaagattgttggagagggatcgaagccgaggaggagagcgaaatccccaatgccgacccgtgtcatctctgaagtttttaaggaggccaaagctgccactaagaggttctctagcccacagcggcaaaggaaatctagttctccacattcaccacgttcacccgatgatagtccccggtttggctttccttcaatgagaacaccgggtaacttgaaagctaggagggcctcgtcctggccaaggaactgtgacaatggagtggccaaggctgttgcattggatatacttgagagatggacaattgaccgctcacagttactcattggtcaaagatttgcatcaggggcatatagtcgtttgttccatggaatttacaaggagcagccagttgctgtcaaatttatcaggcagcctgatgaagaagaagatgcagaattggctgctaaacttgagaagcaattcactgctgaagtaaccattctggctcggctccatcatcgcaatgtcattaagctgattggggcatgtaatgctccaccggtcttttgtgtcatcactgagttcctgtgcggggggtctttgagagcttttttgcgcaagctccagcgccaaaagcttcctttggagaagatcatttgcattgctttggatattgcacatggtttggagtacattcactcgcaaagagtaatccatcgtgatgcgaaacctgagaacatcttgtttgatggagaatgttgtgcaaaggttgttgattttggagtggcttgtgaagaagtatactgcaactcattggaagatgacccaggtacttacagatggatggcaccagagatgtataagcgcaaaccatatggtcggaaggttgacgtctacagttttggcctcgttttgtgggaattgtttagtggctcgatcccttatgaagagatgactccattgcaggcagcttttgcagttgttaataagaacttaagaccagttgttccttcaagctgtccggcgcaacttcgacttttgatcgagcaatgttggtcttgtcaaccagagaagagacctgagttttcccaagtagttcagatcctcaaaaatctcaaggaggccctggatagagatggaacgcttgacaagatcccaagcaccaactgccaggaacctcctgatcagaacaagaagagactgtccaattggatccaaagactctcgtacagtcaggccgatttctccggacctccaccgccaaagttattgtaattatatgcattcctctcttccataaatatcgtagcatctgctagatgtctctgtaaatcataaggttcttcttggtgtataaactccgcacatttttttagtggacagttcattcttgtttggcttagtaattttgcctgcaaccaaccaatggagtcttagttcccggcgggtggggacg

SEQ ID NO: 16584 - DNA, 2792 bp, Oryza sativa
  ref <308>: DATABASE ACCESSION NUMBER: AK067066
  ref <309>: DATABASE ENTRY DATE: 2001-12-06
gttgtaccagcactacaaggaaggggatgtgatctggtgccatgattaccacctcatgttcctgcccaagtgcctcaaggatcatgacatcaacatgaaggtcgggtggttcctgcacacgccattcccttcttcggagatttaccggacgctgccctcccggtcggagctgcttcgctccgtgctctgtgctgatttagtcggatttcatacatatgattatgcaagacattttgtgagcgcatgtacaagaatacttggactggagggcactcctgagggtgtggaagaccaaggaaggctaaccagagttgctgcgtttcctattgggatagactctgaacgtttcaagcgagcattggagcttccagcagtaaaaagacacatcactgaattaacacaacgttttgatggtcgaaaggtaatgcttggtgttgaccgacttgacatgatcaaaggaattccgcaaaagattttggcctttgaaaagtttctcgaagaaaaccatgaatggaatgataaagtggttctacttcaaattgctgtgccgacgagaactgatgtccctgagtgtatgagcccttcctgtgttttatctcctatttatactttgtgcgactctacaagcatgtctgctggagtacctcagatgcatgaaatcaaaagcttacaagtcaggtgcatgaaattgttgggcgcataaatggccgatttggaacactgactgctgttcctattcatcatctggaccgatctcttgatttccatgccttgtgtgccctttatgcagtcactgatgtggcccttgtaacatcgctgagagatggaatgaatcttgtaagctatgaatatgttgcatgccaaggatcaaaaaaaggagttttgatattgagtgagtttgctggggcagcacagtctcttggagccggtgctattttagtaaacccctggaatattactgaagtcgcagactcaatcaagcatgctttgacaatgtcatctgatgagagagaaaagcgacataggcataactatgctcatgtgacaactcacactgcacaagattgggccgaaacttttgtatgtgagttaaatgagacagttgctgaagctcagctgagaacaagacaagttccacctgatctccctagtcaagcagcaattcaacaatatctgcattccaaaaatcggttgctcatattggggttcaattcaacattgactgagccagttgaatcctctgggagaaggggtggtgaccaaatcaaggaaatggagctcaagttgcatcctgagttgaagggccctttgagagccctctgtgaggatgagcatactacagttattgttcttagtggaagtgacaggagcgtccttgatgaaaatttcggagaattcaatatgtggttagcagcagagcatggcatgtttttacgtccaactaatggagagtggatgacaacaatgcctgagcatctgaacatggattgggtagacagtgtaaagaatgtttttgaatactttacagaaagaaccccaaggtctcattttgaacaccgtgagacatcatttgtatggaattacaagtatgctgatgttgagtttggacggctccaagcaagagatatgctgcagcacttgtggacaggtccaatctcaaatgcagcagtcgatgttgttcaaggaagccgatcagttgaagttcggtctgtcggagttacaaagggtgctgcaattgatcgtattctaggagagatagttcatagcaaaagcatgattactccaattgattatgttctatgcattgggcacttcctaggaaaggatgaggacatctatgtctttttcgatcccgagtacccttctgaatcaaaagtaaaaccagatagcagcggctcggtatctcttgacaggaggccaaatggacgaccatcaaacggcaggagcaattccagaaactcgcagtcaaggacacccaaggcacaggctgctccggagaggtcatcgtcatcatcttcatcaagccagggcaccccaaacagccaccatgactggcgcgaagggtcctcggtccttgacctcaagggcgagaattatttctcctgcgctgttggaaggaagcggtccaacgcccgctacctgcttaactcgtcagaggaggtcgtctccttcctcaaggagatggcagatgcaacggcggctcacaatgggttccagtccacaactgcggattacatgttcttggataggcagtagatgttctaatccccggtcttcccccagagaagaagtttaaccctgaaagtattcattccttacatggccctgcatgatgtacaattgtgtacaaaatttaagctcgtgataaaactgcgagagggcagcaaatgagaaagcgttaaaatcgtttagagaattctgtacaaaattaaatgcgctctctgctcccatagtgctgaaatgagcccaccgctcttctacattttttttttggtctcggatcccgctattagcagtttagtgatagataataaatctgtaaacttttgttttcctgaatgttttcggccataggttctggagcgcgtcatgtttatttttcaaattctagttcagggtctagttctgagtttgtttttttttccttgttcgtctttagagctagatggtgaagatggtggtcacgatggagaaaattacatatctactatcgcataagataggattcgctcaaataccattattaaaatgggcttcgctataataccattctcaaccaagatgttttttct

SEQ ID NO: 16585 - DNA, 1704 bp, Oryza sativa
  ref <308>: DATABASE ACCESSION NUMBER: AK067067
  ref <309>: DATABASE ENTRY DATE: 2001-12-06
gatctccgcgccgccgccgccatggcaatgaaccctagtagctgagctgattcgcccattgctagatctggatttgtgatgcgttttctcttttctttgtttgattcttcggtgatgttgcgatttgtttgtgtttttatctttttttggtaggattggattggttggctaagcctaacattgcaatcgttcgctgctaatctcgagtgcggcgatcgatctatccttaggcgagatcgaaacagaggggaggacgctttcctagttgtccccgcctgctttttaagctccggctgtcctgtttaatcccaggatttgccggtgacaaagcaggtaaatttccccccatttgatttagtatttttgatacttttcccctcctggcgtagtaggtgtttttgttgttgatttatctcaacagttggcatggttgggggtgatgaagaaaatcgttcggattccgattgatttctaatcgaaatgtgatctttaaaccagctacttctgactcaaaaatcatgccaatggaaagtattttctctttttttatttgaaaaaaatgagtgtttttatttctctttttcttttgtcagggcccgtgatgtgagaaaaatatttgctactcttgatgggacaagagttccatctgatgatcataaccaccaagatctctgaagccttaataatcgtcatgatttatttcggtttttctgcttttctgagctgtattttgttgttcaagttgcatatccgaaatactggaattcatgtcccagctcatttactaaacagtgaacacgcactaaattactggatctacgaactctgaaatatatatctttcttggcaatgcgagatctgtagagcttgaggatacatcaggcctgctataaatacacaagtggctgacatggcacaatcttgatggtttcctcctttgttgatttaccagttggcatggttgaggatgaagaagaaaatcagacggattcccattgatttcaaatcgaaatgtgatctttaaccagctacttccgactcaaattcatgccattggatacaagtctcttttcctcttgtttttgaaaaaaaagtcttcatgtgtttttttgtgtttgctttgctgaggaccagggatgtgagaaaaatatttgctactcttgatgaggcattgagtcccatctgatgatcattaaccaccaagatctctgaggccttgttctagccgtcactgtttatttcgagctttctgcttctctggttttgacttttgtgtgtgcaagccgcataacataaacttggaaggcagggcaattcagttcagtactagctaaactgcaaacgtgctctgttaaaaatgatagaattgctcgtatgatcatgcgttatagttgactttactattataataaactgaaatgtactatccaattatgaacagcaaatgaacaaatatcaagtaactctcaatgtgtaattgtgcaacgttagatatgaatctctctgattgtgccatgagctcaggatgcatctgggcatggaagaatgaacagttgctgacagtatgcacaagacatggcatcccctaggacctagggggcattggaggactgaactttgggttcaataccaagatgcaaattcttgtgtcttaactcttaaccgtgtaaatatatcgcttatgatttgattatgtatcagagc

SEQ ID NO: 16586 - DNA, 1511 bp, Oryza sativa
  ref <308>: DATABASE ACCESSION NUMBER: AK067068
  ref <309>: DATABASE ENTRY DATE: 2001-12-06
gctccctctccctcttgctctcctccacacggcgccctcacgcgcgccacctgtctctctctctctctctctctctctctctctcctcgccgctcgctcgctcgctcgctcgcgtggggaggagtcgctagggcttcgacctccgcattccgatctcgcgccgcgtcgctgccgatcggcggggtttggtgtttggtgttttggggatggtgtcgggtgggcgcgtggggggtggagaaggggaggcgggggaggcggcggaggtggcggtggcgatggtggataatgaggaggagatggcgcaggcgcaggcgccacccgcggcggcggtggcggcgagggagctggtggtggggtacgcgctgacgtcgaagaaggccaagagcttcctccagcccaagctccgcggactcgccaggaagaaagggatcctttttgttgctattgatcaaaaacgtccactgtcagatcaaggaccttttgacattgttctgcataagttgacaggaagggagtggcaacaattattggaggaatatagggaggaacacccagaagttactgttcttgacccaccaggtgccatagaacatctgcttaatcgtcaatctatgcttcaagaggtttctgaattggacctctcagattgtcatggtagagtcggtgttcctaagcagctgtttgttaatacagatccatcatcaataccagctgctgttatgagggctggtctatctcttccattagtggcaaagcctctggtggcaaaatcccatgagttatctcttgcttatgatccaatctccttgacgaagcttgagcctccgcttgttcttcaggaatttgtaaaccatggtggtgtcttgtttaaggtctacattgttggggatgcgatacgggttgtgcgtaggttttcgcttcccaacgttgatgtaggtgatttatcaaacaatgctggagtatttcggtttccaagggtctcttgtgcttcagccaacgcagatgatgcagatctggacccccatgttgctgaacttcctccaagaccacttctcgagatattggcaagagagctgcgccgacgattgggtcttagattgtttaacattgatatgattagagagcatgggacaagagatcggttctatgtcatagacatgaactattttcctgggtatggtaaaatgcctggatatgaacatgtattcaccgactttctgctgagtctagttcaaaaggagtacaaacgacgaccaagctatagctcatgcgaggggtgaaacgacgagcccttcaccgtgtcagtgtgtctcgaattcgctgtgtgtgtagtacaaatgtgaatgcaagaaggcaagagcaaatcctccgtggtaaagttgggcatcagtagttgcgataaagcagcgatgactgtgtcaagctgtaaattattagctcccgtttgctaacttctcttgttctcaaataattttgctcggctaattaatgaagttaagatgttacctgct

SEQ ID NO: 16587 - DNA, 1740 bp, Oryza sativa
  ref <308>: DATABASE ACCESSION NUMBER: AK067069
  ref <309>: DATABASE ENTRY DATE: 2001-12-06
gatttcccaccaaacaaaaaaaccaaatcgccgagcagcttcgcggcgacgcaccacgtcggccggccgccaccgccggagagggagggcctccccgaccctccccgccaagaaggatcctatggcggcgggggcgcacgcgtcgcgcgcttcggctccgatcattgcaggtctcacaggtgctcttcgagcagcatataaaggattttctcctcagttatgcaacttccatgcgtcagtaaataatggacttctccacagaaggaaaatacaactccattttatatgctcttttcgctccatacaagcaagatataaccattcgtcagctgttgcacctaaggactattgcgaaacttacatccagtttctaagagataaacagatagttcctgattcagatcctccaagtgctaaggatgtggacctactttaccggtttattgatcagagtaaaaaactcatggtgttaactggagcaggaatgagcactgaatcaggaattcctgattataggagccctaatggtgcttacagttctggttttaaaccacttactcatcaggagtttgttcgttctattcgagcccgaaggcggtactgggctaggagctatgctggatggagaaggttcaggagagcacaaccaaactcagcccattatgctcttgcatcactggagagaattggccgggtacactcaatggttactcaaaacgtggataggttgcatcatcgtgctgggagtaagccagttgaattgcatggaagtgtgtatgaggtagcatgtttagactgtggtacatccattgaccgagaatcattccaggagcaggtcaaggacctcaacacaaagtgggctctagctattgacagtttggaagtaggacaaccgggctcagacaaaagtttcggaatgcagcagcgacctgatggtgatattgagattgatgagaagttctgggagcaagattttgatattcctagttgcaaccaatgtggtggagtgctgaaacctgatgttgtgatgtttggtgataatgttcctgaagagagagctgaaagcactaaggaggctgcaagaaattgtgatgctcttctagtggttggttcagcactaatgacaatgtctgcttttaggctcgcaaggcttgcacatgaagcgaatgctccaattgcggcgatcaccattggtgagaccagggctgatagtattttatccttgaaaattaatgcaagatgtggggagatactgcccagaatacttcagatgggaagtctagctgtaccaaacgtaagttaagctggtgctgcgcagtcatctttgtcggaaaccatgtttccatgtaagaacaattctttggagaacaaacaagtcacaagggaagacgaaacaatgaaagaaacttttagcaactaattaagttcagttcaactgggcagaatatcatctccatcctgtttgcatgagatgagggagttaaccttgttaaccctgttgttgtaagtgtgtaaaccttaaccttgttaaccctgttgttgtaagtgtgtaaacctttttcagtgacaattcattcaaatgtttccaaagatatggatatcccgaactgatcagcacattgaagaagtacaatatgctttgatagttccttgtaatgtgtcattaagcagaagttgaaaaacgttctagctggtccggatatttggattcatgtagtctattgtgctcttcacctgtcc

SEQ ID NO: 16588 - DNA, 2326 bp, Oryza sativa
  ref <308>: DATABASE ACCESSION NUMBER: AK067070
  ref <309>: DATABASE ENTRY DATE: 2001-12-06
ggtactggtggtacggcggtttcagcggcggagttctcgcgggattgtctcgttcgtctgatccggcgctggaggacggcggttggtttctttttcttctgctgcttcgcgagcgggtgtgagagatcggttccatgcgggggtcgctgctgctggcctcgggccgtcagggtttgcaagcggaatctactcaactatgacggattagcctcaaaataaatgatggcagctgaggttaatcaaacttttttcgcgtggtcacaaggagaaccaactgaacgggacggttctcaaggtgtatctgtgtcccagaaaattgatcatggttccatctcctttggaagattcgaattggagtctctatcatgggaaaagtggtcagtattttctgatgacaagcgtcatgaagaatttggcaaattcaatggtttagttgcacagaagaaggcatattttgaagagtattacaggaaaattagagaactgaaggcacagcagcaaaaccagcaaactgaacttattttggaatacagtggtgatggcagtgattcgagtcagacaggagaatatacacaaggtgcagagcttgaaactcctactggatctggaactatcgttgatgattatgtggagcaaggtgcacatgaaactacctctgagcaaggattgacatgttatgatgaccatgaaaacgagaacttcaatgcagaattctcctcatccaatatttcttcttcagctgtaggtttacagcaaactggccgggatgctagagaaaatgtacacggtgatgattcggctggtaaaatggatttagagcagcagaatgccatttctggtcatagtcttggaacagcatatgaagttgtaagggctcctaaaagaattatcgagaaagactccaggcttagatatgctccaaagatagtaccaaagtctgtcaaaacctcctccgatagtcctctggatcgcacatctgttagtaagaggcctgattctctgaagcttggcatgagtattaaccagaaggctaagactgacaatgatcgtttattgagaggaccaaatgtagcgcctcataagatgtctggatcaaccgaaaggaacaagcttacaacaaaacaaacaggtgtcagaagaccttcctctgcatcctcacaacggccctctgtgggagagcggcaccggatagccagggagagcataaaaaagcctgctgatgtttccaccccacggcgtccttccactgcagaaaggcaccctgtcaccacagagcgtgcaaggaagcaagccgatgtagatacaccacgccgaccatctacttctgaaagacgtgctgtcaacaaagggagtgctgacatgaccactacacatcgcccctctactggagaaagacgatctgttaccagggagagtgttctgaagatggacgtaagaacacctagcaagacaaggcctactatgacgcaactgaagggtgcaacaaccacagtgggtattgttaaaaaggcaggcactccaaatgcttctaaaagcatcaacatgggaacaaaaagcaatatcagagaactggaaggaccttcgaaagtgggcagacactctgttgggtcaaaaattacggacctgcaaattgctggcaaacagaaatcaagctctgtccaccttcctccacggaaactattgagttccagtattggagaaccagcactgcaaacctttacaaggccaaaaaagaaagatgttgcagcgcaatctcgagcatctacatcgaagagagcaatgactttgcacactggaaacgtaaaggggaggagttcaaatccacccccaccaccacctccaccgcgtcggccttcacggacgacgaacagaccaaatggcagtaactcatcaactgttggacaaaagccaaaggtttcatcagcaccaaaatggcattgatgcaaagggagactttcattcaacctactctcccgcacaaatgatggatctgcgacaagtcgcaccgctacacgaatcttaaagcatcggcattgctgtccacttcccctgaatgatgtttgatgtttctgtatatcagttcctctactctctagtgcctccccccttcccttcagagcaagtccaatatagtgtatgtagttacctgtatcatatcatcaactgcctagctttgtcgcccaaggaacttagaacagtgctgtacatacctcaaataaaatgtttcgtcagctaaagtaaggctaccctgaacatgtgaaaaatctgtggtctctgaacattgtctgcacatcatcagtagtaatggaaatcgttcattcttttc

SEQ ID NO: 16589 - DNA, 1157 bp, Oryza sativa
  ref <308>: DATABASE ACCESSION NUMBER: AK067071
  ref <309>: DATABASE ENTRY DATE: 2001-12-06
gtctgtgctgtgcagccctgctgctctcttctccccctactccaaaaacttcacaaaatcaccccaaaaaagatccattctcggagcacaaaagaatcttttgcaaatttgtatcaaacaaaaatggcagttcttggtctatccactgccttctctcctcccagaggttcttgtatagctgtgaggatcaggcatggcgctaggtcagcaaggagcaacctgtccctgaggaggaggagcgccggcggcggcgcctattggcgtccgtgccgaggtgagcttcgtcgacggcgacgaggcgaagcggctggtggcggaggaggggtacacggtgctggacatccgggaccggacgcagcgcgagagggcgcacatcaagaactcagcgcatgtgcccctcttcgtcgagaacgacgacggcgacattggaactattataaagcgcacggtacacagcaacttcgccggcctgttcttcgggctaccattcaccaaacggaacctagagttcaccaagatggtcaaggataagttctcgccggagagcaagctgctggtggtctgtcaagaagggctcaggtccacgggagctgctgatgtattggagagagaaggcttccaaaatctggcatgcatcaaatcagggcttcagacactgaagccaggaacatttgaatctgttggcaaaagtgagctgcaaaacgcagggaaagcaggacttgtgacggtgcaagggaagatttccgctgttcttggaactgtgttgataagtgcctaccttttcatcacattgttccctgaccaggctgaaaagctttttgacttggctggaatcaaattgtgatcagaattgtatctcttttcatgcattttggttctcctcttggggattcatgttcccattgcaaggttaacttaggcggacttggggagatcttttcatgatgaaaagaaagttaggctcagtgtgtaatatgtagggaattgttggcatatccaaatgtatttcctcttgaatacattattttgctcgcatgcatcctctccttttccaattgtatgtttggtttatcgaatttttgttgttccgacaaaaaaattaggcccttgcagagtaatggttcaggatttcaagctgagcacagaatagaaagttt

SEQ ID NO: 16590 - DNA, 2208 bp, Oryza sativa
  ref <308>: DATABASE ACCESSION NUMBER: AK067072
  ref <309>: DATABASE ENTRY DATE: 2001-12-06
gatcgtcgtctccttcggctcgcgtcgccactgccgccgctttctccaccgccgtcgccaccgcctccccctcgcgccgccacctccgcctccgcctccgcctccgtctccacctccgcctccgccgccgccgtcgcgccgccatctccgagctcctccgcctccccctcacatcgtcgccgtcgcggagcggcggtgaaggcgggtgctatctccatcggcgacgaggtcggagcaccgacgaccacgccacaggtcccagtctccctcgaccctagcagccgcccttagccctccgccctctgccgcctctgtcccatccgccgccaccgtctccgtctccgtttccgtctccgctccgcctgcgccgttgccgagcgtctttccctcgcggcacgccgtcgccgtcgctgggtgcgccacctctgcatccgcctccatctcacgccgccactgccgccgtcgctgccgaccgccgacgtctggatccggcctctggctcggcggggtccagctcggtggtgaggagatccaaggccgtcgagcgcatcctggatctccggcaccaatgaccgcgcgcatggaactggcagtggcagtgaggagcacggtgacggcgcgccaatttctgagataagttttttgcggtttgtactagaaagaatagcccttccaattttttctgcgtcgcccattggatgggaggaggttagaagaagatagaggcagtgttatacagggttccaccgggtggcttctcatggaggatgctggtacagggagtggtgaagcatggtggaggatgcaagacggtgcggtgctcgagaggcgggcgcgaggtgatgtccggatgaggtcggcatcgggtgggaagaggacggtttggagttgcactaaatcaaaaccgcatttcatcaatggtatagggagctccgtttcagatttggggaagcacagaacttgtccatgtttgaggatggcaccgttgtgtcaaagtccgaggaggctggatttacttactgttaaagatgatgagaggcctcctgtgatttacctgtaggatcatgtgagaatacaccaatctgcaggcaaaaaaaaaaagttcagattgtcgaagcaaagctgactggacaccatgccaattgctattgtttactgcacaatcaaggagatttttggctgattctactaaatttctgtttggtaaagattaaggagtgcttgaacaaggttgcctagacggtgtttttcctcgctcatcctgaaagccctgatcctgaagctcaggtactttcagtgaacatgaagcttactcataaggaatcaaaccaattgtgaagatagcaggaatggatccaaatggatcggcgtttgaagaacgcgccccatttcgagacataactaatatttcttcagatgcaagagctggaagtacaacttctactaagcttcaacgcaacactaagcgtacgcttgagctgtgtttctgtgcaaagaatgttgatccaacagctgacttgaaaaagtatatcgaagatcttgagtgcctagaccgttcaagcaaattctatgctgttgctgtgaataacacattcatgaagcaggatagagtttactttacgaaagaattttctaaagactacttaaagccattgatggacggcaaggaaaccatcagcattggagttcaaatggcaggtggtgtttcaaagaatatgatgctccagatgtcaacggatgatcgatgcaacctgaagaaagtatgggcaaaatttgcaacccgcaatcacatatacctacaatcactatgcaccttccatttcaacaaaacaactcgcctggaagccaccttcgatgttctataaagaacatagcaatactcatggctatgttgcagccattcttttgctgccaccaaccaggttgatcactgtcaagataacctgtattagttctaggccttacatggtaatcatggaacctcctaatatgaagaaacatctatatatgtacttactgctattagagacctctaaatatcaagatgcctgtgtgtaatttgtactatggacacttcctcatactttctgcccctgcttgcgtccaggcggcgcgccaacggcgcgcccctagctctagtgtgcttgtatcaatcaaacaaaatgttgacacatacagtttgtgctaaatctgaacatatttttcttc

SEQ ID NO: 16591 - DNA, 2211 bp, Oryza sativa
  ref <308>: DATABASE ACCESSION NUMBER: AK067073
  ref <309>: DATABASE ENTRY DATE: 2001-12-06
gagccctccattagcaagagtgcccaatctatctgtcttctccataagagagcatctcaggtgtagtttttagtttctctctctaaaaatgggaggcaactgaggaagaaggaagaacacggccttcatttcatccaattgagtcaagagaggaaatctgaatttgggggcggccaagaaatggagcagtatgaggtgctggagcagattgggaaggggtcatttggctctgccctcctggtgagacacaaggttgagaagaagaggtatgtcttgaagaagatcagacttgcccgtcagaccgacagatgccgccgatcagcacaccaagagatggagctcattgcaaaagtaaggaacccttacattgtggaatacaaagattcatgggtggagaagggttgttatgtgtgcatcgtgattggttactgtgaaggaggagacatgtcagaagccattaagaaggccaacagtaattatttctcagaagagagactttgtatgtggcttgtgcagctcctgatggcacttgattacttgcatgtcaaccatatccttcatcgtgatgtgaagtgctcaaatatatttctgacgaaggatcaaaacatacggctcggtgattttggtttggccaaagtattgacttctgacgatttaacttcatcagttgtgggtactcccagctacatgtgccctgaacttcttgctgacattccatatggttccaagtctgacatatggtcactaggctgttgcctctatgagatgactgctttgaagcctgcatttaaagcatttgatatgcaaacactgataaacaagataagcaagtcggttctcgctcctctaccgaccatctactccggtgcatttagggggctcatcaagagcatgctgcgaaaaagtccagatcacagaccaagtgctgcagaattgcttaagcacccacaccttcagccctttgtactggaactccaattgaagtcgagtcccgctcgcaatcttttcccggatacaaataaggcttcatgttctgatgatgaaaacaattggaaggctaagtacagcaagagccattcatttaaagtagacaggattgtaaaagttgacaaagttgctgctaacaatggccatcctagttctactggaactgcaaaagattaccaagaattgctaaaacaaccaatggatgagttgttaggacaattaaccgagaaagttgttgatgaagtgatacatggaaatcattcaagagtaacaaaatctccagctcctactccaagaagggcatcatcaactcctagaatacgactagaaccttcaaagacatttcatgctagagcagctgagactccaccatccaaatgttcactggaacgagcaagtcaacctacaagacgagcatcaaccccggtgaacatgttgcaaactcctgagaaacggcagggcgccgacatcctcaccagactaaaatcacccgacgtttcagtgaactctcctcgaatcgacagaatcgccgaattcccgataccatcatttgatgatgaacaattgcaccccacaaccaagctcaagctctatccaccatccatcactgaccaatcgatcaccaaggacaagtgcacattccaggttctccgaagcgacagcagcaagaaccacaccggagacagttctgatcccagcattcttggcactgacagtaatccactcatcacgagctcatcggattggatgaagcagaggagattcgacacgacgtcgtaccgtcagagagccgaggcactggaaggattgctggagttcagtgcacagctgctgcagcaggagaggtttgaggagctggggatcttgctgaagccatttgggccagggaaggcgtctccgagagagacggccatatggttgtcaaagagcttcaaagggactggattgtgattaatcagagtcctgcaaatgcaaaaaaaagaaaaaaaaaatctgaacctagaataattttgtgtctttgattagattcaggctgctctgtacagtttcagttttgtggtaatatcctcttttcgtctttgattttcgcgaaatgtttgaaacactccgttgtttggcgagagaagctccatttttgtgtatagcaaataattgctcaagaatggggaagcaccggtggtgtggtggtgaaatcaggaatgaatttactccgtattctgaggg

SEQ ID NO: 16592 - DNA, 1630 bp, Oryza sativa
  ref <308>: DATABASE ACCESSION NUMBER: AK067074
  ref <309>: DATABASE ENTRY DATE: 2001-12-06
gatttcttcccccttcctcttctccttcctcctcctcagatcaagaaaccgtgtcctagaaaccatcgagatcgccctctcccccctcggatcgcggcctctcgcgcggatcgatcgctgctcggtttcttgattttttttttatttttttttctccggtgaccggagaggcggtggtgtttggatcgggaggggagagatggtggcggaggcggaggtgatgcatcagcccgtgccggtgttggaggtgccgtaccaccggtgcgtcgccaagggtgtcgaggaggtggccgccgcggcggcggtcgcgccgccgccggtggtcgaggtcgaggttgccgtccaggtgcctcacatggggttggagagtgctgctggtgcaccgagcatatcagttgatgcactacagtttgttcccagtattcgatctggtagctttgctgatattggacctaggaggtacatggaagatgagcacatccggatagatgatctctctgcccatcttggatcgctcttggtgtgtccgttgcctagtgccttctatggggtcttcgatggccatggaggcctggatgctgcagcctacatgaaaaggcatgcaatgaggttcctgtttgaggacagtgagttcccacaagcatcgcaagtagatgaaacatatgttcagtcagttgagaactctgtgcgcagagcgttcttgcaagcagatcttgccttagctgatgatttagatatcagccgctcttccggaactacagcactcaccgcattagtcttcggaaggcaattgctggttgcaaatgcgggggattgccgtgcggtcctttgccggagaggcgtagcgatggagatgtctcgagatcacagagcaaactatgccgaggagtgtgaacgggttgctgcatccggaggatacatcgaggatggctacctcaacggagtcctatccgtgacacgggccctaggggactgggacatgaaaatgcccgacggctcgatatcccctctcatcgccgagccagagttccgacagaccatgctcacggaggacgacgagttcctcatcatggggtgcgacgggatctgggacgtgatgaccagccagcacgcggtgagcatcgtccgacgggggctccggcagcacgacgaccccgagaggtgcgcgagggagcttgtcatggaggccaagaggctcgagaccgccgacaacctgacggtgatcgtcgtctgcttcgtctcggagcttgggtcgccgcggcaggagcaggtgggggggcaggcgggggtggcgaggccgaggagttgcaagagcctctctgcggaggccctgtgcaacctgaggagctggctggagactgatcgctagggcgaggcgccggtgtttggttgtggccacttcacacttgtgtacatatgctgacattagttgttttttgttcttctgatttgttgagaggctgctgaggtggagcagggagggtgagcagccggcagttttgtaggccattttttttcctcgttattatttttctgcgttttgttgacatgttactgctattgttcacaccattgctgttgtacatatctctgttgagttcatgtatggatggactagcttcccttgagc

SEQ ID NO: 16593 - DNA, 1106 bp, Oryza sativa
  ref <308>: DATABASE ACCESSION NUMBER: AK067075
  ref <309>: DATABASE ENTRY DATE: 2001-12-06
ggtggaaaccaaacccccgcgtccgaaccaccacctcgcctcctccccccctcttcttccagccccaccgcgcgcacagccgcagaccacggcacggcgccgcgcggccgtaccatgccgtgaccggccggaacccaccaccgcctcgaccgccgcgcatatgcaccccatggccgtggctgtggccgccgccgtctcatgcccgcgcctcgtccccgggcgtatccccctctccgccgcctccgtcgccgtcgcccgtggccgtggctgcggggtggcggtgagggcgcgtggccaaagcgccgccacgcccgacccggctgccatcctgcggcggccggcggtcgtgacgacggcggctgcggaggaggagggggagggggagggggagggggagggggagggggagagcgaggcggagtcctcgccgggtggtggttcgggggaggatgagacgccggagggaggggaggaggaaggggacggagagggagtgggtggattgggaggacctcatcctcgaggacaccgtgccgctcgtcggcttcgtccggatgattctgcactccggtatgaaaatggtgatcgactgagccctgaacatgaaaaggcaattttggaacgattgcttccttatcacccacaatatgagaagaaaattggatgcggtattgactaccttacggtagggttacatccagaatttgagaactcaagatgtcttttcatagttaggaaggatggtgagcaagttgatttttcattctggaagtgcatcaaaggtctcatacgacaaaagtaccccatgtatgcagatagtttcattctcagacattttcgcaggaggcaagattaccgaattagtgactcgtaaaattatttcttgtaacatttctctgattttgatttggcccatttgcccttaatgccctgtgatcttgcatacgttcaagcacacgtggaaggttcccgttctaagtatctcgttgggctcgatacaatttccttctcctgtgtgtacatatagggtagtcttccagttgaacttcgcctgactttgcagcacgctcattcttgagaagttatatatgtgctagttcttggct

SEQ ID NO: 16594 - DNA, 1319 bp, Oryza sativa
  ref <308>: DATABASE ACCESSION NUMBER: AK098986
  ref <309>: DATABASE ENTRY DATE: 2002-08-28
gggtggcatcaatttgatcccgtcacgtctccgccctcttctcctcgcttcttctcgccgccgcgcccgcgcgctgctgctcttcgcttcttctcggcttccctccgatctgagagagcaagcatagcaggagatcgggagacctgtgttgcgcgccatggcggcgatggtggtgggagcgttgaggaggggaacggccaccgccggggggagctcgcggtccttcgcccgatcgctccctagacctgtgagcacgctggtcgtagcggagcacgaaggtgggttcgtgaagccctcatctctgagcgcattggcggccgcagaagcaatcggcaaggatgataatagggtttctcttctgttgggcggatccgggccggggcttcacaaggctgccgagcatgctgcgtccagccatccattggtatccgaggttcttgttgctgattcagatgtctttgcgcatccattggctgagccttgggccgagctacttcgttctgttcagcacaaaggtggatactcacatgttatagcgtcatcaacctcgttcgggaagaatttgcttccacgtgctgctgcccttcttgatgtgtcccctgttacggatgtcacttcaatatctgagccacgagtctttgtgaggcccatttatgctggaaatgcgctttgtactgtgcgatatactggagaggatccatgtatgatgggcattaggtcaacatcattttccccaactgaggctatgtcagaagcaaaagttgcacctatcacccaggttgatctctctttcctcagtgaaggaagctctgggaaatctgcatgggtgaatctgaaatcccaagatacagaacggcccgatcttgcaaatgcacccgtagtagtaactggaggcagaggtttaaaaagtgctgagaatttcaaagtattggagcagcttgctgagaaacttggagcagcagtgggtgcgaccagagctgccgtagatgcaggatttgttcccaatgaacttcaggttggtcagactgggaaaatagttgcgcctgagctctatatggcatttggagtatccggagcaatacaacacttggcaggaatgagagattccaaggttatcgtggctgtcaacaaagatgcagatgctcccatatttcaggttgcggactatggcattgttgctgatctattcgaagttcttgacgaactgttaaagaagctacctgacaagaaatgagcgtgctaacatgatgatccgtgtccatgtcatatttgttctagtgttcttaataatatgaagcgcccttgtaatgtgattctgc

SEQ ID NO: 16595 - DNA, 1520 bp, Oryza sativa
  ref <308>: DATABASE ACCESSION NUMBER: AK067076
  ref <309>: DATABASE ENTRY DATE: 2001-12-06
ggaggtctctcttacactataaacaccaaggcgaagcagccgcatgagtcccacccacctctcctcccccggcaatcaaagacacaccccaagtactcgatcgcctgtgtagcttcttccctgatcgtgccatgggctcctacgttcaaggcgaggatgaggttcccgtgtacgaatctggagcagagatcgtccagaagctgcaggagaaatggaagtcgacggcggcgccgttcccggcgatgtactcgagcgtgctcggcggcatcatcctggacccggcgatgatgtccgtcccgctcgacgaccacatggtccaccgcggccacggcgtgttcgacaccgccatgatcctcgacggccacctctacgagctcgacccgcacctcgaccgcttcctccgctccgccgccaaggcccgcatcggcaccccgttcccgcgcgacacgctccgcagcatcctcgtccagatgacggcggcgtccaactgccggagggggtccatccgctactggctcagcgccggcggcggcgacttcctcctgtcctccgccggctgcgccgggccggcgttctacgccgtcgtcatcccgaccgactactcccagtgccgccacggcgtgcgcgcggtgaccacgtcggtgcccatgaagccgccgctgttcgccaccatgaagaacgtcaactacctccccaacgtgctgtccatcatggacgccgaggaccgcggcgcgttcgcgtcggtgtgggtggacggcgagggcaacgtcgccgaggggcccatggtgaacgtggcgttcgtcacggccgccggcgagctggtgctcccggcgttcgacaagatcctcgccgggtgcaccgccaagcggctgctcgcgctggcgccgaggctggtgaagtccggcctcctcaaggccgtcaccacccgccacatcgccgccgacgaggccaagcgctgctccgccgagatggcgttcgtcggcagcggcctccccgtcctgcccatcgtcgagtgggacgaccagctcatcggcgacgggaaggtggggaagacgatgatggcgctgtcggatctgctctgggaggacatgaaatcggggccggacaggatcgcagtcccgtacaagtgatggattattggagttgagtgaggctcctcgggcgtacgtcagaaagaggtgtgctaccgacgtgtggattcatgacggtaagcttcacctgttagggattcacgtctcttcgactttatatgagaggagctacgtccatcggagataggaggagaagggcaacgtgccgagtatatatgtgtagtgtacgtacgcgtgagcgagctgagatggatatgatgcagtatcgtgtcgtttcgtttcgtttctccttgtgttcatgtgtggtttgtatggttttttatctgtacgtgtcgtcaacgtaatccttgtattttgcggtgtatcagtactgtatgagtgtatgtgtttatcgattgatcattaagtgaatgaataatggattctctc

SEQ ID NO: 16596 - DNA, 2691 bp, Oryza sativa
  ref <308>: DATABASE ACCESSION NUMBER: AK067077
  ref <309>: DATABASE ENTRY DATE: 2001-12-06
gagtcttctccaattattcgcccatctctctctctcttcttcctcctctcctccatgaaagctagggaaattaactaagggcagtggtgcaccacaagttggtgaagctgccagcatgatctgatgatgatgatgatccacctctctcatctgtgttcttgattaattacggatcaatcgatcaggtcatgctgtagtttcatctgctggttgggagcacagcaaaaaaaaaccctaactttgtagccggatttgcatggattaatctgctaggtagctcatcagattctttgagagtttgccttgctcttctgcagatgaagacgtaatctttgaacagatgggattctcaactctcaaggtgaggtagtcatcaatccaatccatatacctgctcaaattcagttttaattaaagactagctgcttctatggagttaattagggatccttttttatagatctctcttgatctgtttcttagtctgttctttcttaataaggcatatatacctcttggatttggattttcttgaaaattaaggtagtttatgagttggatgtgttgtgttatctgcccagccttaatttaactgtgcttcctaaaaattcgtttgatttgatggtagcatctgaattgtgaactcatctttggagcttggactttagaccaggtgccttaattccttaacataagatttggtccatattgtttatggagcttcttatcaagaaatactcttttgattagggagtccccttgtcactttcttcagttgtgcaggtacatatgacatatctgtattaaactgatgacattcataaccaactgtccaagtagggattcatatctttctactaattgcagaatgttttcttggctgaaggaagtttaatctaactgttcaagttagttgcttggttagctgatagtgatccctgtgttttctagttgttgatactgcatatacatatatctgtgacatatggctagttcttgtttgttgtgtgtagataagatacatacaagattctgatctctgcagcaaaagaaacaaagcttccttttttctcttgttttatcccctaatatatctcttcttttgcagttctagctagcaatttcactgtaaaacatgtgtattaccgatcaatactggcatatatctgaacttgatgcaatacatgtgtattactgatcaatacataaaactgaaaatgtggaacatatctgctaattattttcatgagtgtggctttgattattgtgatcttgccacttgccagcaatgatgttagctagtgatgggaatatcacctgaccaaaggagggacatgattaaccttgctaattaagtaacaagaaaaggaggagggggcaaaagaattatggaatgggttttcttgacctgaagacaagtagtaagatttgctaatgcttgcttgcaagatatgcatgcctaaccacaaaacaaggagtttggcactacagaactgaatgatgattgcctcttgcttgaaggatgaaactgctgcccatcttttgatcatggcacccccttcgcatatgcatgattgcccacacttttctcctcttttgggctctgtactatggagatattcaagccattttcttgagattttctctgcaatgtaatgacctgttctgtcccttgatgtttcacttgcaaaggagactgtactacagcatctctctctctagtctctacctctcttgatgtttcacttgcaaaggagattgtactacaccaccatctctctctaccaatctctctctctctctctctaattagttgcaagttttgttggcatctctaaccacctctccacactcatggtcatggccatggctagcacatttgtcacctagcttgcattgcatggtcctttggaagattcatgggccacacacacatggtgacattcatgcaaagctccaggcaggtctcctttattgtgatttggtcagctagctggtttgttacaagatgcccacaacctttgtcctttcaattcaatgcagtgtgcagtgtgtgcctgcaactttcatatacatgttgtaccatcatgtgtcctcttcctggcttgcaaaaatgtaatggctaatcacatccatcatgcttgcaaattaagctaattaattaatcacaggtggctagctaattaccaactgatgatgatgattagtgacaggcaaagatgataatctagatatcttgttcttctcactactgtcttgtcattgttggcgtggagtgcaatgctgccgtttgtgtggctccagaaaggttgccggctttgctgcccttctctccatgttcttgtctgaatcctgaacattttaacaaccgtgtctttttctcttcttccttttcctctttgctgacaagttgatggttttgagatatctattgttctgcttgtttttgtttttgcatgtgaagtcatattcagatggtttgcaaggattagaagtcatgggtgtactgtgtgcaaattgaacttgtcaggaacagtgactgaattttattgttcaggctttgcttgtctgaactcaagaagaggtagagctagggtgttattttttttatctgatttatgtgatacataatcaactaccattcgtttgacagaacaagattgataggtgcatgttcagagaagttccttc

SEQ ID NO: 16597 - DNA, 3218 bp, Oryza sativa
  ref <308>: DATABASE ACCESSION NUMBER: AK067078
  ref <309>: DATABASE ENTRY DATE: 2001-12-06
ggtcgtggacgcggcgcggcgtcggattcttccgtacttccgtctcgagcgacgccgccggcgacaaccgcttcctcgcgacctcccgccgccggcgaggaaacctcgtcttggtcctccaagttcaaggtatcgatagctatgggataatcccgaattcccgatcgatttcgattctatttgcatgtgttgggaagatggagaggggtggggagatggatcctcccatcactgcctcgctgggagccattcatattgtttttgggaaactggtccggttgctctccgagcctggactgcggctgcacaaggaagagatgaaagcgctaggtgtgctcaaagacggcctccaagttttgatagaagattatctgatggaaccatcagatctggagggccctcccttctaggctaactactggatgaaggaggtgcgggagctgtgctacgacatcgacgactttgttgatgagcttttccatgctgccgctaatgccaagatccaaagagctctccagtttaaggcttctccactccggaagaaattgcccctctttaagacttctcagctccaggagaagttatcccgcttcaacgcttctcagctccagaagaaattgtcatggaggcaaaaaattgttgatgaggtctcaagtttcagttcttgcttgaaggaattgattatgctttataagcgttatgatcttggtagtttagagagacgttccgggtgggaatcaaatggaacaatgtctttaactctcccgttagctgaagagaccagccaacgctgctacctcggtatggacaaagatatggataaacttgttgggttactaaatgatgggcagcaagaatgcaaggtcattgctatcattggactttgtggtgttggcaagaccacccttgctgaagaactttatcagaagtttggatttcagtttcaatgttgtgcctttctaaggttatctcggaaacctgacatgaagagggtgctcggtagtttattctcacaagttcggcagcatgatcctcctggtactggtactgttgaggtggataatttatcccatgagatcaagtcatatctgaatgacaaaaggtattttattgtaattgatggtgtttggtcatcatatatatggaacactatcaatcagactttgccaaagaatttttacagtagaatattgataactacagaaattgatcatgtagctcagaggtgctgtgttgataaccgcaaatacatctttaagaaggaaccatttaataaagttgaatctgatgaattcttcagcagagtccatgaatatctaaaggaaatttcttctgagattgcacaactctttagtggcttaccgctcatgatggctattgtagctagtattttaacacgattgccaccaagcacagagcaatgggatgttgtaaaaaaaatcattaagttctaaattggaagggattttggacctcatttacaatattattcctcatcctttgaaagcctgcatgctttatctcggaatatatgaagaagacgatataattttaaaagatgaactgttgagtcaatggtttgcagaaggatttattgatacagttgatggaaatgatgagaagagggtggcattgatctattttgattagcttatcagctatgggctaatacaacctgtagagaccaggtttgataatgaagtgttgtcctttagagtgcattacatgataattgatcctattcggtctaaggcagtccagcacaattttgccattgcaattgataatcatcagacagatgtgcgaattgctgataagattcgtcggttgtcccttcgttttggcaatgcaaatgatgtgacaacaccaattgggttgagatggtcacaagttcgcacgcttgtcttttttggacctctccgctgtacaccttctattgctgagtttagagttcttcgagttttgatccttcgattatctgctgatgatgatgatgtaacttatgacctctcagaaattgctgagttgcttggattaaagtatctgtatattgatgcatgccatctgaatataaggctaccaatgcagatgcgacagttgcaatatttggcaaagttaaaaatagaagcaagattgagttatgttccatcagatattttttatttgccacgattgcaacagttgattcttccaagtgagactactttgccccatttcactgagccgatgaagtctcttcatactttagggtgttttgatctcagcgggagctcaacagaaagtattgtggatcttgggaagatggtaaatcttcaaaatcttcacatgacatgttctagtggacagcctgccaatctgaaacttctagggtctgttctcaataaactcaaaaacatgaagtctctaattctggtatttactggttcattggatgatgctgattcttcaattatggaaatttcttctgatgacttcagtgtttcatatcctccggttcttctgacaaggtttgaattttcatggcgctcatgcatattttcatgcctacctaggtgaatcaaagaactgaacaatctcagtatcttgaagattgccattagtgagatgttgggacatgatgttgatgttcttagtgtgttacctgcactcacttctctctctgtgtatatccaaagagcacctgaggaaaggatcagttttggtaaaggaggattcgtagctttgaagtactttaaactcaagtgcactgtaccttggctcaaagttgaggtagatgcaatgcctaatcttgaaaaactgaagctaaggttcaatgttggtctcagtctgcaaagagtgggtctgcatggcaataaccttatcaacattgagcacttgtcaaggcttaaggagatatatgcaaaagtggagagtgaaggttctgttgatgcagggtctgctttgatgactggtgtttggaatgatccaagaaatcctacaattaccattcaattgatttgtggtttctatggtgaaatgactagactgatgacaaaagatgatattatcttggaagaaaatccagacagcataactgaggatgagtcagacagaaggatgagaagaaacaagtggatgatcacaggtttcaatttttcgcttctttactttggtttcactttttgaacctaattactcgtgtaattcctattataatgcagctaattggtgttgtaatt

SEQ ID NO: 16598 - DNA, 2364 bp, Oryza sativa
  ref <308>: DATABASE ACCESSION NUMBER: AK067079
  ref <309>: DATABASE ENTRY DATE: 2001-12-06
gtggactccacaggaggaggaggaggaggaggagagagggatccggaatctcgcgggggggatgccgccggtgggggaggtggcggcggcggaggcgagatcggggatggtgctcgggggaggggcggcggcggcggcggtggggggaggggaggacgcggtggtgatgcaggtggcgggggcggaggggcaggacagcgtcatcaccatcaactgccccgaccaggcgggcctcggctgcgacctctgccgcaccatcctcgagttcggcctccgcatcacgcgcggcgcagatgtgtctacggatgggcaatggtgcttcgttgtgttctgggtcgtgccccgcacgccatcaatcaaggtccggtgggcgaatctcaagaaccgcctcatgtcaatgtgcccgtcaaattacccaatgactttctaccctgagatcacccagccaggcccctcccagttctaccttctcaagcttttctcagctgatcgcaaagggctattgcacgatgttacgcatatattatcggaactagagcttataatccacagagtgaaggtgtcaaccacgccagatggcagagttattgacctcttcttcatcaccgacggcatggaattattgcacacaaaggaaagacaagaagagacttgttcgatgctgattgctaccttaggtccttccataagctgtgaaatcctattagcagaagggttccagcaaggattctcttctctcccaccgacaatctctgaggagctgttcaggttggaactggctgatggtgacaactgttcaaggtcaatttgtgcggagatgaaaagagtgcagaaagcaaccatcaactttgacaataccctgagccccgcacacacactgctccaaattaactgtgctgatcaaaaggggctcctttatgatattttgagaacaatgaaggactgcagcattcaggtaacatatggccgattctggtcagacaagaaaggttttcgagaggtggatctttttatcaagcaagcggatggaaagaagattattgatcctgagaaacaggatgttctcagctcacgcctgaggtcagagatgctccatcctctcagggtgatgattgtcaaccggggtcccgatgtagaactccttgttgctaaccctgttgagctatccgggaagggacgaccacgtgtattctacgatgctacatttgctctgaaagcgcttgggatctgcattttctctgtaagaatcacagaatattcagagagggttcaaaatgaatttgtatttactctcttgcttatgcatttcaggctgaaattgggaggcaggcagcatcagagcgtcaatgggaggtctacagattcctcctggatgatagcagtgagttcccattgtcaaacagccttgtcaataggaaccgtattgtcgacagggtaaggaaaacgctgctgggctgttacaactgagacttggtttctatctccaccaatccaaagctcaaagacaactgatacagtcagtatccaaactgttccagttaattaccaggcgaacgctcagactaggactactccaggtttgtcactgcaggtgataaacttgctgccataactggctggtatcactgcctacaattgccagttttctgttcatgtcatcatgtcattgaaggatatgttacgggtttgtgaccaactcatcgtgttcagtggtgatggaagaaagtatctttatgaaggtcgcctgcttgtcatcttcagaaagagctggcaatatgtgtaacaaaggagcggatgacatacccagaatatgttatttggagttacatactctgagcactgttgtaaatggtttctgaaaatgacaaatgagcataattgcatctccgtctcccaattccaatccattttcacgttgctcacatgttatgtcatgaagagagaaagaaagagaggaaaaaggcatatgtttggtgggaggagcaaatcggagcttcaattattgtgctttgttttggccagggtattactggatgctgacacagatacatgagcttgttgtaaagtagtgcaagatgtgccatctgcctcacctgccttgctttcctgcctccttcctaccttcctgtatgattgctatttcttgagtagattaaccctgttccctgatgtggggtttgtacttgtcactttgtcagcattcatgctagtttctagagcttagagccctagtttgttaatgcaaaagcatattataaatatatgtaccatctggttgtaaatgactcgatgaaattctctagtgaccactattctcgtgtacattgttttgaaccaaacacctgaataatttgatcagtaatt

SEQ ID NO: 16599 - DNA, 2063 bp, Oryza sativa
  ref <308>: DATABASE ACCESSION NUMBER: AK067080
  ref <309>: DATABASE ENTRY DATE: 2001-12-06
gggcgcccaccgactcggtttcctcctcggtgcctctcctcttcgttcccttcctctataaatgcaagcccgttcctcccctcagaccctcatcgctgtgaattgcgcgatcgatggcttccttcctcttctcgcgcgggttattttcttccttcccctttccccctccgccgcgggtgggctgggctggtaagtcggtaggtaagggatccatcggtttcgatctcacctggttcgctgcccttttgttgatttgatcatcaggtggtgctttgatcggttcggtccggtttctagtttcggtgactgcttgatccgttcggttttgggggtctagtttcggcgattcgtctcttgctgttgcgttagttctctcaacggcccttctttcgattggtttatggctaatcgtgatttgttgttctggcaatactgattgcgaggtcggttggtttgcttcactttctgttcggtgagatggattgtcagcttaattaagctgtaccgtggatattttgggtatgatagataaaatgaagtttgtgctctgaaatggtcaatggttaggattgctcactggcctaagatattgttgattattgttctgttcctttcaagtttgtgcatttgtgatgcttggtagttcgagacaattcggcagcttacaattatatacaatttttccttcagatctggtattttttatgatataaggtcaagtcatatcagaacatttaaacatgatcgtggtggctttcttaggtttgctcagagctttcaaatcaccgctgttaatttgttaaattccagcaagaaagagtgctaaagtttgagttaaactagggtgttggaagattcttcagtattgttcttctgtgtcagttcttagttaaagtttaacttctggatttctttcacgaggatttaaggagctctttttgactgccttccctgtggattatttttatcgtagtacaggaactacagattacttgctgcttgacctgttcagtttgaggtacaaatcccgttattttcatgttcactggtgttagtttgtaggaaccttaatgctttggtttagggttatgactaattgcaattaattgaattttcaatatgttaatattgtgtagttggtttgcttccattagaagcgattgtccgaccacttaatctgcattatgaacattttttggcatattgaaaccagagaaactgaagcctgtggtatgaattggtcatggctaggattagacattggtgtataagatggtttctccattccattcaagactggtgctacttcttttctcatcaaaactaacaagtgaatgatgttatttggaggaaatttatctgcttgttactttgctgttaagtcaaatcctgctatggttcatggatcagtcaatcttgtcagaacatttaaacatggtcatagttctcacagaattttgatgttaacttgtttacttccggaaagctaatttatcagttaagatggagatggttatgtagtagctaaaaggcccatcctaaagtttctatggtagatgattcttttggcagttacttcctttgaacaatatacaaggttatgaaggtgatgctggaatctttgactaatggtgaaaataatttgaagatttgtttcaagaaaattgatggaactgaatttgctttcctgctctgagaagtaaattcgatggttgtgtaaagtgtgccattataaaaccatctattaaatgttcttgtgagtagaaatctatgctttatgaactgtggaagagttatcagtagcactatctgatctctaattagttggcccaacttgtttctctagtagtatctttaacatctgggcatgtaatgttctataactagctagatggtgggttcagtccagtatagtttggccctttgtctgttcgtttggtgtgttgtcttcaatgtgctctttaagcatcctaaagatgttggacattgtaattatcaaatgattcggactttcatgtcctgatttggtctgtaaggttgttgtaatatgataatttattttg

SEQ ID NO: 16600 - DNA, 1121 bp, Oryza sativa
  ref <308>: DATABASE ACCESSION NUMBER: AK067081
  ref <309>: DATABASE ENTRY DATE: 2001-12-06
gggtctctctcttctccgaagcgacccacactccccgtgcccgagccagagagtatggccgtctctgtccgttgctgcttcggctcctcctccctttcgcaccacgcgcgactactcctcgtcatcgttgcgttgctcgcgcctcggctcgcttccggctgcgaccgctgcgtgcgccgctccagagcggcttactacacctcctcgctcacgctgactgccggttcttgcgggtatggcacggcggccgcgaccttcaacggcggcggattcctcgccgccgcgggccccgcgctgtaccggggcggcgtcggctgcggcgcgtgctaccaggtgagatgcaaggacaagaagctgtgcagcaacgcgggcgcccgtgtcgtcgtcacggaccgcgccaggacgaaccgcaccggcctcgttctgagcagcccggcgttcgccgccatggcccgccccggcatggccgcgtcgctcaccgagctcgccgccgtggacgtcgagtacaagagggtaccgtgcgagtacaggcacaggagcctctctgtcagagtcgacgagagaagtcgcggacccaacgagctcaccatcagcttcctctaccaaggcggccaaaccgacatcgtcgccgtcgacgtcgcccaggttgggtcgtcgagctggaagttcatgacgagggagcacggaccgtcgtggagcatggcgaacgcgccgccggggccgctgcagatgaggctggtggtgaccggcggctacgacgggaagtgggtgtgggccgaccgggaggtcctgccgaggcggtggcgcgccggcgaggtctacgacacgggggtccagatcactgacatcgcccaggaaggctgcttcccctgcgacacgcacgagtggaagtagaagcccagccacacgtacttctcctgtcgtcacggccattttggttgggctttgatgagaaagaagacgtctctcggctcgcctccagtagagatttcactgacccgatttagagtcctcctaatccctcggcaacttcagaatttcctcctccgtttcttcttcttcttttccaactttgtacatgagctactaactaatgtgtaaagataaaattaaagcaagtt

SEQ ID NO: 16601 - DNA, 3338 bp, Oryza sativa
  ref <308>: DATABASE ACCESSION NUMBER: AK067082
  ref <309>: DATABASE ENTRY DATE: 2001-12-06
gggaggagaagcaaaagctcccttttttatgccgtctctcgtcccagcagcaggtggcgctttcccaccctcgccactccgctcgctccccgtcgtagacgtcgccttcgccgtcgctctcctcgtccacccttttctgctccatgttttcatcatcatcttcttcttcttcttccacccgttgctgattccctcactgctgctcgtttctcgccattgcggccgttcttggctactgacagaagaggaatgacgaatttgtccgggaagaaatctctgaatacagtgaccttggtcttcaaattaccctactacacacaatgggggcagagtcttctcatcgccggctcagagccagcacttggatcttggaatgttaagcaaggattgtctctcagtccagttcatcagggaaatgagctaatctggtccggcagagtttccgtcgctactggttttacctgccagtacaattattatgtagtggacgacaacaagaatgttttgagatcggagtccggggagaaaaggaaattagtacttccagagggtgttcaggatggagatgtagttgagataccgcgactggtggcaggatgccttctgaagctcttttccttcgaagtgcattcaagaatgtcatttcccaatgggtctgaaaatgctaaaagagaattgaagactacatccctcaacaaaagtttggagcctgaagatattgttgttcagtttattgttagctgtccccgacttggagctggctctactgtcgtggtcacaggaagtaatcctcaattaggaaggtggcaaacacaagatggcctcaagcttaattatgtcggagattccatctggaaagcaaactgtctgttgcgaaagtctgagttcccaataaaatataaatactgtaaaattagtgaagcaggagtctcttcattggagttcggtccgaacagggaggctgatgtggatctatcatcacccaagccatccagatacgtcctcttgtctgatggtgcccttcgggaatcaccatggaggggtgcaggtgttgctgtacctatattctcgatcgggtcaaatgaggaccttggtgttggagaattccttgatcttaaacttcttgttgactgggcagtcaactcaggctttcatcttgttcagcttcttcctatcaatgatacttcagttcacgggatgtggtgggattcatacccatacagctcgctctctgtgtttgcattgcaccccttgtacctgagagtacaagcactttcagatgcaattccaggggatattaaggacgagatttcacaggcaaagaagcagttggacaaaaaggatgttgactatgaggcatcactggcctcaaaactctcgatagcaagaaaaatattcaaattagagaaagacaaagtactaaattccagttcgttcaagcagtttttatctgaaaacgaggagtggttgaaaccatatgctgcattttgttttctgcgggacttctttgagacatcagatcacagccaatggggccgtttttctcagttttccaaggagaagctagataagcttgtttctgaaggtaccttgcaccatgacgttatatgtttccattactacatccagtaccatctatatatgcaattatcagaggcagctgcctatgcaaggaagaaaaaggttattctgaaaggagatttacctattggtgttgataggaatagtgtggatacttgggtataccccactttatttcgcatgaatacagctactggtgcacctccagattatttcgacaaaaatggacaaaattggggttttcctacatataactgggaggaaatgtcaaaggataattatgggtggtggcgagctcgtctgacacagatggcaaaatacttcactgcatataggatagaccatatcttgggtttctttaggatatgggagcttccagatcatgcagccacaggtctagttgggaaatttaggccttcaattgctctcagtcaggaggagcttcttagtgaaggcctatgggatttcgatagaatgagccgcccttatattcttcaggaaacactggaggagaagtttgggtccttttggacagtaattgcagctaactttctaaatgagtacaagaaacaacattacgagttcaaagaggactgcaatacagagaaaaagataattgcaaagcttaagaacagttctgaaaaatcattatggctggagaaagaagacagcattcggcgtggtttgtttgatctactacagaatatagtccttattagagatccagaggacagcacaaaattttatccccgcttcaaccaggaggatacttcaagttttaacgatctagatgaacatagcaaatatcctcagaagattgtactatgactattattttgctcgccaagagaatctctggcgtcaaaatgcgctcaagactctgcctgtgcttttgaactcatcggatatgttggcatgtggggaagatcttggccttatccctgcctgtgttcaccctgttatgcaagaagcttggattgattggattgcgtatccagagaatgcccagtgaaccaaacttggaatttggtattccatctcagtataggtacatgacggtttgtgctccgtcatgtcatgattgctccacattacgtgcttggtgggaagaagatggaggaagaagaagccgtttctaccagactgtaattggtagtgatgacgagccgccatctcgctgcaccccagaagtagcgaactttattgttaagcagcattttgatgctccatcaatgtgggcaatcttcccactacaggacctgcttgcacttaaagacaagtacaccacaagaccagcaaaagaggaaacaatcaatgacccaactaacccgaagcattattggagattccggctacatgtgacattggattcgctgttggacgataaggacatccaagcaaccatcaaggaacttgtcacaagtagtgggaggtcatttcctggtaaggtggatggcgccgaagaaagcggagagaagctagctaaagtccagttgaatggtaaaccatagaaaattatcccaagaacagccgaagggtatcacggtcaaaagtaaatagaataaggcagcgtactgccaattggcatgccagttcagctggtgttgtttcagctagaattttttttacgccaacttaattccatttaacactggaaataattagtatcattcatcaagtcggcatgtggaataatttatcccctgttctttgctaataaaatctttttctgatgaatcatctgtttgctagtaccg

SEQ ID NO: 16602 - DNA, 2267 bp, Oryza sativa
  ref <308>: DATABASE ACCESSION NUMBER: AK067083
  ref <309>: DATABASE ENTRY DATE: 2001-12-06
gtgacctccattccccccattcccttctcccccttctgcacgactccacccacctccaatgccctccaaaccctagcccataacccctcccgcctcgctgccatgccagatctgagcaccgtctgcctccccctctcgccgcaacccccctccaccgccgccgccgccggcggggagctagcaggcgagcagcccgccgccgccgccgtcaccaccgccgcggcggcggtgtctgcgtcggcagaggcggaggcggcgggggaagcagaatccgcctccggtggcgacggcgcgcccgttctcccggtggaatgccgatggagcggccgagttcgcagcttcgcgggcgctggcgagggcgcgggcgcggccgctgtccccgcgtgccccgccccgcgccgcgggggcgggaaaaagccgtcctccgcgccgtcgccttcgtccacggtggcgaccgcgccggctcatccatcgggtcggccgttcgaggagtacgttaaggagtggaaggcgaagaaggcggcgctcggcgtgccggccggacgctgcgagctgcctttcctaaccggcacgcctaaggcggttgaatgtcgattatgttctaagattattcatcctggagaagaaataaagtgttcggttagtagatgtggagaattgttccacctgacttgtgcagcagaagataccacaaatttcattgctgaaagcttcaaatgccctcaacatggctgtatggtctgtaagcaaaagatgtttttttggcgttgtggacggtgtacggttgcagcacatacaaaatgtgcaccatggccagtaattcatttaaaagatgaccaaggaagtgctatctgttggaggcatccctctgattggctccttcaaaatgaggactactttgtttaatggtggcagaatgctgacttgacgaacagcatagagtattttgccgactacctgttccatatgttaatgaagacttcaagattgattcaaccatcagggatttcactgcagctgtctgcaaaccaccacactttacgtttatcagacgcaatgtatatttaatcaagaaaaaacgtcctgattctcgcgcggaagctgggtgcacaaactgcagtgctgattctacgtgcaaagatgactgcgaatgcaggggcctttacatgagttgttccaagaattgccactgctcagatatgtgtacgaacaagccattccgcaaggataaaaaaataaaagctgtcaagacaaaacgttgtggatggggtgctatttcattggagccattggaaaaaggtgattttataattgagtatgttggtgaagtcatcaatgatgcaacatgtgaacaaaggctttgggacatgaaacggcgaggtgataaaaatttctacatgtgtgaaatcagcaaagattttacaatagatgcaacatttaaaggaaacacatcacgttttctgaaccacggttgtgatcccaactgtaaattagaaaaatggcaagttgatggtgagacaagagttggtgttttcgcctctcgttccatccaagttggagaacacttaacttatgactacaggtttgtgcatttcggggagaaggttaaatgctattgcggggcacaaaattgtcaaggttacctgggcaaccaaataaagaatcctacgcagcgtgctctcgcaattgcagcattggagaacgagtggcttgaatctttgaagatacaacaggacacctctgcttcaagacacaaaccgatgacacatttgttaccttggaccaactgtatagaggtaccatttaacttgagaagcaaacggaaaatacaccggatatgctggggatgcaaaaggaggagatcagccgttgccgttacatctccaacaagcatacaagcgtcagttactgaagctgctgctgctgctgctgctgcatccctgcccgctttgccatgaagtggcaatagctgaagtcgcttctcatctgtataatataggatgacacatttctcacatgaaattgatttttgaacgacgattcttttgcattgctcctccccaccaccaccaaaactccctgttgtaatttgttacaatattcatttgattacatagtttgtttaatttacagttgttcgctgagaatactcgactatctcatgtaatcaatgttgtgctccaactctcgattgcctcagccctcaagttgaggcgagtacatgagggctattattgtcttagagaatcttatactattattttgac

SEQ ID NO: 16603 - DNA, 1694 bp, Oryza sativa
  ref <308>: DATABASE ACCESSION NUMBER: AK067084
  ref <309>: DATABASE ENTRY DATE: 2001-12-06
ggatctatatactagacctccgaaccaaaccgagggcaagagcatccgattcgccgccgccttcgtcttcctcgcagagatggcggacgtggaggagtaccgttgcttcattgggaatctgtcatggtccacaactgatgaaagcctcaaggatgcctttggcaaatttggcaacctcactgaagcaaaggtggtttttgacaagtattctggccgttctcgtggttttggctttgtgacctttgatgagaagaaagccatggaagatgctattgaaggaatgaatggattggatttggatgggcgggcgatcactgtcgataaagctcagccacaaggacctggtagagaccgtaatggagaccgtgattatgatcgtgaccgtggatctcgttatgaccgtggccgtgactttggtggtggtgggcgtgcaccacgtggctcaggtggtggtggggattgctacaagtgtggaaaacctggccactttgctagagagtgcccatctggagatggtggtggtagaggtgatagatatggtggccgagatgataggtacggtggtggtggtggcggtggcggccgttatggatctgaccgtggtggtgaccgttattctggtcgtagtcgagatggtggtggctacggtggaggtgggggtgaccgttacagtcgtgaccggtctggtccctattgatggcctatcaaatctctaagaagtatgttccatccaggcatatgacttgttcatagtgcttggcgcttggtcctacatatttgcttgatatgctgttgggtgattcttttcttggttgagacttgagaggtggtttttgtcacattacttgttgatgctctgttacgttggttgtgctcatgcggcatagcacctttggaaacgggatatgtgggattggaccggtaaattgttttgtttctgttctcttgggagaggaagcattctactgaaccttgcttgaaaatgccataagaaaaatcttggtccttaatcaactcatctcaaggcaggtgatgaaccattcataggggaaatgaactggtttgtttgagttctttgttctcttgttctggattggttactactgtcttaacagcgatttgttctagtcttatgaccggcttgttcgttggcatcaatctatcatgtgcggtttagcgtgggaaggccactgctgccttgcatagtgtttctttgttactctgattggctttgctacctggttattgttccattgaccctggcccttccggagttgctgctgttgtgttgcttcttggattgtgccattccttgttactgccctgctgtgatcatgtttaagcgacctgaatatctgagcgatgctacgtggttgctgttctttgtcacatttgccactgaagtagctgttcctcgtcactttgccacggagtagctcctgctgctttatttcttggctgcctgctggagtacttagtttatagcaacaaaatagtatatatcggcaacagaactacagaaacatttttttttaactctgatgaattttgattacgtattgaactcacggctgtacatttgtaacataggatgtaccttaactcatgcagtatatactgcaagagtgcaattttgcagtggtattcaattcatgggtattgcttatccaagattaagcaagccgatttgatgc

SEQ ID NO: 16604 - DNA, 1464 bp, Oryza sativa
  ref <308>: DATABASE ACCESSION NUMBER: AK067085
  ref <309>: DATABASE ENTRY DATE: 2001-12-06
ccagactcgcttgccattctccagcaccagcagcaagcttcttcttcagcaactcagcagcacttcacctgctgctgctgcgaccgccgtgaccatcaccacctcgtcgccggcgagaaacctgcagagggcgagggcgagtgcggcggagcaggggatggaggagcatggcaaggcggctgtcggctgggcggccagggacgactccggcgtcctctccccgtacaacttctccaggagggctcagaaggacgatgacgtcaccatcaaggtgctctactgcggcatctgccacactgacctgcacatcgtcaagaatgattggggcaacgccatgtaccccgtcgtccccggccacgagatcgtcggcgtcgtcaccggcgtcggcgccggcgtgaccaagttcaaggccggcgacacggtgggcgtgggctacttcgtcgcgtcgtgccgcggctgcgagtgctgcgggaatgggtacgagaactactgcgccaagatggtaaccacctgcaacggcgtcgaccacgaccacggcggcggcgcggccacccagggcggcttctccgacgccatcgtcgtcaacgagcactacgtgctccgcgtgccggcggggctgccgctggacagcgcggcgccgctgctgtgcgccggcgtgacggtgtacagcccgatggtgatccacggcctgaacgcgccggggaagcacgtcggcgtcgtcggcctcggcgggctcggccacgtcgccgtcaagttcgccaaggcgttcgggatgcgcgtcaccgtcatcagcacgtcgccggggaagcggcaggaggcactggagcacctcggcgccgacgagttcctcgtcagccgcgacgcgggccagatggcggcggcggcggccaccatggacgggatcctcaacacggtgtcggcctggcacccgatcgcgccgctgttctcgctgatgaagccgatggcgcagatggtgttcgtcggcgggccgaccaggccgctggagctgccggcgtacgccatcgtgcccggagggaagggcatcaccggcaactgcgtcggcggcatcagggactgccaggccatgctcgacttcgccggcgagcacggcatcactgccgaggtggaggtcatcaagatggactacgtcaacacggcgatggagcggctggagaagaacgatgtccgctaccgcttcgtcatcgacgttgccggcagcagcctcgccggctccggcgacgccaagatataaagctcgccggcttgcttgcttgcttgtgtcgacggcgccggcgccgcctagcttgcttgttgtgtgtcagtggccttgaatgtttggtgatgtgcaaactactacgaaatggagtaagaaataagtggagcatatgtctccatcacttggttattaattagtcgagctaattaattgtacatattgagaaatgatgataggccacattgttt

SEQ ID NO: 16605 - DNA, 1377 bp, Oryza sativa
  ref <308>: DATABASE ACCESSION NUMBER: AK067086
  ref <309>: DATABASE ENTRY DATE: 2001-12-06
tcagtatacagcctagaacaactgcttgccaaaaaaggaaaagaaaagaaaacacttagtgcagaaactgggaattgcaatggcgggagcaagatccgttggttctctcccagtgcctaatgtgcaggcgcttgcagaaatttgcaatgatccagatgaacacatacctgaaaggtacatcagaccagaggctagttctgaggaggtcatcaacaactaccaaggtgacatggcgattccgatcatcgatctcaagaaattgctttgtccgcaatcatcagaagaggagtgtgtgaagctgagatctgcctgccagtattgggggttctttctgctcattaaccatggagtgccagatgaagtgattgcaaacctgaagagagacattgttgatttctttagccagccactggacaccaagaaggagtacacacagctaccgaatagcctagaaggctatggacagagctttgttttctctgaggaccagaaacttgactgggcagacatgctgtatcttcatgtccatcctagcgattcaagggacctaaggttctggcccacttctccagcatctttcaggcaatccattgatgcatactcatcagagactaaaagcctggcactctgcttgtttgagttcatggctaaggctgtgggcgctaagccagagtcacttttagatttatttgaagagcagcctcgaggcttaaggatggcctattacccaccatgccggcaagctgacaaggtgatgggcctttcgccacactctgatgcgggtggcctgacactgctgctcgagattaacaatgtgcagggcctgcagatcaagaaagatggcaagtggttctccatagatgctccaaatggtgcacttattgctaacattggcgacacacttgagatcctgagtaacggaaagttcagaagtgttgaacacagggccgtgataaacccaaataaagagcgaatttcagcagcactcttccactatccaagtgaaaatatggtgatcagccctctgccggagtttgtgaaagatggtaaagtgaagtacagatcaataagttaccttgatttcatgaaacaaatcttcacacaacagcttgatggaaaaaaccgagtggaggtattaaagctggaccagtagctgtgaccatgacgcctgagatactgacatgaacctgcttgggggctgtccatgagatctgctgcttagaggtgaaacaatcctgtattacaatgatgatttacctgatattttgagtcttgtaccatatatcaggaacaacatgttcttgatcaagttatgatgcaaacacctgaaacaaaaaatggaaataaacattgatgccttgaagaataaactatatg

SEQ ID NO: 16606 - DNA, 4078 bp, Oryza sativa
  ref <308>: DATABASE ACCESSION NUMBER: AK067087
  ref <309>: DATABASE ENTRY DATE: 2001-12-06
gaagcattagagagggagtgccacagtgtcaccgtgctagccatggagtccggtctccttgcacattccgacgagccatgcgacgccggctccaagcccgacgccgacgccgacggccgccgcggcgggtggcgcgccgcgcgcttcctcatcgccgtcgggttcctggagcgcgtcgggttcaacggcgtgcagagcaacctggtgatgtacctggccgggccgatgggcatgtcgacggcggcggccgccgccggcgcgaacgcgtgggccgggacggtgctggtgctgacgctcgtcggcgcgcttgccgccgactcgcgcctcgggcggtaccgggccatcgtggccgccggcgtgctccacctgctggttagttagttctccttgctttccttgcccctgtagctgtaactgtaattgagcccgaggttccctggatgttctcgggagctagcactgtccgtgctagtgaatttgttagctaccaatacttgcgattactattttttttatacacccgttttgttagcgtagtagtgttgtttgaccataccagtctggttggcttcgcagcagcgttgtttatcacgtctgtcatgaggatagctaaaaggtttagatcttaataataatatttttttaaaaaaataaaaaggtcctcacgcgagatctaggctgagtcacgcaggtggtatacattcgtacccaagtggagagcttttacagtgcttgaaagtgagagtaggtacctttctcttactgaattatctaccgttaatttgaaagggtattttcggtacagaaaataacataagcgcagcaaattattaatattctaattattcttaaccaacaaactactctaacttttcccatttcattgttagttgacgctcatcactggccttatatattccctccatggcgatcaatcgcttttcatcactaattttcatttatagtgccatataacggtactaaatctttaccaaaaaaacagtacaaaatctgaaaacaatcttttcttccatcttatatataccttctttttttttacagaaggtagatggtagttgatttttttttttacagaacggatcaatgcaaagttgattacttaattaattctagtatattattatttgattctcttctttggttagttacgttaacgggtttctacttacaaagtctcaccaagatattaaagcacaaatttgacggattcctattgactattgtcaagcaaagttactgggcttttctctctagtttgttttgaaactgaccctccacctaatttaaaagttaatacttggcccacgatttttagtaccttctcttagctaccttttgttgcagatcgttagatcacggaggatcaacggatatagtgactcccaagcatagaaaaaaagtttcatattcgaaatcaaataatcataaatttaactaaatttattaataaaacaataatatttatgatgtaaaaaataagtagtttgaattggaagtcgatcctgtgccttgtccagcctcacggcttcagaactgatgatcttcagatgcagcagaattaaaaaagattgtcccggttctcaagatggacacatggtatccgatggctgtaaatcgaagatccaagtctgagtgtctgacactagccttgccaagtccaaagtccgacaatatttttattgttatcgtactagttgtttttaatataactctgagtaaaaagagaaaatcatagggggtgtttggatgtaaggatgtaaaattttggcatgtcacatcagttattatataagatgttgcataggttgttcgggccctaatgaaaaaactaattacagaatccgtcaataaaccgcgagacgaatttattcagcctaattaatccgtcattagcaaatgttactatagtctgtagcaccacattgtcaaatcatagagtaattaggcttaaaagattcgtcttgtaaattagttgcaatctgcaattagttattttttagcctatatttaatacttcatgcaggtgttcaaacgttcgatgtgacagggcgaaacattttgagatgggatctaaacatggctatagtttcaattgtgttgcattgcaatatgggacattttggaattagggccaaaatgagtttgagcccttcaattttttaacatcatataaatattgtgaaagttggttcagtgacatataatattttctcaaatatataaaaaaattcaccaaattagcacatgctcgaagagacaagaataactgtaaattaatctcttactttaaatttctattggaagcattcaccaccaaccagggtttataaaccgtgcggtaacattctcagttttttaatggtatatcaatggtatatctcgtggtaaccgttaaaccttgaggtaatggtaactccacctctaaacagtttggtgaaccttgccaccaacacgatgtttttaatttattagcaacaggaagaaatactagaaaagtactataggctagaaacttgggatagtgatgtgactaaaaaaagttgaattcgccaaaaggggaaaaactggatgtaggagtatcatgcatgatattttggtgatatttgcaaaactaaatttgtatacagctttcataaaaaagataaagtggttgccatttagatatatcttcttatcgtttgacactctacactgattaccaattttttttcaaagacaacgattgccatttagatatgtctcctttatgattggcatttagatatgttttcgtagttctctgtcacaactaagaaaaccatttttataagcagctaagtcagcatcctatcttactataaagttatcccctactaactctttaaacttaacgtgcaaagataccacatcatcatccactaacaagatgccacatcatcatccactaattaacaagatgccacatcatcatccactaacaatcatctttcattcatctccgcaaaaaaaaaaaacaatcatcacatttaaacatcatgcaaacatgctatatttttatagtttttagaatttaagagcttttcaaaaacaaacatgttaaattatcatccaataaaattcacataatatttaaatgtatatctttattatgttttatgatatcctatatacttatatagtttaagtatatagttcattcacttagtgcttaaatgattaatctatggtccaaattatctttctcttttttttcctctaattaagtcatatcacatcaattgtttttagcctttagatgattaatctacggtccaaactatctccctactttccttcctccataaagtcataccaccttactttttacgtttaaatcaccattctacatactatataaatttaaattatcataaaccacattaatttacttaatctgatgttatttagttatcttgcacattatttttttttattgttatcatactaaatttccgcagcaatgcgcggggtttcacctagttatcacaattgtttagccaaccgcatgcgaccaaacgcttgtgtaaatgttgcattaaagcaaccacatttgaaaatgtatttcaacattttttttaaaaaaaaaagattttcttatactatgaatctatatacaaagtcgctgtaccaaaagtaccgtgacctacttcatccgtcctaaaattatagcaatttaggatgagataaaacttagtactataaatttggacagattgtccgatctaatcttaggttgagtcccatctgatcttagattgttatattttgggacggaggaaataagtattactctaatcaacccgtaaaaaccagggttttaaatctcctgctatagctgcgctatctcccactataattgtttgagaagagttctagctatttgttctcatgtataatttagccgctatacctccatttagcccactatagttgtgttgacagaaaacacgaggcctgggagatctgcttaactccagtgcaggtctaaagctcgccttcgaatatatgagcgtgccagttgatttgatctgtaatcaac

SEQ ID NO: 16607 - DNA, 914 bp, Oryza sativa
  ref <308>: DATABASE ACCESSION NUMBER: AK067088
  ref <309>: DATABASE ENTRY DATE: 2001-12-06
gactgttctcctgccctttctcttcctttcccctgtccttgcgccgccgccgccttgccttacctccccggcttctcctcgccgacgacggctttcccctcacgctctcccgtaccctcctcctctcttggcgctccctccatcaccccccctcccagtagagcaaggggatttagggactggatggcgtagcgttggatttgggtgcggtgatggagtttcgccggcgacggcctccccctcgcgctcttccatgtcctgcccatctcctgccgcaccctcaagcactctccgcctgtttctcctcgccacccgttgcagcagttaccctgttttgtgttgggctccacggagctgcgacgacggtagcctcggccaggaagcgacccatggaccaatggtgggagcatttggcaaggacacactcactcaagaaccagacattggcctgtgatgggaaacaagctcgaggatgctaggtacggtcgccattgagatggctatagacttgatccttccactctcacagccgtcaacaacatcggggcgattcgttttgctgcctggtgggctattgtttactgctgtctgcttgctgctgaatgaagcagctagcaaatattgttccaaactaaaagttgtagtggtttggtgtgatgaggaagccagaaaattaatggttaggattcagtggcctttcattttatctttatataggacttcattcccctaaatcttgcctttatatattgattttaattatgcaggttttctgtacaattggcactggacatcctttctgtatccagattcattgaagcatgtaatatttcatctttgtaccatgcttctatttaagaggtgtgcagactctcactgtttcgtttgaatatgccaaccatcatgtttatttt

SEQ ID NO: 16608 - DNA, 2428 bp, Oryza sativa
  ref <308>: DATABASE ACCESSION NUMBER: AK098987
  ref <309>: DATABASE ENTRY DATE: 2002-08-28
cctctccctttctcctctcctccaaggtcatggcaaaggagaaataacagctagcgggcttggggaagggaaaacagcaagtgggagatcggcagggagaggtgaattactacttgagtagaagtggtacaagaagagtcgtcgtctacctgtgagcgaattatttcgaggttgtgcgttgcgatgatgggaggtggtctggtgatggaccagggcatgatgttccccggcgtgcacaacttcgtggatctcctgcagcagaacggcggcgacaagaacctcggcttcggcgcgctcgtgccgcagacgtcgtcgggggagcagtgcgtgatggggaagggcgacctcgtggacccgccgccggagagcttcccggacgccggtgaggacgacagcgacgacgacgtggaggacatcgaggagctggagcgccgcatgtggcgcgaccgcatgaagctgaagcggctcaaggagctgcagctgagccggggcaaggaccccgcgggcggcgtcgtgggcgacccgtccaagccgcggcagtcgcaggagcaggcgcggcggaagaagatgtcgcgcgcgcaggacggcatcctcaagtacatgctcaagatgatggaggtgtgccgcgcgcaggggttcgtgtacgggatcatcccggagaagggcaagccggtgagcggcgcctccgacaacctccgcggctggtggaaggagaaggtccgcttcgaccgcaacggccccgccgccatcgccaagtaccaggccgacaacgccgtcccgggcttcgagagcgagctcgcctccggcaccgggagcccgcactcgctgcaggagctgcaggacaccaccctcgggtcgctgctctcggcgctcatgcagcactgcgaccctccgcagcggcggtacccgctcgagaagggcgtccctccgccgtggtggcccaccggcgacgaggagtggtggccggagctcggcatccccaaggaccagggcccgcctccgtacaagaagccccatgacctcaagaaggcctggaaggtcagcgtgctcaccgctgtcatcaagcacatgtcgccggacatcgagaagatccgccggctggtccggcagtccaagtgcctccaggacaagatgaccgccaaggagatctccacctggctggccgtcgtcaagcaggaagaggagctgtacctgaagctgaaccccggtgcccgccctccggcacctaccggcggcatcaccagcgccatatcgttcaacgccagctcaagtgagtacgacgtcgacgtcgtcgacgactgcaagggcgacgaggccggcaaccagaaggctgttgttgtcgccgacccgaccgcgttcaacctcggcgcggctatgctgaacgacaagttcctcatgccggcgtccatgaaggaggaggccaccgatgtcgagttcatccagaagaggagcgcgtctggcgcggagcctgagctgatgctgaacaaccgtgtctacacctgccacaatgtccagtgcccgcatagcgactatggatacgggttccttgaccggaacgcgcgcaacagccaccaatacacttgcaagtacaatgatccactccagcagagcacggagaacaagccatcgccaccggccatcttcccggcaacctacaacacgccgaaccaggctctgaacaatctggatttcggcctgcccatggatggccagaggtcaattacagagctgatgaacatgtacgacaacaacttcgtggccaacaagaaccttagcaacgacaatgccacgatcatggagaggcctaatgcagtcaacccaaggatacagattgaagaaggcttttttggacagggaagtggcatcggcggcagcaacggaggtgtgttcgaagatgtcaatggcatgatgcagcaaccgcagcagaccaccccggcacagcagcagttcttcatccgcgacgatactccattcggtaaccagatgggcgacatcaatggcgcatcggagttcaggttcggctctggtttcaacatgtcaggtgccgtcgaataccccggcgcaatgcagggccagcagaagaatgacggctcgaattggtactactgagagtactgaagaataaacttgtagcgtttaaagaaagagcaccttaagcttttaaagttcaccatggtcatccctctgcttccatggtggaagcgtctcctgtgaacccggtaattctataggtctttctcatataggttttgcattagttgcaaaatggctggaacttggaactggtttatacatgtatgtccgtccagccagtaaacctcctatggaaacttaatgttatttctagtttaatttgttagttaaatgctgttcatatgtctggttgttaagtcacctgtgcttgtttgggtatgtggtttgtatcttt

SEQ ID NO: 16609 - DNA, 1694 bp, Oryza sativa
  ref <308>: DATABASE ACCESSION NUMBER: AK067089
  ref <309>: DATABASE ENTRY DATE: 2001-12-06
ggattcgctctcgtccccttccctctcctctctcgctcgctcctcttccgcggcgcgcgcgccggcgactcgccgcgtcgggccggccgacaaccgccgcgagggagaagccccctccccttggggggcacccatgacgtcgtgcgggtgcctggtgctcgagaaggtggaggaccacggcggcgaggcggcggggagggggagagggaggctcgcgcagggtggcggcggcggcggcggtggctgcggatcgtgcgcgggggagtggaggagccggtcggagaccatgttccccatctacgtgatggggagctcgcgggccagctccgccgcggcggcgcggggcatagtcgacgccgccggggaccccatatgggaggccgtcaagtcggaggccaagtctgaggcagagaaggaacctattttaagtagcttcttgtacgccagcgtactatctcatgactgtctcgagagggcgttgagtttcgtccttgcaaacaggctcgaagatccaacattgcttgcaactcagttaatagacattttcaatgatgttatgatgaacaacaaagatatacgccgttctattcgccttgatgctcaggcctttaaagacagagatcctgcctgtgcacaatacagttgggcattgttgtacctcaagggttaccattccgtgcaatcctataggatagctcatgtattatggaatcaaggtcgtaaagttctggcattggcactgcagagccgtatcagtgaggtttttgcagtggatatacacccagcggccagaattggagagggaatattgttggatcatggaacgggtctagttattggtgaaactgccattgttggaaactgggtttcattaatgcagggtgttacacttggtggtactggcaaggaaaatggagatagacaccccaagattggtcagggggctcttcttggagctggtgctactatcctcggcaacataaacgtaggcgaaggtgccatgattgctgctggttcccttgttttaaaggatgtacctccccacagtatggcagtaggaaaccctgcaaaggtagttgggtataaagataaggaagacccttctttaactatgaaacatgatgccagaagagattattttgagcatgttgccgttagtttttcagatgacagagctaatggaagtgttgtgaagtaaaaaaaggttcgatgatgtttggctggcagttcaaaggaatagcatatgtttcgacatttcttcccagaggacagcactgggtatctgattatgcaagggtgcttctcttttttgcccaggtacccatggtcctgaagctccccagttatattttctcgtggcctttggaccgctgtaataatgtgatgtttatttttctggttactttgtaaggactatgtactggtagtggagaccagtacatagttgctactggtagtagagaccagcagcaactatgtacttcagaatacaagctttcttttttgaatcccagtagcatcagcgtagtgcttaagacttagtgcaagctttcttttctgaatcagtagcgtgaagtatattctacagtactagcctattaggtaaagatgtttttcttttgatgtactaacccatcagaaaaaaaatgttacatctggatgggataataaaaaaggaggcaattgttaaatcc

SEQ ID NO: 16610 - DNA, 1321 bp, Oryza sativa
  ref <308>: DATABASE ACCESSION NUMBER: AK098988
  ref <309>: DATABASE ENTRY DATE: 2002-08-28
ggcgcagtggttccaagtaagcaaatcagcaaactgattgcagcgagagtttctgaagtgctcttgttattagccatgaagttggagcatgacttccatatggcaataggggaagcagaggataactatgcaaacaactctaggcttcagcgaaaggctttgctcaagaccaagccggtgcttgacaaggctgtgagacaggtgtgcatggctctccatcctcgagctatgatagttgctgacctaggcttttctgtcgatgcaaacactctcctcttcgtctccgatgtgatcaacacggtagctgatgctcagcaccatgatgagctcaggtgccatcccatggaactccagttcttcctgaatgatctgtctggcaatgatttcaatcaggtgttcaagtcagttaaacagtttactaagtcgatcgcagcatctcatcccaagggagtagcactgcctccattctatatctctgggctaccaggctcctactacaccaggcttttcccttgccaaagtgttcaccttttccattcctcgtactgcctccattggcgttctcagatgatcaaggacatggatgaaaagatgtcagacataaatggagggaacatttacattgcaaagagcatgccaccatcggtggtgaaaatgttccaagatcagtttcagaaggacatgtcccttttcctcaagctgcgacatcaggaactagtgcctggtgggcagatgctgctcacattccttggaaggaagaaagagggcgtcttggatggagatctgagccatctatgtgcattgcttgcagaagctttacaagcccttgttactgagggccttgtggagagggaaaagctggagtcattcaacctaccactgtatgggccatccattgatgaagtaaaagcagtgatcgcattgaacaagctctttggcattgaccatatccagctctttgagtcaaactgggatccctatgatgacatggaaaatgatggcatgtgcagcagccctcagcatggggtgaatgttgccaagagcatcagagcagtgttcgagcccttgctggcaagccatttcggagaatgtatactcgacgagctctttcagaggtatgcacggaatgtagagaggcaccttgcggaggacaatacaaagtactcggtcatagtcttgttgttgaaccgaaaagtatagatcagacacaggacacttggggaatctacatagaaacactacaatatatatttttaattacgcctgtatgctgctagtttacaataagatttccatcaactggttcttaagcttttaccgc

SEQ ID NO: 16611 - DNA, 1167 bp, Oryza sativa
  ref <308>: DATABASE ACCESSION NUMBER: AK067090
  ref <309>: DATABASE ENTRY DATE: 2001-12-06
gcccggaggaatccgccgcaattcaaggtcggaatccatggcgtctcacgaccacgaccacgaccaccaccaccaccacagccacgacgacggcgaccaccaccattcccaccaccaggacggcagccatggcggcggcggcggctcgtgggtcggggaggacgggcgcgtgtggcactcgcacgacggcctcgcgccgcactcccacgagcccatctactcccccggcgacttctccaagcgcgcgccgccgctcatctcgcggcgcttcgcggaacgcgccttcaccgtcggcatcggtggccccgtcggcactgggaaaactgccctgatgctagcactttgcaggtccctgcgtgaaaaatatagtctcgcagcggttacaaatgatatattcacaaaagaggatggagaattcttgatcaaacatggagcactgcctgaagagcgcatccgtgcagtcgaaactggaggctgccctcacgctgcaatacgtgaggacatcagcataaatctaggtcctctggaagaactatcaaacttgtgcaaagctgatttactcctctgtgaatctggaggagataacttggctgccaacttcagcagggaactggcagactacataatctacatcatcgatgtttctggtggggacaaaataccaagaaaaggtggccctgggataacccaagcagatcttttgataataaacaagacagaccttgcaccagcagttggagctgacctggctgtaatggaacgagatgcgcttcgcatgcgggaaggagggccttttgtctttgcacaggtgaaacatggagtcggcgtggaggaaattgtgaaccacatcctgcaagcttgggagatcgccaccggcaacaagcgtcgatagcctgcaggattcttgggcacgagatgttgttgcgctcgcgcgtgtaatcatgtactactccagtatttctgctttcctgaataaactgcatcttttggtggctcggtgttgctgaaagatgctagcatacaagcctccgagacttgtctagctgacagtcgagtccataatctagttctgaatgacaaagtgagaggtctaaactatacctcgaaaaattggtcatgggaatgctattgtcagctactagcagtatataggttccaaatgtcgcc

SEQ ID NO: 16612 - DNA, 3126 bp, Oryza sativa
  ref <308>: DATABASE ACCESSION NUMBER: AK067091
  ref <309>: DATABASE ENTRY DATE: 2001-12-06
gacccggtcggtctccaagtcccaaacaagaagaaggagcagcagcagcgagagagagagagagagagattgataattacagatccaatcacaggtgaggtaggttctcctgactctcttcgccgcagcgcacaccaccccaactagctcctagccattagagccggattcttttctggacggacaaggcggagagggaagaagaaggattgtgccaaccatatgcatccttctggaattgtctagttccttaatctttcgtccagcctggcagatatcaagaggtcaggcacatctcgcacctctaagtgggtgtgggtttgcaactactctgcaaccaacttaacctcgcctctggggaaaagcccgtcttacatctggagactacgccgagcattggagggtcttttcgattatggttaatttccaacaatagttgagatgtaacacgtttgctgaactgagttctcatcgaaggtagtcctttgatatagcaatgtgattgggtcgactctgtttgtgttgtacttgtgattgccatcagagttgacttatggttaggtttttctgcttctcatcctcgaccagtaccacacatcatagggcaaaggaacactttctgccagctgaacaagtcattctcggtgcttcacagaaggataccatgcttgctgtttcacagatggattctcaggatcaaacagtgaagtccaacgctggatcagcaagtccaaaccagttgacagatgtaaatgatcattcaaatgttagccggcagtatgatactagcccatcgtctcatcaagaatgctggagatctgaagacttgaacagatatgcatgctctgatgacagtaaggagtctggccacctaaagaagagcctatctcttggaaacatgcttcacaaggatcatgatcatcattttagtgaaggtgctgaatgtgatattattgactgtgaccacaaaggccattgctctagtttgaaaagcaattcagctgttggagattctgctaagttaaacactaagggcaatgagaatgcttttgatgccttgtctgacttggtcagtccttcaggtgaccatgttgttgactctgatagccactacctgtgttatgaccagaccaaatttccaagatcacaatctgctatatttcagaataattccaattgtggtacagaaggttctgctgattctgagatactagggcctcgttgcaggtcttatgaagatctgtgttcagcggttagtgagaaggttgattatctgaatagcgatctgtgttcagcggttagtgagaaggttgattatctgaatagcgtcgagccacatcactctaaatcaaatttggatgtgcattgtgctggaccttcttctccagatgtctatgaaagaatgaactttgaggacaatggttcaataggttgttctgatgctgctgatgggggtcaaaggtctactgcaagtgcagaagaaagttttgttagggatgggatgctaagtcatgaatattgggataacaaatatgtgagcggtcaccaatcagttgatccagttgccccctactactctggtacaggggatggttctcaccattccaacaatgacggtggcatcaatgaagctctagatcaagagagaaaagataacttgtggaacagagatagcactccctaccacaaatcacttgtcattgatgcgagtgatctaaagttgtgtgattcaaaggatattagtgaagaactcaagcacaacagaactggaattaatgacaaccagtatttcgatgtggacccagatgaactttccccaagaacttttagcattaaaagaattgaggattggatcaaccaaattgatattgacgatggcacccttgtcgaggagcaaggagaaagttcaaactcggtgttgacaaaatataatgagccggtggctggtgttcctgctgtccggcctgatgctaaaagtcctcttggcatggagatagcttacacttatatttcgaaattgactccgacttcttcgtcggcacaattaggaaaccttggcttggttgcaattccaagattgagcgctttcttaggcctacgcttgttgaacttgtctgggaattcaattgtgcgaataactgcaggggctcttccaaggggtcttcacatgttaagcttgtcaaagaataatatctcaacaattgagggccttagagaattgacacgcttacgcttactggacatcagctataataggatatccagaattggccatggtttggcgtcctgttcttctttgaaggagttgtatctgggtggtaacaagatcagtgaggtagatggtcttcaccgtcttctgaagctaaaggttctggacctgcgccacaacaagatctccacatcgaaggggcttggtcagctggctgcaaactatagttctcttgaagccgtaaacctagatgggaacccagcgcagaagaatgtaggtgatgagcacctgaagaagtaccttgtaggtctcctgccaaaccttggtttctacaacaagcatcctataagagcatctggctcaaaagaggtatcggaccggcacacccgcaagatttcttcttcccatcgttccgatcgcagcggtagatcggatcgtaaatcctcgaggttggtggctagcacatcctcttacaaggcacagagttcacggcatgcgcgttctgggcatgcctcgagctcttttctgaagaatccaaggggccgaagcatggcggtggcagcttcagggcctagactgatggaatatggcggtgccggggatgttcagatcgagagaaaggctcagtaataagtttttcagactgccaatgctctctcctgttttcttttaatttgttggtaaataaagctcaaacaatatgctgagtttcagctgcagcagcagttcgtatgatatgttttcctagatggtgttgagtagtattacattggaagacaattggtgattgtgttgaataattcattgctgactaatgaggaacaaaacaatatttagatgggcaccctgtacacactctgctaatgttattcttgctgtacatacagagtgaaattaattgattaatctttccgtgt

SEQ ID NO: 16613 - DNA, 3114 bp, Oryza sativa
  ref <308>: DATABASE ACCESSION NUMBER: AK067092
  ref <309>: DATABASE ENTRY DATE: 2001-12-06
actttggtatgaatagtcacggtgccatcgccgccgccaccaccaccaccaccatacaacctactatgatggcgtacaggaatggtagtttcagtgatgtccccgcgtacaggaacagtgggttcggtgctgtgcccgcgtcgagcacggccatggccgagctgcaggaggcttgggcgagcgaggcaaaggagctcaattgcatgcgctgtttaactggaggtctttgaggtgggagagaagctaacgaggatgtcctgctctcattgcttccgtgggccctgtatctcggattggctaagggtaagccatttctacctgctctgccaacagaagaacaatatatgaaaataactctcttttctgtgagaatttaatttcgtttgttcgttaaattcaaagaaccagcatgttgtttatttttggattcttaacacactaaacctttcttttaaacctttatttgtgatgaaaaatacaagggaaaattgtgtaccagtgtaacctcggcccaagcctatataacccatagcagtgagatgggccaagattaataaacatgggaaagtgctgagcttttactggccaaaatcgtgatggacttcgagccactcccctcagccgccggcgacgccaccgccgacgagactcctcccggtcgcgccgtctgcagctccggctgcggccgcccaaccaccgtctgcctctgcccgtaccttcccgccacgccgctccccacctccaccaccgtcgtcatcctccaccacccgcacgccctccgccgcaacccgctctccaccctccccctcctcgcccgctccctctccaacctccgcctcatccccggccgccgcctcctcccttcctccgcccccgtcatctctcgctctcccgtcctcctgctcttcccttcgccggacgccgccgacctcgcttcctggtgccgatccacgcctccgcccgcgcgcgccaacccgacactgctactgctcgatgggacatggaagcaggccaaggagatgcacgccgctagcctcccgttcctgtcctccttcgccgtccccgtctcgctgcccgtcgactgcggcgttgacggcgacagcatgttcgagggggagcttgtggtgaagaaggagccgcacaaggggtgcgtgagcactatggaggccgtcgcgagggctctgcggctgctggagccggaggggaggggggaagagatcgaggagacgatggtgggggtgctcagggcgatggttgccttccaggctgagcatttgcagcatcggccgatgaaaccgagggtgaagatgaggaagaagaaggatattaagagggaggaggagatgaagaggaacacattggactggagtgactgaatcactgaactactgaagcatctctggacacattggactggagtgactgaatcactgaactactgaagcatctctggacactggacatacagtagctcattgccgaatcgttgctggtcattttggaggaatatcgctaacattatcaccaatgagcaaggtttgatctcttttggaagcatagtctacggttactagttctttatgaaaactaagtgagatgattacattttgatggctgtatctcaaaaattgcagcaaccatgcatgtttgactgttcgaaatgtttcaggattcaccagagtacctagatagactaaactataggaggatcatgaatcatgctgttctctgttctgaagacacttgtagggctgaagttctcattggaacttaggaaggaatgaactttatatttttccagagtaaacaacactgtttatgctactagatagcggggcttggggggtctacatgaacaattcatggtaattaaaggaattgataatcatcatgtagccaatgctaagcttgaccataccgcatatgtgctgaactcctgcttggctttgttctgcatcaaagaaaattgtatttgtttagattggtttagaaatgtttagcaatgttgtgctagctagcaattcagaaatgttcagaaatatttgtttagattagttctgaaatgttcaaatatgttcggaaatatttgtacagattatttctgaaatgttcagaaatatttggtccgactagttcagattatttcttgaattcgtataagttcggtatgttgctatgtatgtttttcagatgcacatgtacagaactttacaaatgtagtggcctagactagagcagtgtattgatcatcttcttttagaggatttatgagaaatattgtaagggctaaagggcatgacaattggtagtgcccctgtggggttactttcagtttcagtaatattaacctgtatatctgtacatgtgctagttatacagtaaattatctgctgtagctagcaactccactataaaacatgtcaaacttggcatattcttaacttgatgcaatacatgagagttactgatcaagtagtattcaattttgtaggcagatgctcacaagaatattcatgacttttgtgatttctgtaaacttgttcttcggttacaagaaacaaatgcgtaggttgatattgcctccatgattatcccaattctttatttgtttgattatgaacaaaatgccgtggagtgcagatttttgtttgaagtgcaggacattcataacagtgtactagtggcatgacatttggtttgttgcttactgagtgtgctccttccttttttattttgcaacttatgtgaccttgaccttttgtagtgatcaagagaaggagagggcaggagatgctttaagtgtttcttgagcaatttgtgcaacaggtattgggaactgttcttgagttttgcttttgcatgcaagttggagatgatatttcttcgacagaaatatgaggcggttgaagatggatttctaagcagaatgtgggttgaatgcagtttactgatgtcagattgttttggagctgtacctatgattttactgggttagatttccaaacagtactctgttgtaatgttctcttgtttgatgtaatgcttttctgccactatatgagttctgccttagtgaaaactaggcacaatctaaaatttcttgcgaggtgaccc

SEQ ID NO: 16614 - DNA, 3123 bp, Oryza sativa
  ref <308>: DATABASE ACCESSION NUMBER: AK067093
  ref <309>: DATABASE ENTRY DATE: 2001-12-06
gcggaggttgaacacaatgactcaccaactcgaggaaaactacactgtactttttttttctttttcttttttctgttcttcaggcaacaaactggctgtgatttcatggtgcaggacagctgcaggggagagggagaggagggtgttttcttctccctgagagccggaggcaatggccaaggtgcctgatctcggctccgacttcgcccagaagctgctgctcgacctccggcgccgccgcgagaggctcggcttcgactcgccggcgccgccgcagcgcacgtcgtcgtccaacgccgccgttcttcctcgagattctcattcgagttctcagaggccacatcgaagccagaagccacaacaagcagctcctcgagcaggaagagcagaagcaacagcaaacagatcacacccacagagcggcaatgccattgccggagccggcaagccgcgccaccgcgccacgccggtcgccaattcgcaccaaatcgtgccattccaaggaggaggcagcgccaagcagaagcccgcgaacagcagcatcgacgtgcagatggcgctggcaatcgctctcagcaacagaggcaagctccagaacatcgagctcgtgtcgcgcaacggctccatcttcttcagggacacggatcacgccatgccggagagccacctcgtgtcgcccagcgcgcacgtcggcaaggtggcgatcggcgtcaagaagctcaatgacatcctcatggtgtactcatcgggcggcggcgcgagggacacgggcaggaggagctcggttgacattgggagggagctcttcggaggagccatggatttggaggagtcactaagcatgcttgtgatgcttcaggaggcatcagattacatggaaggatccgggaatggcaaggtgttgctactggagggcaaggagaacttgaagaactcggcgcgttcgccgagttccgcaaggctggtggagattgttgatgaggattcagaggccgagcaagccaagaactcgaagagtctgtcaatgcagatagttcctcacaagaattcacaaggtttcagtactccaaacagctcatcagtcttgcaggtctctactgttacaggcaacaattccaggagcaattcttctaaagctgacaaggatgatgcaaaagtcaggatgcctaatgtgattgccaagctgatgggattggacaatcttccatcaaccaaggtagcaaacaagggcatggagaagtttgtgaaacctgaagcattgtcaagaaaggataggaggacgaatttggtcggcggcagattgccgattcagattataggttcagaaagggtgtcatccaaaggacacaacatgaatttgctgccaggtgagtggaagattggcctgaaaaattatgaagtatacaaaagtgctaatttgcaggtgtctaatagttcatcgattcctgcggctgataagcaaacaaggcaaaccatgagacaaatgttaagcaaaatggagaatgcagagagaagaggtagtctaggacaacaactccatgaggagaagaaactgactgaagaaactaatcagcagaaggttgcgaatgttggatgccgcaccgatgcagggaaaaagatggattttctgaaaagaattaggaaaatttcaggcagcagacaagtcactgaagagaagcacattattcaagaagagagcacaacagggaagaagcaaactacaagcatgaaacaattgctgggcacagacagtgaggataaatctaagataactagagttaagtttaacaaggaaaaccttgccactactgaaatcaagaatgcagcaagagggaagaacggcaaaacagatcaacggaagcggcaatcatacaataaacagacagatgtacatagcatgccaaagaaatctcagaaatatcgtgaaatgaagagtaaagaaggcattcagaacttagagcacaagaggtcaacaaagtcagaagcgacacaattgaaaattctcccatatactgcagagatacagcaagagaatggaaagcatgaagaagataatgatattgtcaagccatcagatagccatggggatggaggtatttctgagcaatttgcaggaatggtggaagacagcagaacaactggaatggcttccccagaccaatttatgaagcaaataactgaagtgacctcaattgatgtgcatgcaagtgatagatcaaatgtggtagatcagagtgtaactcaaacaaatgatgacacaggttctaatacagctagtgaagctacacaaacaccagagacattcacagagggggaacatcaccaaaatctgcaattagtggagtttaaagagaaaccgttggatgatttgggtgatgccaaagagaccagcaatccaacggatttgcaagaccaaaagatgcatgtggtctcgtgtgattcattcacagagaatcagctactgcttatgagaatgttgctaaaggatcaatacttgcttgaaactgcaaaggctcttgtcagaaatcctgtccctgtacattttgtcaatgccagtgcagatagatggtcagagaaaggcagctctcttttttcagatatagcgcgggaagttatcagaaagaaaggtaaaagaactgaggcaattgtagaagttagcatggcaaacacaactaacatgaaattgcaatacttggatgatcttatcatggaactggatggagatattgagagcctgaacatctccaagaaatctcaacatctgggtgaagattgcacagctgaaaatttgcgaatgatacttcacagggacatgcaaaacaatcatccggatgctaactcgatgtgggatttcggttggaaccgcatttctgaccttccgattgagagaaatgaagtcgtcagggatttggagaagaacatattgggtggcatgatcacagatgtagcaagggagctaattgaattatcagtacgccatgggtgctgtgcctgtgaggcctgagtgagtgtcagactgactttgaaacgtgatacaagagttgatttctgaaagtgattgatcttaggttagatttgtatatttaccaaggttttccagtaaatatatacatatatttttgc

SEQ ID NO: 16615 - DNA, 912 bp, Oryza sativa
  ref <308>: DATABASE ACCESSION NUMBER: AK067094
  ref <309>: DATABASE ENTRY DATE: 2001-12-06
gacatcacctccatctcgagcactcgaagttggaactcgagctcatccatggccatcgcgacgacgaccttaccactcgcgccactcgccctcgcgccgccatcctccccgatctcccagtgctcgctcctcctgctgcgcccccgcgccccggccgccctctcgctccgcccctccgcgcgcctcctcgtcgccgtcgcggccagggagcccgagctcggcggatcgggaggcggaggcgcaggcgacggctctgggagcggcggcggcggggacagcgagaagccgcggggtggtgggggcgacgaggagggggaaggggaggaggagaagatggggcaggggctctccatgtcgcagaagatcaccctcgcctacgccgctctcgtcggagccggtggagcgatggggtacatgaagagtggaagccagaaatccttagccgcaggaggcatatcagccctggtcctgtacttcgtccacactcaactcccagtgagacctgtctttgcatcatctattggtttaggtatatctgctgccctcttgtcggtcatgggatctcgcttcaagaagtccgggaagatattcccagctggtgtcgtttccctcgtctccttggtcatggtcggtggttacatccatgggatcttgcgcagcactcatgcatgacaaactgacagtagccgtggcaatcactatatgcaactccctacctaagcctcatgtttcccttccgtttttgtgttttagaatctgcagcaactgtgtgacattctccttcttgatcatgtacctgtgttgtgggcgtagttcactccttttctggtacaatatggcctatggttaagcatgtgagatgctagatggaaaaaataaaaggtttggtgaatctgtcttgaattttgattg

SEQ ID NO: 16616 - DNA, 1432 bp, Oryza sativa
  ref <308>: DATABASE ACCESSION NUMBER: AK067095
  ref <309>: DATABASE ENTRY DATE: 2001-12-06
ggccggcaaaccattgcgccgccgccgccatggtccaccacctccggaggcatatgatttctctcctcctccggccagcgtatcctcatcccaccgccgcaatctctcccctctcctccctccgccgcctcctcctcttctccaccaccgccgcgcccgtctcccccgaactcttcgccgtcgaggactacctcgtcgccacctggggcctcaccggagcccaagcgcgcaaggcctcgaagaagctctcccacctcaggtccccctccaagcccgacgccgtcctcgccttcctctccgacctcggcctcccgccccgcaagatcgccgccgtcgccaccgcagacccgcgcttcctctgcgccgacgtggagagcaacctcgccaggcgcgtcgacgagctcggcggcctgggactctcccgctcccagatcgcgcgcctcgtcccgctcgccctcacctgcttccggtccagctccgtcggcacgaatctagggttctggctccagatcgtgggctcgttcgacaagatcctcaaggccctcaggatgaactcctcgctactcggctccgacctcgagaaggtggtgaagccgaacctggaattgctaaagcaatgtgggatgagtgattttgccactagtttccccttgtacaccagcaggctcttcaccgcgaaccctatctatctccgggacgccgtggcacgggtggaggagttaggcctggaccgcagctcgaggatgttccggcatgggctcatcgcggtggctttcacgagcaaggagtccgttgcgaggaagatacaggtgatggaggagcttgggttttcgcgggatgaattgttgatgatcatcaggaaggcaccgcagttggtggcctcatcggaggaaaagatacggcaagccgctgaattcttgaagagggatgttggtttggagggacggtacattgcgcataggccagtgttgtttttgtacagccttgagcggcgattgttgcctcggcatcacttgctcaaggttctcaggatgaagggattgctggattgtgagttggattactacaacacagccgcgatgagtgagaggaagtttgtgcggaagtttgtggatccttacaagtgccacattccaggcctcgctgatgcttatacgtccagttgtgccggggaaacagcaaatggagttgcttcactgcttggtgtgtagacagaaatggattatgcgctacagtttgtggagaattcggctcaattactgcggaagaatgcaagatattacggtttgtcccctgttacttcattttgtaatgtctaatgttgactcttctggtgaaaaagcatgtaggttgtttggtacttgttgcatcttgtagctctggggattgagaacatcaaaggttttatggcaattacttactccacttagcg

SEQ ID NO: 16617 - DNA, 1016 bp, Oryza sativa
  ref <308>: DATABASE ACCESSION NUMBER: AK067096
  ref <309>: DATABASE ENTRY DATE: 2001-12-06
gctacgacgagataaagcgccacgtccagcgacgagccagtgagcctccgttctccagggcgacggcagcaaatcgcagccatgctccgcgctccgcctcaggcgccgcgggcctcgcgacggccgcctccgccgcggtgctcccctgccgcaggcgcgtcgccgccgccgtcggccggcggcatccggcggctggtgctgacgccggagggccgggcgaagctggacgcgcggccggaccgcgacttctacgcgttcccgcggctcgtcaagcacgtggacgacggcttcctcgcggcgctcgccgacctctaccgcgagcgcctccgccccgggtgggacgtgctggacctcatgagctcctgggtcagccacctgccgccggagcgcgagctcccgctccgccgcgtcgtcggccacggcctcaacgcccaggagctcgccaagaacccacgcctcgactacttcttcgtcaaggacctcaacaaggagcagcggctcgagctccagacctccagcctcgacgccgtcctctgcaccgtcagcgtccagtaccttcagtcccctgagaaagttttcgcggagatcttccgggtgctgaagccggggggagtgtgcatcgtgagcttcagcaaccggatgttctacgagaaggcgatcggggcgtggcgggagggcacggcctacagccgcgtgcagctcgtgacgcagtacttccagtgcgtcgacgggttcacggagccggaggtggtgaggaagctgccctccgacgccgccggcgggaagccggcgtcgccgctggacgccgtgatgaggctgttcgggatggcgggctcgtccgacccgttttacgcggtcatctcgtacagaaacttcaagcccatgtgaagtttttacatgtaggtgccagagccaacttactgctaaaactcatggaaatcttgagatgtacatctagtattataattagggatgtacttcctccgtttcaaaatatttgacactgttgacttttt

SEQ ID NO: 16618 - DNA, 3402 bp, Oryza sativa
  ref <308>: DATABASE ACCESSION NUMBER: AK067097
  ref <309>: DATABASE ENTRY DATE: 2001-12-06
gctctctctctctctctctctttcctctccactttgaatcaatcaaaacggagaagaagaagaagaagaagaagaagaagaagaagaagacatcaagaacacgtggagcagaagcttctctgccggcttctatcgtagctctcaaggataaagaaaatctgctgcagaggtacaagatctagtggcagaacatgatgagcaatcttaagcttggggtggaggttaccagtgctcatgacctcctaccaaaagagcagggcacatgcaacccctatgtcgagatcgaattcgatgaccagaagttccgcacagccatcaaagagagggatatcaaccctgtctggaacgagcagttctacttcaacatatctgatccatcccgcctcactgagaaagacctcgaggcgtatgtgtaccacgcaaaccgcgccagcaattccaagacttgccttggcaaggttcggatctccggtacatcctttgtcagccactcagatgccacacctcttcactaccccctggagaagcgcacgatcttatcccgtgctcgtggtgagctcggtctcagggtgttccttacagatgatccatcagtcagagtgtccgctcctggtcaggagttcgacttcataagcacgcctacgactgcccaagagcaggtagccgccaatgccattccaaatcctttccaggagaccagagcagatcaagtgaggcaattccaacacttaccaaaagaacagcaccagcaccgtccgcagccaatgactgcgcagccatactaccctgaaagttcatacggacaacagcaacagaaaacctactctgctgtcgggaacaaagctgaaggtcctccacctccagtcatgaggatgtatgctcaaggtccacagcagcagcctgtagaattccagctgaaggaaacaagcccaacacttggtggcggacgtgttattggcggccgggtgatccccggtgaaaaggcaggggcatacgaccttgttgagaagatgcagtacctatttgtgcgtgtggttaaggcccgtgatctgccccacatggacatcactgggagtcttgatccttatgttgaggtgcacctcggaaactacaaaatgaagacaaggcactttgagaagaaccagaggcctgagtgggatgaggtgtttgctttccctagggaagtaatgcagtcaacgtcacttgaagttattgtgaaggataaggacttcattcgggatgattatgttggccgggtgtcaatagatctaaatgaggtaccactaagggtccctcctgacagcccattggcaccagagtggtatcgacttgtggggaaggaagggcacagggataaaggggagctgatgctcgctgtctggtatggaactcaagcagatgagtgcttcccaagtgccatccacgcaggatcagaaccaattgattcccatcttcacaactacatccgtgggaaggtctaccctgtacccagaatgtggtatgtgagggtcaatgtaattggggcacaggatatatttccaatggagaaccacatacctgatgtatttgttaaggtgaggctgggccaccaaatgctgaagacaaggccagctcgctcaccaaccagaaacttcatgtggaatgaggagatgatgtttgtcgcggcagagcctttcgaggaggacttgatcatacaaatagaggatcgagttgctcagaacaaggatgaagtgattggtgaaactatgatacctctcgcaaggcttccaaggagggctgaccataagccagtgctgccagcatggtttgatctcagaaggccaggactgattgatctgaaccaactaaaggaagataaattctatgcaaaggtgcaacttcgtatttgccttgaaggtggttaccatgtgctcgatgagtccacacagtactgtagcgatctccggccaacaatgaagcagctgtggaaaccaccaatcggtctgcttgaagttggcattctaagtgcaaatgggctcaatccaacaaagaccaagcatgagcgggggtcatgcgatgcatattgtgttgccaagtatggtcagaaatgggtgcggacacgtactattgttgacaacttgaaccctagattcaatgaacagtacacatgggatgtcttcgaccatggaacagtgctcaccattggtttatttgacaactgccacatatctgcagacagcaaccacagtagttcccccggccatatggacaagcccatcgggaaagtgcgaattcggctttcaactcttgagactgggagggtgtacacacacacgtatccattacttgtcctccacccatcaggagttaagaaaatgggagaactccacctggccatcaggttcacagccacatcccttctcaatgtgctcttcacatattctcggcccctcttgcccaagatgcattacgcgcaaccactgtcaatagtgcagcaggaaatgctccgccaccaagctgtgcaacttgtcgcacagcgtctagggcgcatggagccaccagttcgcagggaagttgttgagttcatgtcagatgcccgctcacacctgtggagcatgcggcgaagcaaggctaacttcttccgtcttatgcaagtcttctccggattcattgctgcaggaaagtggtttggcgacgtttgtcagtggaaaaacccagtcacaacagttttagttcatgtgctatttatcatgcttgtcttctacccagaccttatcctcccaacaatcttcctctacatgttcttgataggattgtggaattaccggttccggccgcgtttcccacctcatatgaacacaaggatatctcatgccgatatgacaaacccagatgagcttgatgaagaatttgatacattcccaacatcaaagagtccagatctggttaggatgaggtatgacaggctacggcatgttgctgggaggatacagacagttgttggggacattgcaactcaaggagagaggctgcagtcgctgctcagctggagggatccaagggcaacatctatgttcctattgttttgcctgcttactgcagttatcttgtatgtgacaccattccaagtgattgcactctgccttggtttcttctggatgaggcacccacggtttcgtcataaggttccatcggcacctgtgaacttcttcaggaggctacctgcaaagacagattctttgctataaatattttcagagatcaatatccaattgtgtatttattttttgtttttcagtatattgttgtatgatagcattaagggaaatacattaatatttgtaattgttgcttcatctgagaggataaaataagtccagttcaacagataattttcttgacttgatattgaaattcaaattg

SEQ ID NO: 16619 - DNA, 2232 bp, Oryza sativa
  ref <308>: DATABASE ACCESSION NUMBER: AK067098
  ref <309>: DATABASE ENTRY DATE: 2001-12-06
gttctcagtgttgcctccggttcttatataaccttccagtcctcttgctctttaacctgttcttgtacacttcacattagtccattttccttctgtttcccaaggtttttgttgcaagtgcacactcttctcatcaacaagaggtgttctgctctgtgttgggaggtcaggagacagtgcttagcttgcaggccggcgttggatgctgcgtggtgagctctgaggtgatcaaggtctcgtttcacgacgagtagtagagttcccattaccagagctaaagatggaacttgtctacttggaaaggagaaatggattcgatgaagatagcacctctccagagttcagtggaaggtcagcaattgaccatcaacagctgtccattgctacacctgaggttgagtctgatttgggacagacaatctacaagcagccattgccatcagatgagaagaaaagcaggagctgccagtcatgtcacaagtcaccatgttcttgcaggagcgaagtattccattcagatttgtacccgacacttcctgcgaagatgatgatactggaattcctcatcagaagcctgaggcacccaagaagaacccacaatgtgagtgatcttgatgacatgatcagcaatggagctagcacagggagtgtagttcttggtccttcggagaaaatgatgttggattctttgcattcacttgttgatgcgaaaacgaggccaaaaagtccttcattcttccactcaggaaccaagatgagaaaagctcggtcaaaatcccacatcataacacagtcagagatactgaagctgatatctcctgagacatgggagatctcctcccctggcgtgtcgccgttgaagaagagcacagctgagttgagcatgcatgagaagatggtgtcctcagatacaccatccatgagttcaaatcaacctgttctgtcctcatgtccatcttctttaagtgcagggcttctacaatgcatatggaaggatgggcttccacactttgaactgtcactggacaatcctatggcagtatacactgccaatcctacaaaggcccatgacaatgacaagccccttgactatgtctatttgttccattcaggagagcaagggagaaaagattggttaggcaactcaagcagtgtatcacggcttgtcggcaagatgaaggtgtcaagttctttggttctgaacccagacaagtctacttctatggagacagagtttgtcctgtatggttctccggatgactacctgaggcaaatgcaaagttcatatggtgttacaaaaggcaaggggctagccaagagagtggcagacattatgaagccatccaatttgaactctagtccgaaacatgtgtggaagtttggcaaatcgtcctcccaacagattgatgagatgactgaaatacctgaaggtgaacagtgcagtgccaaagaatcagtcctcaagaacctcgtcgctgatgatttgcctaccaaccaggagatagcagcaattgtagtacgaaaacagcggcgcgaacgtcggaaatcacctgttcttggtggatgggggctcaagttccttgagaaagctggagctactcatccagggagcactgaagatggtgatgttcagaacaagaaaaataatgcagggagtgtaagtgccatatttccccgaggctaccatggcggcgcggcttccaagaacggcagccctgccagcctcatcggaagatggaggtccggtgggcgctgtgattgtggcggatgggatattggttgcccaatcagagtactgcagaatgatggctgtggtacttcgcctcaggcagagtcccagtcacaggacaggaaatcagtagagctctcagtcaagggtgcgaagaagggaccaatgttcaggcttgtgaacatcacagatgacctgcacatcatatacttcgactccagtctttcgcctttgcaatgcttctcggcaggaatagcgattatccacagccaggcgcctcacctctatccaaaactctgaagacacattgttggtcttgtctaatatatagaagatttgaaacatgtcttgatcttgcatatttcctttcgctttggtttcataaagaaaaggtgcaggttatcctcatgttaaattgttaatatccattgttaatcttgtttaacgctataatgttttataagctggaaggagtaggatattaggatatatcttactaatgt

SEQ ID NO: 16620 - DNA, 4515 bp, Oryza sativa
  ref <308>: DATABASE ACCESSION NUMBER: AK067099
  ref <309>: DATABASE ENTRY DATE: 2001-12-06
gagcgtccaaggcctcagcctccgccctccgccgccggcgagcagagccccaattcgccattgctgcggcagtgagtgtagcagtctccaactttatccgtcacagctaaaagttagtccactcaatacactcattgcctcatcatcgtgtcaaattaaagccgtgctttccacgcagattccccggctaaaccggactaaattaagacaaactgagactgaaaagaactcaaatcgataaacgtgagtgaatcggcccgggccacctcatgtggcacttgcgggggaggagctccgtgaccgcagcagcagccgcagcgctacataaaccggtcgcccacctgcgcctcctcctcgcagtctccgcctggtccgtccccgccgcagcctccaacgtcgcggcggcttcgactacgactcgaggcggcccgagccctagcgcgggcgtcgcgcctagagcgatgccttcctcgtcctcctcgccgccttccgccgccgaggggacgaccgctgcagcgggtgggttccgcctcaccgagccctcgttcctcgagtcgctgatgccgaagaaggagatcggcgtcgaccgcttcctcgccgcgcatcccgagtacgacggccgcggcgcgctcatcgccatcttcgattctggagttgatccggctgcagctggtttgcagactacttcagatggaaagcccaagatccttgatgttattgactgcacgggtagtggtgatgttgacacgtccaaagtggtgaaagctgatgatgatggttctattgttggtgcttcaggcacccatctgactataaatccctcatggaagaacccttctcaagagtggcatgttggctgtaaattagtctatgaactcttcacggacacacttacctctcgtttgaagaaagaaagaaagaagaaatgggacgagcacaaccaagaagcaatatctgaggccttgaaacagctgaatgaattcgaaaagaaacacagtaaatgtgatgacgccaaacaaaaaatggctcgtgaagacctgcaaagcaggcttgagtacctgaggaaacaagcagaaggttacgatgacagggggccggtaattgatattgttgcatggcacgatggtgatgtgtggagggttgctgttgatacccagggccttgagggcaacaaaaattgtggaaaacttgcagattttgttccattgacaaactacagacttgagcggaagtttgggatttttagcaaattagatgcttgctcttttgtagcaaacatttacgatgatggaaaccttgttagtatagtaactgattgctctcctcatgctacccatgttgcgggcattgcagctgcttttcatcctgatgaacctttgctcaatggagttgcaccgggtgcacaactgatttcctgcaagattggcgatacccgtttaggatcaatggagacagggacaggcctggttagggccttgatagctgcagtagagcacaaatgtgatctgattaacatgagctatggagagcctacccttcttcctgactatggcagatttattgatcttgctagtgaggttgtagacaagcatcgtattatatttattagtagtgctggaaacaatggtcctgctttaaacactgtcggtgctcctggtggtactagttcaagcattattggcgttggcgcttatgtctcaccagctatggctgctggagctcactgtgtcgtacaagcaccagctgaggggatggagtacacatggtctagccgaggtcctactgctgacggggatcttggtgtctccattagtgcaccgggtggagcagtggctcctgtaccaacatggacacttcagtctcgcatgctcatgaatggaacttccatgtcatcaccttctgcctgcggtggggttgctcttcttgttagtgccatgaaggctgaaggcattccattaagcccttatactgtgaggaaggcaattgagaatacagctgcatcaataagtgatgtgcctgaggagaagctaaccacagggcatgggcttttgcaagttgatagggcttttgaatatgctcaacaggctaaggaattgccacttgtttcttatagaatatcaatcaatcaagtgggcaagccaacttctaaacttagaggaatatatctacgtgggagtaacacatgccggcaaacaagtgagtggactgttcaactagacccaaaatttcatgaggatgcaagtaacatggagcaattggttccatttgaggagtgcctgcagctgcattccactgatagctctgtcatcaaaattcctgagtacataatggtgacaaacaatgggcgcactttcaacattgttgtaaatcctgttaatatcagcagcggccttcactattatgaagtttatggtatagattgcaaagcaccatggcgtggacctattttccgcgtaccaatcactgtaataaagcctattgctctatcaggagagccacctgcattgacactttcaaatctttcctttaagtcaggtcacattgaaagaaggttcataaatgtgcctattggagcttcatgggtggaagttacaatgcgcacatcagcctttgatactcctaggaggttctttttggacactgttcagatctgtccactgaagcgacctattaaatgggaggctgttgtcactttctcttcaccttctctcaagaatttcagttttcctgtagaaggtggcttaactttggagttgtccatagcccagttctggtctagcggaattgctagccatgaacctacctgtgttgattttgagattgtgtttcatggaatatccgttgatcagaaaataattggccttgatggtagtgaggcacctgtgcgtgttgttgctagatctctattagcatcagagaggcttgttcctgttgccactctgaacaaggtcaagaccccttatcgaccagtggagtctaatctttgttcacttcctcccagccgtgatagattaccatctggcaagcaaatcatagcactaactctgacttacaaattcaaactagaggatggtgctgaaataaagccccgtgtgcccctacttaacaacagaatatatgataacaagttcgagtctcagtattatagaatatcagattcaaacaagtgtgtctactcttctggtgacgtctatcctaattatgtcaaactctcaaaaggtgaatacacgctgcaattgtacataaggcatgacaatgtgcagttattggagaaactgaagcagttggttctatttatcgagaggaagctagagaaaaaggatttcattcaattgagtttctactctgaacctgatggccctacagttggaaatggcaccttcaaatcctctattttagttccaggagaaccagaagcattctatgtgggtccaccatctagagaaaaacttccaaagaatgttctacctgggtctgttttggttgggtcaattacctatggtgcggtaagctctttcagcaagaaagatgaccaaaaccagcatgctccagcatcttatagtatctcgtatctcattccaccatcaaaggttgataatgataaagaaaagggagtttcatctggaagaaagagtatttcagagagattggatgacgaggttcgagacaccaagataaagttcctttctggctttaatcaagaaactgaggatgacaagtcttcttggacggcacttgttgcttctcttaagccagagtatcccaagtatacacctttgcttgccaaaattttggaatgcatagttcagaaagcaacttcagatgataagtttagccatcaaaaagagattatagctgcagctgaggaggttgtggacagtattgataaagaggatctggcaaagtctttgtcccttaaaccagatcctgaagatgaagaggcacagaaaaataagaaaaagatggaagaaacacgagaccagttggctgatgcactataccaaaagggtctttcattggcagagattgagtcgctaaagactgatgagtcaactgaggcatctgctaaagatgtttttgaagagaattacaaagaattaattaaatgggttgatgccaaaactacaaaatacggctctttaactgtcctgcgtgagaggcgctgtggaagacttggcactgcattgaaggttctgaatgacatgattcaagatgactctgagcaaccaaagaaaagactttatgatttgaagatccaattgattgaggagataggatgggtccatgtatcggcctacgagaagcagtggatgcatgtccgatttcccccatctttgcctccgttttaattgttaggactatttttcactcatttttcatcaccatggattcagtattttactatttttgtcattgttggtagcaaacttgctggtttggtagtttttcactaggtattttatttcttcaaatggtaataagaacttaagaaggctgcctgctactgctaagctc

SEQ ID NO: 16621 - DNA, 1829 bp, Oryza sativa
  ref <308>: DATABASE ACCESSION NUMBER: AK067100
  ref <309>: DATABASE ENTRY DATE: 2001-12-06
tggggagaagtggagactggttgcggacctcaccctaaaccctagccatggcggcggccaaccttctctctcgcgcgctcctccctgctctaaaccctaacccaagcagccacagcaaccgcgtcagcccttcggccgtatctctccgctgccgccacggcctgacggcctccgttcgcgcctctctctccacggcagcgccgtccccgccgccgcggccggcggcggcggcggccgacggtcgggcgccgaagcgctgtttccggcgcggcgccgatgggcacctgtactgcgagggggtgagggtggaggacgcgatgggggcggcggagcggacccccttctacctctacagcaagcctcaggtggtgcggaacttcaccgcctaccgcgacgccctcgaggggctccgctccatcgttgggtacgccgtcaaggccaacaacaatctccgcgtgctgcagctcctgcgggagctcggctgcggcgccgtcctcgtcagcgggaacgagctccgccttgccctccgggcaggattcgatcccactaggtgtatatttaatggaaatggaaagacattggaagatcttgttttagctgcagagagcggagtgtttgtaaacatagacagtgaatttgatttggagaatattgtcactgctgcgagagttgctgggaagaaagtccctgttttgctcaggataaacccagatgtggatccacaggtccatccttatgttgcgactggaaacaaaacctccaaatttggtatccgtaatgagaaactacaatggttcttagactctatcaagtcatactcaaatgatatcacactggtgggtgttcattgtcatctgggatctaccattacaaaggtcgatatatttagagatgcggcaggtcttatggtgaattatgttgatgaaattcgagcacaaggttttgaactggaatatctcaatattggcggtggcctgggcatagattatcaccacacggatgcagtcttgcctacacctatggacctcatcaacactgtgcgagaattagttctgtcacgagatcttacactcatcattgaacctgggagatccctcatagctaacacttgctgcttcgtcaatagggtcactggtgttaaatctaatggtacaaagaatttcattgtagttgatggcagcatggcagagcttatcagaccaagtctatatggagcataccagcatatcgaactggtttctccttccccagatgcagaagtagcaacattcgatattgttggaccagtttgtgaatctgcagatttccttggcaaagacagggaacttccaacacctgataagggagctggtttggtggttcatgacgcaggagcctactgcatgagcatggcttcaacctacaacttgaagttgcgaccacctgaatattgggtagaagatgatgggtccattgctaagattcggcgtggagagtcatttgatgactacatgaagttctttgataatctctctgcctaactcgttttcctgcaattgtaataagatttttctcttgttatgtgtggctgtatcaggattcggattgatagcgcagtacagtttgctgtagaatcggtatttttttttattgtactgtgatgtcggtaccttattttatccaaagatttttggcaaattttgctacaggacacttaaattttgtagcctttgctgtgagacactaaaaaacgtatatcttcttgtgaacattaaaaaatgtggtaattacctgtaggactctcgatgtattattttattatttttggtgaaaatagagaaagagtgtcg

SEQ ID NO: 16622 - DNA, 2123 bp, Oryza sativa
  ref <308>: DATABASE ACCESSION NUMBER: AK067101
  ref <309>: DATABASE ENTRY DATE: 2001-12-06
gggatttttcttcacggtttctctctcctcccccacaaacaatcccacccctctctttcctctctcctacctccctcccatggcggacgccgaagccgcgggagtcaccggagccgctcgagaaggcggccaggaagcgctcacggcgggccgcgacggcgacgagtgctgcgcctcgtgcggtggaggtgacgacgaaggatgctgcggcgtcgaggaggacgacgagagcgacggcaaggtgttcgaccgcgcgaccttctcgaggctcctcaggaaagtgtcgctcggggaggccaaggagttctccaagatgtcctacctctgcaacatcgcccacatgatccccaagatcacgccaaaattgctgcggaggtacaatttgcggtttgtgacttcatcagtacaagagaaagccaaaactggtgttgatcagaagcaggagctgaagactgaggaaggtgaatcttcagatcaagaatctgaagttgtagagaaccctgagccagggagcaataagaagaaagaaagtgggttgggggtaaaccccttcggcgcataccatgtcatgtcgtctgctgcctcttatttacattcacgggctatgggcgtcgttccctttggttccaggaatgatggcaagaacgatccaaccatcatggccattgtaaacggtgagagtggtgaaggtttaaccatggatgaagcttcatttgtggccactacaaattcagttacctccatggttgctgccaaggaagaaacaagacaagctgttgcagatgatctgaactcttcaagatcttgtccttgcgaatggttcatttgtgatgatgatcaaggcagcacaagatactttgtggttcagggctcggagtcaatcgcttcttggcaggccaacctcctatttgaaccagttaaatttgagggactcgatgtgctcgttcataggggaatatatgaagcagccaagggaatgtatcaccaaatgttgccatatgtcaaatctcacttgagaagttctggtaaatctgcaacgttacgcttcactggtcattctcttggtggtagtctggctttgcttgtgaatctaatgctactgatgagaggagcagcacctgcttcgtcgttgttgcctgtaataacatttggtgcaccatgcatcatgtgtggcggtgaccacttgcttcgtaaacttggattgccaaggaatcatgttcagtcagtcacgatgcatcgagatattgttcctcgagtcttttcgtgcaactaccctgaccatgttgctaatattctgaaactagccaatgggaatttccgcagtcacccatgcctcacaaatcagaagctcttgtacgccccaatgggcgagatgttcatcctgcaacctgacaagaggctatccccgcaccacgacctcctcccgccggacagcggcatctaccacctgagcgactcgtcgtcgtcgtcgggcacctccctgcggcggctccggtccgccatgtccaccttcttcaactcgccgcacccgctcgagatcctcaaggacaagagcgcctacggccccaagggcgccgtgtaccgcgaccacgacgtgaactcctacctccgctccgtccgggccgtggtgcgcaaggaggtgcggcggcaccgggagacgcggcgggggcggtggcggcggctcctcctgtggtggccgctcggcgcgcacggcgcgctggccggcgccggcgtgctcctggacgccgccgtggagggcgggagggagacggcgaggcaggcgcgggcgcacgcccggctgctcgtcgtcctgctggtgccggcgaagctgctcgtgatcggagccttcctggtcgtcagattgatgtgattcgcggacgtggttagatcccatccatccgttcattcattttgttggtttacacaccacactgctgcagtgctgctgtatgctactgcagcaatgattctttcttcccagagtggaatgccatacaagtgtcacacccagatgctgattttctgttttgacactaaaaaaagaaggacctcagatagatgaagatcaaatgtcaattaattagactctaaactatattagaaatttattaattggactcagg

SEQ ID NO: 16623 - DNA, 1177 bp, Oryza sativa
  ref <308>: DATABASE ACCESSION NUMBER: AK067102
  ref <309>: DATABASE ENTRY DATE: 2001-12-06
ttggcagcaagcagctatagctaagctctgagctccatggccatgaagtgcctcctcgtcttcttcctcgtcgccttcttccccggagccgcggtcagcgccgggctgaaggtcgggttctacaacgagacgtgcccgtcggcggaggccctggtgcagcaggcggtggccgccgccttcaagaacaacagcggcgtcgccgccggcctcatccgtctgcacttccatgactgctttgtcagagtacgtttgcatctatcacgatcgatcctagtttcgtttataactgcactgtttggtgtaagaacagctagctaaccttggttgattttgttttctttgttcaaaaagggaaactattttaaactctcgagatggcattccctcattatttgcatgtcatccaaatgattaagaaaaaaaatcaaccaggtatattaatatgtgataaattattccacaaatatgcaaggtcaaatttaacttctataagtttgaatgaaaaaaataaatttgattaagaatattcgttaactagccatagtttatttttttataacctgtaaaagttaaattttaacttgcatatttgtggagtgatttataatatgttaatctatcttgttaaatttttttaaaaaaaattcataactatttggataacatgtaaataactagaggatgtcctcacgagagtttagaatccactcccacacaaaaatgacaaactctagcagtgataaaaagaaaaggtgtcaatttttcatattatagacgctgtgttcggcaaaaggagttgggaacccactccctctttttccacgcacacgcttttcaaacggttaaacggtgtattttttttaaaaaaaattctatatgaaagttactttaaaaaatcataaagtcatatttatctttttttttaaaaaaaatagctaatacttaattaatcacgtgttaatagaccgctccgttttccttgcgggagagattagttcccatccctgctactgaacacagttcaagggagagttagctaagatatatttatgatcatatgttatgaaagatcggcatatacgtaccgctgtttttttaaaaaaaacagatcacctgaagaaacattagtgctctctattacaatcactgtgttagaaacaaaatacaaccatgaacc

SEQ ID NO: 16624 - DNA, 2116 bp, Oryza sativa
  ref <308>: DATABASE ACCESSION NUMBER: AK067103
  ref <309>: DATABASE ENTRY DATE: 2001-12-06
gaatggagagaagaggcgccggtcccccgttggaccggagctcgcgcgcgggagcccgagccagccgccgctttgacctataaataagaggaggagagagctcgggggttggactgggtgaagaaggggcaaggaaggaaggggaggggaggggttggggcgatggcttggtggagctgcttcggctgcggcccgtcgatcgccgccgaaggcgaggtccggctgccggagccgttccagctgccggcgcccttgcccgactggccgcaaggaggagatttctctaagggcacaatatgcataggcgagctcgaggttgcaagtattaccaaattccagagtatatggagctgctcaggagctacattctatgagccgcaagaaatccctgatggtttccactgccttgggcactatgcccaacagaatgaccgacctttacagggatttcttcttgtggcaagggaagcggctagctgccaatcgatcaatctcaagcctgctcttgagaaaccattagattacacccttgtttggactagtactgacttgaatgatgatgacaatagtgattgtggttgcttctggtcaccatcaccaccggatggttatgaagctctcggctatgtggttactagaggaccgaagaagccctcattagatgcagttcgatgtgtgcggggtgacctcactgatgaatgtgaaaactttaagtcaatcacaaatatgggaggtaattgctacatctggaatacaaggccttgccaccgagggatggcaggaagagggatacctgttggtacattcttctgtggaacagatacagaagaatcagacattccctgcttgaagaactttgattcaagtttgagttccatgcctaatttagagcagatcaaagcactgatcgagcactatggaccaactgttttcttccacccgcaagagatctacttaccatcgtcagtctcttggttctttgagaatggagctacgctccacaagaaaggtaaagaaatgggagatgtaattcttgctagtggttcgaaccttcctgctggtgggacaaatgacggtgagtactggattgatattcctgatggtgataggaatgaatatgtcaaagctggtaatctgaagagtgctgagctctatgtgcatattaagccggctcatggaggaactttcactgacattgcgatgtgggtgttctgcccatttaatgggccagcaacaataaaggtcggatttgctagctttgctctacagaaagtcggcaggcatactggtgactgggagcatttcaccctccgtataagtaacttctcaggagagctctcatctatctacttctcacagcacagtggaggcgactgggtggatgcatgtgatctggagttcatctcaggaaacaaagccatcgtttactcagcgaaggatggccacgcaagctatgcgcaccctggatgttatctgttgggatctgagaaggctggtgttggggtaagaaacgatgcagcacgaagcgatattttggtcgattcgagcacaaggtataagatcatctctgcgggaaatctgggagatgccgttatcgaaccatgctggctgcagtacatgagagaatggggcccgaccgtggaatacaactcacggtcggagatagacgctgtgcttagcttcttgcccttctttcttcggttcacagctgaagcaatactgaacagtcttccggtggagctgtacgaggaggaaggaccaactggaccaaaggagaaaaacaactgggaaggcgatgagagaggctagaagatgtttccaacttcaaatatatgcttcataatttgttccagaatccagatagctctatagatatgtaccctaagggtgctgtaatagtgatattgggatcgaacgatcgatatgctttgccaaggcatttcagttcatagagtttgtaggtgaaatgctggcaaagctgaaggttgaagaggtaatcacgttatgttgtcctgtttgatcatctggcctgtttgtaccttgtgtcagctataactctgtttctaagaaccataaactaaagccgacatagtcgacaaaagctactgaccatgtg

SEQ ID NO: 16625 - DNA, 1135 bp, Oryza sativa
  ref <308>: DATABASE ACCESSION NUMBER: AK067104
  ref <309>: DATABASE ENTRY DATE: 2001-12-06
gttccaacctccgaactagcaatagaaaattccaacattttcgccaacattaattcccatggtattgaagctttcttgcatcagccggcgtacgcggctcgccggtgccggcgccggccagggtcatcgccgccgacggctcgctcaaggagctccatgcggccgcctctcccgtcgatcgccgacgtgctccgtggcgagggcgagtccttcttcgtgtgcaacttcgacacgctctacttcaacgtgcagccgccggcgatggcgccgggggtggtcgctccggccggggcagatatacttacgtgctcccgtcggcgatgctcgggcagccgctgtccatcgtcgacatggtcgcgctggcggtgttcgcgagccgccgctcgctgccgtcaaggcgccgctccgccgaggggttcgccgcgcggcgacaggaagattaagacggtgcgcgtcacgccgctgcgggactaggtgctctacgagcaacggagtcctatttccacgagaagctcaacgagcggactctgggtgagttcccagcgtcgtggagctcgccgaagagcgcagcgagaagatcgcgcggcggcgcggtcgcggttgaagcgcgtgctgattatcatcctagaggaaacaagaatattcaattttttcaacttcttttttggggaaacaatattttttcagaagctcgatgcaccaatacaagcttaaagctttaattaatacttgcactgtttcagaatgtttcagaatgttagaacaccgttagactttttattacgtgtttgaccattcgtcttattaaaaaaatttaagtaattatttattcttttcatatcatttgattcattgtaaaatatattttcatgtacatatatagttttacatattttacaaattattttgaataagacaaacggtcaaacatgtgctaaaaagtcaacggtgtcaaacattttgaaacggatggagtatgtttaattagtagatttagaaagaaaagaatactggggaaaaagattcatagatgaatcaccctcttatatatacgacttcaatctgtagttgcaaaactacaaaaatgtaaaaaaaaagtagatctttatacaattttacctgaagtacatttccc

SEQ ID NO: 16626 - DNA, 1497 bp, Oryza sativa
  ref <308>: DATABASE ACCESSION NUMBER: AK067105
  ref <309>: DATABASE ENTRY DATE: 2001-12-06
gaaccagggcggagaacgcaacgagatgagatgagcttcccggggagatgggaggagagctagctagccgccgaggctgagctcgcctccccgcctcccgatccccgcgacccctcgcagccacacccccaccggataacgcaacgccttccccctcccccatcaaaacccccctcccccctcgcgcgccaactgctctcctcctccgccgccgccgccgcaaccaaccagccagccagccatgcagcccgactccgcctcccaccgcatcgcccgcgtcgccgcccacctcagcccgtcgccgcgcccccagatggaggagggggtgaggccggcgccatgcagggccaagggcggcgcgccggggttcaaggtggccgtgctgggcgcggcgggagggatcgggcagccgctgtcgctgctcatgaagttgaacccgctcgtctctgtgctccacctctatgatgtcgtcaacacgcccggtgtcaccgccgatgtcagccacatggacaccaccgccgtggtccgtggtttccttgggcccaaccagcttgaggcagcacttacaggaatggatcttgtcattatccctgctggtctcccaaggaaaccaggaatgacaagggatgatttgttcaacaaaaacgctgggattgttcgctcactttgtgaaggcgttgccaagtgctgtccaaatgcaattgtgaacttgatcagcaacccagtgaactcaaccgtccccattgcagcagaggttttcaagaaagctggaacttatgatcccaaacgtctccttggagttacaacactggatgtagcaagggcaaacacctttgtggctgaagtacttggaattgacccaaaagatgtcaatgttccagttgttggtgggcatgctggagtgactatattacccctcctctcccaggtccaccccccatgctcatttaccccagatgaaatcagctatttgactaaacgcatacagaatggtggcacagaagttgttgaggcaaaggcaggagcaggctctgcaactttgtcaatggcttttgctgcagcaaaatttggtgatgcatgcttgcgagcaatgcgtggtgatgctggcgttgtggaatgttcatatgttgcatctgcggtgaccgagttgccgttctttgcaacaaaagtgaggttaggtcgtgctggagccgaagaggttctccctctggggccgttgaatgattttgagagagctggcttggagatggcaaagaaagagctgatggagagcattcagaagggcatcgatttcatgaacaagtgaggtgtatgaagggacaaagttatgcatacatgtaaagagtgtcctatatatagtgctcatatacatgtaaaattttcgccgggctcatatacatgtaaaatcacttctgtaaaacgaccgtgaaatgctaattaccctttagttgcactaaacctttttttcctgatcatggaataaaaatcctatactag

SEQ ID NO: 16627 - DNA, 1148 bp, Oryza sativa
  ref <308>: DATABASE ACCESSION NUMBER: AK067106
  ref <309>: DATABASE ENTRY DATE: 2001-12-06
gccccaacccaaccccgaccctctccgatggccaccgccaccgccacggcgaccgccgccgccgccgccgcgtcctcctcgcgcctccccttccgccgcgccgcctcctcctcctcctcctcgcagctccgcctccccgcggtgcctcctccccaccgcgcctccttcgccgtcgtcgccctccacaagcgcaaccccaagcggctcaagtacgcctcccagcgccagttcacgagaggggatgccgggatgctgcgggtgcaggtggagccatccggcgaggacgcgtggaagctggagcccgtcgtcgaactcatcaaccgcggcgccgtcggcatcatccctaccgacaccgtctactccatcgtctgtgatctcagtaacaatgactctgtcgagcgccttcgcaggatcaaaggcattggagattcaaagcctctcagcatcttgtgccgctcgctacgagacattgatacctacacaaccggatttcctcgaggcactaaccaagggcaagctaacatatttcgtgctgtcaagcgtgtaatacctgggccttacacctttattttacctgcaaccaaggaattgcccaaacaatgcataaggcatggatcatccactaggtacgcgaaaaggaggcaggttggtgtccgacttccagatgaccccatatgtgaagcaatattgcaaaatcttgatgagcctttgatctgcacaagtgtcaaatctctgtcagaggatgaatggatacttgaccaggttatcattgctgatatatatgagcaacagggccttgatttcattgtcgatggaggtactagaattgctgacccgtctactgtggttgatatgacgggaagctaccctaccatcattcgtcagggaaagggccctaagctagattggatggtagcggaagatgaggaacaagagtcgcgaccaacatttgcgtataaagcagcttgagtcactcttcggctgtcctatcataggaggttgtaaacttgtaattacttcaccagagcctggtcttttgactcctgaatctgctactctcagctagaccagtatatatactacatgttgtaaatatgccagggaatgtaaccaggaatcgacatagttcaccagattattttcagtcc

SEQ ID NO: 16628 - DNA, 1264 bp, Oryza sativa
  ref <308>: DATABASE ACCESSION NUMBER: AK067107
  ref <309>: DATABASE ENTRY DATE: 2001-12-06
gaggtaattaagcagtacagcaccaattaagcaaagccacagcaacgagagagagcttgtgaagttgtgatatttcattttgaccatatgggttactcctactcttccgccgccgtggcggtgagcgttttggtggtggcgttggcggcggcggcgtcgggccagctgtcgacgacgttctacgcctcgtcgtgcccgaccgcgctgtcgacgatcaggagcgccgtgaacgcggcggtggccagggagccccgcatgggcgcctccctgctcaggctccacttccacgactgctttgtccaaggatgcgacgcgtcgatactgctggccgacaatgccaccttccggggggagcagggtgcgttccctaatgtcaactcgctgaggggattcgaggtcatctctagcattaagatgcaactcgaggcatcttgcaggcagaccgtctcctgcgccgacatccttgctgtcgccgcccgcgactccgtcgtcgccctaggaggtccatcgtacccggtggagctcgggaggagggacgggatgacgacgaaccaaaccatggcgaacaccaacctccatccaccgaccaccgacctgggtaacttcgtcactagcttcgccgggaaagggctcagccccaccgacctggttgtactcactggagcgcacacggtgggcgtggcgcagtgcaccaacttccggtcgcggctctacggcgagtccaacatcaacgcgccgttcgcggcgtcgctccgggcgagctgcccgcaggccggcggcgacaccaacctggcgccgctggactccacccccaacgccttcgacaacgccttcttcaccgacctcatcgccggccgcggcctcctccactccgaccaggagctctaccgcggcgacggctccggcaccgacgccctcgtccgcgtctacgccgccaaccccgcccgcttcaacgccgacttcgccgccgccatgagtgcgcatgggcgccatcaggccgctcaccggcacgcagggcgagatcaggctcaactgctccagggtcaactgatctgtatatctctacgaaatgcgtcgatctactgtacctacgtggatagaatcgaatcgaataagactagactattaataagctaataagtgattagcgatatcgcgatatgtataagtgcgcaacgtgatattgaatttatgtaagggcttgtccggtttattgccattttcaacactatcgacttttaatattattattaaattttggtag

SEQ ID NO: 16629 - DNA, 1947 bp, Oryza sativa
  ref <308>: DATABASE ACCESSION NUMBER: AK067108
  ref <309>: DATABASE ENTRY DATE: 2001-12-06
ggcatttcatcgaacaccttgcgatcaccctctcaccaccgctagagatcaccattgtgaggctccccggccggagcaggaggttagagggagtggaggaagagccgtgctgccgccgtcgccatgggggaagccgggtagccgctggacatcaagaaacgccgtcgagcaccttacgtcgctgccgtttgcccctgtcctgcaccgcgtcgagctccacttcgctgcgtttcgccatctcgccatctcgcgaaattgtgtatcgattagtggtgaggcaacgtatgcagcttccaggaggtgaaggttgatcaagattataccaagaataagaactatcctgagcaggtctagacagtgacaccggggggcgccgcgtcagtcaggtgatcatcagcgccccctcagcgacgggcgagatctcgatccccctttgcgagaagggaacggccgaacgcgccgctgcgatcaatgctctccctctgacggacgtaatcgggccactcatggaccaccaggcggcagcgtcgttgaaggagagcatcgccaaggaggcctctgacgctgttgctgccaccacgagtggtagcaacgtcccaaagaggggaaggaaattctcctccgtacgagggacccgtcggaaagcgaaaaactctacggactcggacgcgtctcctccaccttagcgaaggcaaaggttggtgacgatcggtgagaagtaagtaaacatttttgaggtcttgtcatcttcaaaaatccgatcacctcgcctcatggggaagagaaaaatcttcacagggcggcgcgggcaaagacggcacaaggtgggactgatgccgctttcagcgtgtcccctgcggcgacctcgctactaaggaccaggaggcggcacggagtggccctgctgtcagcctcatgcctacccgaggcccgtccaccgatgccctcacctgggaggagctccaagcggagatggagcgcatcctctaggccggtgctcgcggcgtaggtcacgagatcgaggaggccagggcggcggcgtcatcggcaaaccaacgtgccgactagctagcgagcgacctggccggaggcccacgaggacctcctaaagatgagggagctagtggccggcaacgagatgcagcggcgcggactcgagcaccggatgtccgagctcgagggccacatgatcgacatctgcggttcgctgcgaacgtcattcaccagcctgcaccaactcgccggggagtgtagtgtcacgactaccatcccggcgcatcccgatgagttctcgctgacgtcatcgcttgtggagctggctacggcgatggaggagatcacatccaagcacgcggctaggatcggggaggagacgtccaacggcatctacaccggggcgtgccatgtccttgcgtgcatgaggctggcatatcccgatctggaccttaagaaggctttggatctgggggccgctgatgacgcacgcaaggatacgatggaagaagtcggtgacttgggggagtccgtcctccccctttttgaagagtaggacatttgttttcccttgtaccccttaaccttcatgctgtaaaacttgtctatggatccgaactattcttatctgaacaactgtctgatggtatttcttaacgacattactagaaatataattcccagcaatggcgtagaaatacttctggtatattatggttacagagttcatccgcaagcgcacggatataccattgtagcatttcactctagagtattccaagggtatcgtatttattttatcccgtgggaagatcatgtagagagaactcaactaataatttatatattacttgtgataatcatattctaaataggggttaagataatccaagggtagagtgacacacaagcattaactactcattctcataatatatcatctaagctgtgtgg

SEQ ID NO: 16630 - DNA, 3192 bp, Oryza sativa
  ref <308>: DATABASE ACCESSION NUMBER: AK067109
  ref <309>: DATABASE ENTRY DATE: 2001-12-06
gatgctttcgctgtaccaccaccaccgctgctagtgctcgcgcgctctcctgctgttgctggaagcttctggaatctggagccgagccgatgccatggcggcgctcgtgcggcccgccgtgctgcccgtctgcgccatgacgggcggcggcggtaacgacaagcggtcgccgccgcagcagcggtcgtggtggggcgggaacaagcagagattgccgcaccagccgcggcggcagcgggcgggaatggtggccgaggaggaggaggaggggcgctggaccaggtgctcggagtgctccgccgcgacggcgagtttctccaggcggcagccggacgcccccctccgcgacatcttctggctccgcttcctcgagaagaagaagcagcagcggcggcggaagcaaccaaaacctaaacccaaacctccggagcagcagcagcagcaagaggaagcggcggcggctatccaagccccatccttcccacctccctcctaccggccaggattatcatgcctggatcttatgactgctgatttcgaagccctgaagctgtatatcggctactcgaagcatgcaatcgagcagcaatttctcaaaggcaagcggcaacctcagcatcagcaaactcctaaaccaaaactccagcaacagcagcagcagcagaagaagaagcagcagcaacaagagcagcagaatcagacacttcaacctccggccttccctcccccatcgtaccctccagggctgtcttgtatggagctgatgatggctgatatcgaagctctcaagttgtacatcaactactatgtagccattctcaccactcctctaccccagcattacgatccggagatactgtcccgttacttcacctcgcgtcctcatattctcgcatttcgcaccattcagataatcttcgcatttgtctcggctgcagtaaagatgcaaatttctaaaagaacaaacttgatcacagatgccacctacagctgtaatagcaccggaagcaaaggtttcaatgcttcacaatacatggttggccagcttctcaaagagacatttctagatcttgggcctacttttgttaaagttggacagtccctctcaacaaggcctgatatcacaggctcggagatttctgaggcactcgccgagttacatgaaaaggttcctcccttcccgagaaaagatgcaatgaagattattgagggagaatttgagctccctgtatcacacattttcagttacatttctgatgagcctgttgctgcagcttcctttggacaggtttatcagggacgtacagttgatggtgctcttgtggccataaaggttcaacggcctaaccttcttccttcagtattgagggacatttatattctacggcttgggctttcttttgtgaggaaggtagcaaagaggaaaagcaacattgccctctatgctgatgagttgggtaaaggtttggttggcgagttggactacaatattgaagctgctaatgctaccaaattcctggaatatcattccagatattcatttatgctggttccaaaggttctcaagcaacttacgaggagaagagttttgacaatggagtgggtatctggtgaaaatcccacagatttgctttccttatctaaaggaatttcatcagaaattgctgaatcgtcagagaagcagaagatcgaagcaacagcccgtcttcttgacctggtcaacaaaggtgtcgaagcatcattagtgcagctcctcgagactggtttgttgcatgctgatcctcatcctgggaatttgcgttatacacctgaaggtcgtgtcgggtttcttgattttggtttgctttgtatgatggagaagaaacatcagcatgctatgcttgcaagtatcgttcacatagtaaatggagattgggcttctcttgtttatgatttgactgcaatggatgttgttccaccaagaactaatctacgccgagtgacaatggacttggaggatgcgttgggtgaggtgacctttgaagatggaattccagatatcaagtttagcagggtgcttggaaaaatatggtctgtggcatttaaataccacttccgtatgccgccgtactacacgctcgtcctgaggtcacttgcctctttggaagggctggccattgcagcagatggaacttttaaaacatttcaagcagcatatccatatgttgtgcggaagcttctatcggataattcagttgcaacaaggagactcttgcatcaggctattttcaacaaaaggaaagagtttcagtggaacaagattacagtatttctaaaattagcatcagcaaggggtaacttcaggtataatactggcgttttgcctgagaggaagggtttggatgttgcaaaacttgtagagatcagtgatgcatcttcttcactccatcttaaccgtgctacaccagaaagagcactacatactgcaaatctgtgcttgcggcttttactatcgaaggagagcattgtgataaggagacttgtaatgacagcgaacgcgaagtcacttgctcgtgacctgatctccaaagatgcatcgatttaccgggtgctcttaagtcgggtacttgccgatgtcatcttccagtggatggtgaaggcaactggttttaaacgagccggacagctcgagcctcacccacgcgtgacagcaggaaagaacgatgaagacctggggctgtccaaagaagcaccagccttggtgacattccagacagcagtaagagatcgcaggctgaaggtgatattctccaagttcgtcagggacataagagaggaccccatcctgatggtcagagtgagctggaacatgtttgctatctcggtggtctccgctgcaattggcgttcaccgtttcatcgtcgtcttgtcggaggaatttctgtctacattaccaccgcctgtgcctccgccgcggctagttcagattcagagcatatgaagagcagcaactatgccttggtgcatgaagtaacttttttactgggtatcccgtagctgtatataaacgttttcaggagcagaatcagccatcctgtagctgacagtagctcgatcagagttctccatggctagttctccgtaaatttgtcttctactattacaggcttcctttgaaaagggaattttgtgggaattaaactgatttttgtg

SEQ ID NO: 16631 - DNA, 2881 bp, Oryza sativa
  ref <308>: DATABASE ACCESSION NUMBER: AK067110
  ref <309>: DATABASE ENTRY DATE: 2001-12-06
gacactaccactgctactctctccatcagtccacaaagaggaaggtggaggaagaagacctgcaaggtgagaggaggccaatggtgaagttctccaagcagttcgagggccagcttgtgcccgaatggaaggacgccttcgtggactactggcagctcaagaaggacatcaagaggctgcaggctgcggaggcggaggcggccggggtggcggcgacgacgccgctgtcgcagtgccaggcgccggtggcggcggctcactgggtcatgaggctgccgttcttgcacccccatggacaccaccacaaggagcatggtgccatccaggtgcataggaagctggccagcggcggaggcggcggcggcggcgcggtggccggagaggtgtacgaaacggagctcgtggacggcggcgccgggttcgcggacggcgaggcggcgagggccttcttcgcgaggctggacgagcagctcaacaaggtgaaccgcttctacgagcggaaggaggccgagttcgtggagcgcggcgagtcgctccgccgccagctgcagatcctcgccgagctccgggccgccgtcgtcgccgagcagcagcgcgacgggcgccgccgccgatgcggcaacggcggcgactcctcgccgccggacacggaggatccctccgtctcctgctccatcctccacggagatcagtccctcagaggcacttctgagcaagaacaggaaggccaggaaaagctcaccaaagacatgattgcaaggagccctgacgaaggagacgatgatcagctcaccatccctcaagaattgggcgattcagggaggcttggcaggccaagagaagaagccgccaacaccaggccgaggacgacgctcccaggaggcagggcggtcacctgccaaggcagaagcgtcaggatcaacatcccggtgaccacgccgacgaggaccgtcaccgccatccgtgagcttctgttcgacgacatgctaagccagtcgaggaggagcggtagcgccaacggtacaaaatgcggcgacaagctgagcatcaacaagaggaaggtgcatcaggcagagaagatgataaggggtgccctgattgagctgtacaagggattggggtatctcaagacataccggagcttaaacatgatggcgtttgtgaagattttgaagaaatttgacaaggttacagcaaaggaagctcagtcaatataccttaaagtagtggagagctcctacttcaatgtctctgacaaggtaattaggctaatggacgatgtggatgagctgtttgtgaggcattttgcagaaggtgacaaacggaaagcaatgaagtatcttaagccaaatcagagggaagaatcacacaccacaacatttttcatagggctattcactggtggctttgcagcattattcattggttattgtatcatggcacacattgctgggatgtacacccagcagtcaaacaaggtctacatggcaacatcatatcctgtcctgagcatgttcagcctcttctttctgcatctcttcctctacggatgcaacatcttcatgtggagaaagacacgcataaactacacattcatatttgaattcacgcctaccaaagagctgaagtatcgtgatgtgttcctgatttgcactacttccatgacaattgtcattggtgttatgtttgcacacctgacactcattgtcaaagggtattcgtcatgtgcagtccaagcaataccaggagctctacttctggttttcttgctaatattggtctgccctttcaacatactctaccgatcatgtcgttaccacttcctaacagtgatcagaaacatcattctaacccctttctacaaggttgtcatggttgatttcttcatggctgatcagctttgcagccaggtaccactgcttaggagcctagagtatctggcgtgctattacataaccagcagctacaagacacaagactatggctactgcaccagagtgaagcactttagagatttggcttatgcagtatccttcctaccttactactggagggccatgcagtgcgcaaggagatggtttgacgagggggacataaatcacattgtcaaccttgggaagtatgtgtcagcaatgcttgctgctggaacaaaagtggcatacgagaatgataacagtgctggatggctgtcacttgttgtcattgtgtcgagtctcgccactatctaccaactatactgggactttgtcaaggattggggtcttctgcagtttaactccaagaacccttggctccgtaatgatctgatactcaaacaaaagtacatctatttcctttccatgggtctgaacattatcttgaggctggcatggcttcagaccgtcatccaccctaacatcggaagcctggattccagagtaactttgttcatcttggcagctcttgaggtgattcgacgaggccactggaacttctacaggttggaaaacgagcacctaaacaatgcagggaaattcagagctgtgaaggttgttccacttccttttcatgaagtggaagaggactaacaaaatagggcatcatcatcatcattgcagcagattctagggattcagaactctaagcagttcagatgtaacaccaactaatgttagaaagcctgcactaccctattatgattcaattaaattttttggtgtgaggaataatgggcatttaacatgttcagtttggagaagatacaagcaaaaggcaaacactatatagatgtagaatacaggggttccaattagtttaccaagatcgaatactaatctcgtggagttgaagcgaattcacttgtggaaaaatccaatcaatcacaattgttcttttggccact

SEQ ID NO: 16632 - DNA, 2512 bp, Oryza sativa
  ref <308>: DATABASE ACCESSION NUMBER: AK067111
  ref <309>: DATABASE ENTRY DATE: 2001-12-06
gagctgcagattctcccgtttgtttccccacagaaaaagggcgccagttcatcattcctcgccatcacatccacccgaaaaaaaacatgtcttttttactctctttcttcttcttcccccgatcccaaatccctccctgttcttgctgctgctctcgagttgagtgagttgaccctcatcctccccacccacccgaatctcgcggagccatttcgcgttcttggaggagttggggagttttggtgtttttggatccgaggagcgtgagagttcttggatctcgtcgccctcctcctccggcaatggcggcgctcgcggagcacctgctgggtttgtcgtcggcgccggtggactgggaggcggagtcctacccgggttacggcgacttcgccgtgctccccttcctcgtcgccttcttccccgccgtccgcttcctcctcgaccgcttcgtcttcgaggtaaaatctgcgcattgtctcgttagatccgagatgcccttgggattgcagtgttgaactgctggtggtagacttgggagttgttaatggatcggtttgattatgttaagactgttagataaaaggcatctgcttttgggtgtcagaattttcattttcaattatgcagagttctggcgtgcagatttcatatgctgttgaaattatgagcatggtgaaaatgaatgcagtatctttcgattcggactctgcgcgattggattgataaaagatgtgttcatagtttgttttcatgtgaagttggcttcttttagtactaacagttagcaagttggttgtgtggttgatttgttccctttaatacaaaggcataaagtgtaggccttgattgtgttgagttgcttttaattggagtacaaggtgacacgtttatggtaacacttttaaccatctctgcaatgatttgatactagcaggatacaattgttgatgcaatggttgcatgtgtcatatttgtgcaatacctgtactcccttgcatgcatatattatagacttatcgtctcgttcaattcgcagttattagcaagaaggcttgtacttggaaaggggtatgacaaacttgctgaaacagatgaaagcaggaagaaaattaacaagtttaaggagtcagcatggaaattcgtctattttctttctgcagaactgctatcactgtctgtaacatacaatgagccatggttcaagaacaccagaaatttctgggttgggcctggtgaacagatctggcctgatcagaagacaaagtgagtggaaaaaaaataatctatacctgtgaaaaggtttctgtcacacagagtttttttttcctgttttctaccttattgcagactcaagcttaaggctgtctacatgtttgctgctggattttacacatattccatcttcgctcttttgttctgggaaacaaggcggtcagactttggagtctcaatgtctcaccatttggcaactgttgttttgatcgttctatcctatattttcaggtatattctgaacaatttcccagataaggtaattgtatgtatggcattccagctccacaagctatatttaaatattattgtgtttttcgaacagatttgctcgcgttggctcagttgttctagcccttcatgatgctagtgatatattcttagagattgggaagatgtccaagtacagtagttgcgaggggctagctgttgcagcatttcttctttttgtggcttcatggattcttctgcgtctaataattttcccgttctggatcctaaggagcacaaggtaaactcatgcctgcttatatgctgctctggcatctggtgttatctacgcatctctagccatttagcgctataatcgaaaagagcacaacggcacaactacactagaaagactttaagaaactttgttgatcaatgatctggtacctttttcagctatgaagtactgctgaccttggacaaagagaagcataaattttacggccccatatactactatgttttcaacagccttctgttctcacttctagttcttcacatatattggtgggtactaatataccggatgctagtcaagcaaattcaatctagaggccgtatcggcgatgatgttcgatctgattctgaaggtgaagaagatcatgaagactaatctgtgggctgaatgcttaactgaagaactatatatagtgatccctacatgaagatacatcatattgaatacctgattcccagaccagatcaattttcagtatcaaacatggcaaccatgattcacgagttgctaggaggctgcttgcgctgccatatactttatgagaaaaagttgatcaatgttttccccccttatatcctcatttataagagaaatatgcaggataagttcgttaattcattggttcattcatgtaattgtgcagacgattaattaatttacggtgcaatcatgtaatgttctgtggaactcgattgtaacttggtgtatcttccattctaatggaaattctgg

SEQ ID NO: 16633 - DNA, 2155 bp, Oryza sativa
  ref <308>: DATABASE ACCESSION NUMBER: AK067112
  ref <309>: DATABASE ENTRY DATE: 2001-12-06
gggtcgccggcgacacgcaccaccgtctccgcctccgcgccgccgccgtcgtctccgccgcctccggtggaatcctcgccgcggccccgtcacacctcatcctcttcgcttggccttctccgcatccggttattttaggtcggagaaggcggcggatccgccgctcgccgggcggatcacgctccctcatcattggtatcaggggcggagacgcgagcggtgagcctccccgccgttgggagagatcttcacttgccaaactcaattctcagcatgtcgtggaggcggctggagctcgccgcgctctgcgcctacgcgctggggttctacctcgtcgtgatccggaagtcgcttcgcctctctcatgattactctgggaggttgtacggcctacgagcaggctcactcgctggccatctgaacgacttgtccgatgcacaatggagaaatttccgggggaacttacctgttcttaccattgtgatgggtgcatttctgatgttggcgaatatgcttcgctactgctacagcttgaagggaagaggggcctctttggtgtggcttctcctgtctgtcacctatttatgctatctacatggtgcttgtgttagtttcattctcctaatagcattgattaactactccatagtgaagctattttctcgatataaatattgtgttgggctcatttggagcttcaacttagctgtccttatacttaaccgagtctatgaaggctattcattctcattgtttgggcaacagcttgcttttctagacaatcatcggggtacatttcggtggcacatttgcttcaattttgttgtattacgaatgataagctttggatgcgattactgctggtcactccggtcttctcagtttgatcataagaagcatatgcagcgatgccaagtttgttattctggcaaaacatgctactttgctttgcaggagagagcgctcattggtgacaaatacacattactaacatatttatgctacttgacatatgctccactctacatcgctggacctattgtaagctacaatgcatttgcagcccagttagatgcaccccagaaaaattattcagttgcacaaatatcttggtatggggtgaggtggatcctaagtttccttcttatggaagctatgacacattttttccactacaacgcctttgtagttagccgattatggcagcaattatcgccatttgagatcttcatcattagttatggggtgctgaactttatgtggttgaaattcttcctgatttggcgctacttcaggttttggtcactggtaggaggagttgagacgcctgaaaatatgccaaggtgtataaataattgtcatgatctggagagtttctggaaaagctggcatgcttcttttaacagatggttggtcaggtatctgacattcctcttgggggtgctcaaagaaaactacttagtatctgggtggtattcacgtttgtagcagtttggcatgacctggaatggaaacttatttcatgggcatggttaacatgcttatttttcgtccctgaaatattggtcaagtctctatccaacaagttccagccaagaagtgcccttgggttgttcattcaccgggagttaagtgcaattgctggtgctgtgacaataagctgccttatggtggcaaaccttgtcggttatgttgtaggaccctccggcattaaacttctcatgtcacgaatgcttgggaaggatgcccttcctgtccttgccttcatatttatctcattctatgtgggagttaagcttatgtttcatatacgtgacgcacatgagaatcaagggtgataactgataagtcgacggggaagaactcccactgtaaaatgtagacaagcagctgcgatgagacgctgtcaagactcaagacaaataggcttacctcttcttttatgggatttgtttgacacgaacgaaaagctcctctgaccgccgagctttggctcttctgtaatgtagggcttattgattggggtagtgaagataatagagcacaaatggaaatggtactacgagctctgtttttaagagtggaaatgcagggcacactccattggattgaaggaatttcaattctcagacaattttcctatgagctcttttgg

SEQ ID NO: 16634 - DNA, 1316 bp, Oryza sativa
  ref <308>: DATABASE ACCESSION NUMBER: AK067113
  ref <309>: DATABASE ENTRY DATE: 2001-12-06
gacttcaatttcttcctagctcagctttcccctcttctccttctcctcctactacccaatacgactactactagttttctttcttggccatcatcatttgttcctcatcttactctagcttctccattccaaaattcaccaccgccggcgccgccatctccattccaaaatttgctctgcgtcgagtcgtgtgatcgatcgatcgatcgaggtgtacgtgtgcgctgctggggaaaagggaaatggatccgtcgggcgccttcttccacgcggctccccggagcggctcgaatgtgtcgctggcgtcgctggcgaggacggccggagggaggaggatgatgcacagggtcttccgcggcgtcatcaccttcatcttcgccatagctggactgtttcttggagcggtgactggcgggctgatcgggctggccaccgagagcggcctcttccgcggcaccggcatcggcgccatcaccggcgccctcgtctccatcgaggtcgtcgactcctccatccgcgtctggcgatcccgccgatccgggatctccagcatctgctatgtgcttaatgtgatctacagcctcctgaccggcaggcttgtccgcgagaaggtcgatccggcggtgcagcgggtggtccggagccagatgaatgcagtggattcatcgcccttcagggagtcccctgacctgttcgagatcgagggcaccaacggcatgccacgggcatccatcgacaagctcccggaggtcaggatcactgaggagtacaggaggaacgccattggtgacctctcgggatgttcagtttgcctccaggatttccagacaggtgagaaggtgaggagcttgccggattgctggcacgtgttccatgtgccgtgcatcgacggctggttgatcaagcatggatcctgcccgttgtgccggaggaagctgtgagatcgacgacgacgacggccatggtgatcactgctatagttgtagcagaaggaggaggaggctgctctgctttcttgctgtgtgctgcgatcgagttgtccatcagtgttgctgttcttagagaagaagactgacatctctctctctctctatatatatagaaaacccttaatctatagagcattttgtttctgcttatattgctacatgctctatctttttggttgaactatctacatatatatctatatttctatctactcactcctttctccttatgtaacatacctctcaaaactctgaactggcttgtgctgatcatctgatgtataatatataatatataaatatatatcgccccttggacaccatcgc

SEQ ID NO: 16635 - DNA, 2100 bp, Oryza sativa
  ref <308>: DATABASE ACCESSION NUMBER: AK067114
  ref <309>: DATABASE ENTRY DATE: 2001-12-06
tttcccgcaccgccaccgccactccccccccccgcgccgccaccccaccccaccccaccccacgccgtctcctccgatcgccggagaaggaggaggaggcgtcagccatggcgctggccttcgacgagttcggccgccccttcatcatcctgcgtgagcaggagaagaagtcgcggctgcgcggcctcgacgcccagaaggccaacatcgccgccggcaaggccgtcgcccgcatcctccgcacctcgctcggccccaagggcatggacaagatgctccagtcccccgacggcgacgtcaccatcacaaatgatggcgcaacgatcctggagcaaatggatgtggacaaccaaatcgcgaagctgatggtggagctgtcctgcagtcaagactacgagattggggatggtaccactggtgttgtggtcatggctggctctctcctggagcaagccgagaaactgctggaacgcggcattcaccccataaggatcgccgaaggttatgagttggcctcaaggatagcttttgatcaccttgagcacatctcccacaagtttgagtttagtgctaccaatatagagcctctggtgcagacctgcatgacaaccctgtcatcgaaaattgttaaccgttgtaagaggactcttgctgagattgctgtgaaagcggtccttgctgtggctgatttggaaaggaaggatgtaaacttggacttgatcaaagtggaaggtaaggtaggcgggaaactagaggatactgagctagtatatggaatcattgtcgacaaagatatgagccaccctcaaatgccaaagaggattgaggatgctaagattgccatcctgacctgcccatttgagcccccgaagcctaagacaaagcataaggttgacattgatactgtagagaagttccagatgctgcgtgagcaagagcaaaaatactttgatgaaatggttcagaaatgcaaggatgttggagcaaccctagttatttgccaatggggctttgatgatgaagccaatcatctgctgatgcatagaaatttgccagctgtcagatgggttggtggtgttgaattagaattgattgccattgctacaggagggcggattgttccgaggttccaagagttgagtcctgaaaagcttgggaaggctggaatagtcagagagaaatcatttggaacaacaaaagatcgcatgctttacattgaacagtgtgccaactccagagctgtaactatcttcatacgtggtggcaacaaaatgatgattgaggagaccaagcgaagtcttcatgatgctctttgtgttgcaaggaatcttatccgtaataattcaattgtgtatggtggtggttcagcagaaatatcttgctcagttgctgttgaagctgctgcagatcggtacccaggagttgaacagtatgcaatcaggtcatttgctgatgcgttggatgctattccactagccttggccgaaaacagtggtttgtctcctattgatacactgacagcagtaaaatctcaacaagtaaaggagagcaatcctcactgtggcattgactgcaacgatgttgggacaaaccacatgaaggaacaaaatgtttttgaaacactgataggcaagcagcagcagatcttactggcaacccaggtggtgaagatgattctcaagatcgatgatgttatctcgccttctgactattgatgatgcttttgaagactatggagtttattgtgctagggccttggcgacaagcacttccagtaggctctacattttctgtcgatcggtttttgattaacatttacgccatgggtttgcttgcttgtgctatttgatgagctatctgtttgtgtgaacttaacttttggtactttgtttttcgcgcccgcactttgtatagcttgagacaatagcacaatccctttgaagctggcctagaagtttgagtagctaccatttgctcttgtgctgctcagattcgtagatgctatataggttgcgcgctgtggtagtatcgtattgtgttctgcatcgtccgcatgtactctacttttcttaatgatcattttgagccatatgaatattt

SEQ ID NO: 16636 - DNA, 2673 bp, Oryza sativa
  ref <308>: DATABASE ACCESSION NUMBER: AK067115
  ref <309>: DATABASE ENTRY DATE: 2001-12-06
gacttctccttccttctcctcctcctgggcctccgctgccagcgatcaagccagcacgatccccccgcgcgcgcccccagtcaaccccggcggccgccgaggcaaatgccggctgcgggatcccggcggtgaaggagcggacgccgacatgggtgggcttcgtgtcgacctctccggcgcggagatccgcgtggaccccgcgtgcggcgccgccgccgacgatggcgggagcccgcccgtgttcctcccccgccagcccgccgcgcccccgctcctcgcgctcgacatcggagggactctgataaagctggtgtacacggcgagctgcggtggcggaggcgcggagctgcggttcgccaagttcgagaggcggaggatgcaggagtgcttcgacttcgtcagggcgcagggtctcgtccaccgcaatggatcaactatgggttcaagcaaagaaaatatagcattgaaggcctcaggtggtggagcatataaatatactgaagattttcgtgagaaattaggagtttgtcttgacaaggttgatgaaatggatagtgttgtttctggagcaaactttttgttacagagtgttcctggagcagccttcacacacatgaatggaaagaaaagttctgttgatatttccccaaataacttgtttccttaccttcttgtcaacattggctctggagttagcatattaaaggtcactggaaataggaaatttgaaagggtaactgggacacatattggtggcggaacaatgtttggtttagcaaaacttttaacaggctgtaagagttatgacgagttcttacaattaagccagaaaggggacaattttgttcttgatctaattgtgaaggatatatgtggggaacttgtttgccagaagcaaggactttcaacttcaactcttgcttctagttttgggaaagttatcacttctaagaagaagttaacagattacagacctgaagatctagcatccacattgttgagcgcttttacctataacattgcacaaatttctttccttgttgcatcaatcttgcatctcagaagagtgttctttggtggatcttatatacgtggacataagagcacgatgcaaaatatttcttatgcaattgacttctggtcgcagagtaaaatgcaagctgtcttcttgcaacatgaagggtatttaggagctcttggtgccttaatgagttatggtgattctggagataaaaacatgaaccttgaggaaatgaaagaggaggagaacatccatgaatcagcaacacctattgatgagacatcaacagatgaacataatgatggaaacatatttccttatctccttgttaatattggatcaggtgtcagcatgatagaggtaactggaaatgggaagtttgagcggattataggatctcacctaggtgggggcactatccttggtctggcgaggcttttgactggttgttcaagttatgatgaattcttggagttgagccagagaggcaataatttagctgttgatttgactgttggtgacatatatggggagcatggttacccaaagattggtcttcctgcgtccactactgcagctagctttggaaaagtgagttcaagtagactttcggaatacaaagtagaggatcttgcggcagctctattgaattctttcacctacaacattgggcagatagcctactttgtagctaatctttctggtctgaagagaattttcttccgaggtgcttatatctgtggccatgagaagactatggacaagatttcccattccctcaagtattggtccaaaggccaagttcaaacaacatttctgtgccatgaggggttcttgggaacactaggtgcattttggagctatgagaacatgggtattgacggcttggcagcacatgaagtcataagggaggtcttgcttggcgctccttacactgggcagcttccatctctgcctctgactcaccaacaggacaatggagaagatacgaccattgaaggagaagtagaacggcttcgacatgacaatgctgtgctgaaggctgagcttgaacggttacaaagggagaacacagagctcaaagcgaagctggtaaaatctggcaagccaaataccttttatcattaaacataggatgcagtagtgaagcatgattccatggcaacaagagaaggtgtttgagggcaaaagttcaatggccttgttatggagatcggaggggcagaggctgttcaaccagccgaccacctggttcaagtcttatgaacgactcgggtagggcccaaatttgttaagagactgaggtgtgtgagcaacatggaaacggatgcaacaaacagcctaatactgaggtgtgtaaggttgttgtaaactgtaacagtttggcagtagttttgattcaaacatgatttttacagaggaagtgtgcgcacaggtagttacccagttaacattgctcatacatattgagctcatgttgtatatttatttatttttctttacttatttttgttggtgtaaccttttctctgttgttctgtatcttgtaaatatggaagcagccgtgataataaacatatatggtgtctttgtatattttgcgaagatgtctatattgtcatcaagaatagtacaatacagaaatgttcatg

SEQ ID NO: 16637 - DNA, 940 bp, Oryza sativa
  ref <308>: DATABASE ACCESSION NUMBER: AK098989
  ref <309>: DATABASE ENTRY DATE: 2002-08-28
ggtgatttcccccttccgctcgctcgcgccgctccctaccggccaccaccgcgcgcgggacaagcaacctagctgctccggctgccaagccatcgccatggctccgtgccccgccgcgaccacaactcgcattggggcgccgccgttcgccgcgacgacggctcgccgacccgcccggggcgcgacgacgacgacgaaggcgcgggcgtccgggctgcggcaggtggagggccccgtgtcggagagggcgtactcgtcctcctcgcccgctcccacccacaaggtcaccgtccacgaccgccagagaggtgtcgtccacgagttcgtcgtcccacaggaccagtacattctgcacaccgcggaggcgcaggacatcacgctgcccttcgcgtgccgccatggttgctgtactagctgtgcggttcggataaagtcaggacaaataagacaacctgaagcacttggaatatctgctgaactaaaagataagggctatgcattgttgtgtgttggttttccaacttctgatgttgaagttgaaacacaagatgaagatgaggtctactggctccagtttggaagatatttcgcacgaggacctgttgaaagggatgattatgcactggagcttgcaatgggtgatgagtgagccgtgtctaaagggtggtgtttgcagtcgggagctcatgttgtcttaaggactttctttgaaagtggagaaaggggctttttcctcagctcacaattttccatcttcagtgctgttactctgttagcgattgtttggcatgtaaaaaagtgtgctttcttgtaaaaataccattttctagttcgcacctgacagacgaagaacaccatggattacatgtaaagttgtaaactgaacacctaatcttgagtgcgaataatgaataatgatcaccggagttatgagtttggg

SEQ ID NO: 16638 - DNA, 1381 bp, Oryza sativa
  ref <308>: DATABASE ACCESSION NUMBER: AK067116
  ref <309>: DATABASE ENTRY DATE: 2001-12-06
ggctgcgcctcctcctcatcgcctcgccgtcgccggagaagacaaccatgaccaccatcgccgcgcggatgccgtttgcgggcccacgcctcaggcctccctgcaacctcaccgcctcgaggccgggtcccaggagggccgggctggccgtcgtctccgccgccgccggtggcccgcttcccaccgtgctcgtcaccggcgcaggcggccgaacaggccagattgtgtacaagaagctcaaggagagggcagaccaatttgtggggagagggctagtcaggactgaagagagcaaagccaagattgggggcgctgccgacgtgttcgtcggggacataagagatcccgcgagcattgctcctgccattgacggcatcgacgcgcttatcatcctcaccagtgcggttccgaaaatgaagcctgggtttgatcccagcaaggggggacgcccagagttctactttgaggatggctcttatcctgagcaggtggattggattggccagaggaatcaaatagatgctgccaagagcattggtgtaaaacaggtggttttggttggatccatgggcggcacagatgtcaatcacccactaaataagttaggaaatgcaaatatactggtttggaagaggaaggcggagcagtacctagcagactcaggtctaccatatacaattataagggctggaggattacaggataaagatggtggtgtgcgggagttgcttgttgggaaggatgatgagatcttgaagacagaaacaaaaactattaccagagcagatgttgcagaagtttgtttacaggccttgctatttgaggaggcaaggtttaaggcatttgatctggcatcaaaacctgaaggtgaaggagtacctacaactgatttcagggctcttttttcgcaagttaatagtcgcttctaagaagtataatctgtcaacgaggcacaatatttgtgatggaataatatgaagtgtgtattgagtgaggaggctcctgatggaagagctcaagaacattgttgtctgctaattatggaaaacaggcaagtagttaaagtagacaaacacgcaccttacttatcagcagttccaattcagcaacaacatcatatataggttccttgagacacagaagtgaaggaagaggggcatgggccatgttcatttcagattatatagagatcatgttgtccccatgaaatgaaggtggttttccaatttcggtagctaatgtttggtagtgagaccagtgtcgatgtaaactaaaatctttgtatgtatctttctttcagggttcagattgctccaccgttttttggggggatattcttgatgcaatataaaaaaaggcgaatattagggatggcttgacg

SEQ ID NO: 16639 - DNA, 955 bp, Oryza sativa
  ref <308>: DATABASE ACCESSION NUMBER: AK067117
  ref <309>: DATABASE ENTRY DATE: 2001-12-06
gacacgcctcatcgacctcccaagaaccaccaccgccttctcccatggccgccgccaccgtctccgtccgcttccacccggccgcatccgccgcgcgctgcggcggcggcggcgctgacgcaggacgacctgaagaggctggcggcggtgcgcgcggtggagcaggtggagagcgggatggtgctggggctggggaccgggtcgacggcggccttcgccgtcgcggagatcggggcgctgctggcgtccgggaagctgagcggcatcgtcggggtgcccacctccaagcgcacgttcgagcaggcgcagtcgctcggcatcccgctctccaccctcgacgaccacccccgcatcgacctcgccatcgacggcgccgacgaggtcgatccagaccttaacctcgtgaaagggagaggtggtgcccttctccgggagaagatggttgaggcagcatcagacaagttcatcgttgttgttgacgagacaaagctagttaccggcttaggagggagtggtctagccatgcctgtggaggttgtgcagttctgctggaagtacaaccaagtgagattgcaggatctgtttaacgatgaaggatgcgaggcgaagctgagattggatgaaggcggcaaaccctacgttaccgacaactcaaactacatcgttgatttatacttcaagacgccgatcaaggatgcgttggcagcagggaaggagatctcagctttggaaggcgtcgttgagcatgggctgttcctggacatggcgacttcgatgatcatcgctggaacagatggcgtcagtgtcaaaacaaagtgagttttggggttttgttgttgccggtgttgaatttacgattttttgttgggatgtataagctattggggtgtaaaagcaggcaataagatgcttcactaataataattgaatatatttccccactctttcattgctg

SEQ ID NO: 16640 - DNA, 2278 bp, Oryza sativa
  ref <308>: DATABASE ACCESSION NUMBER: AK067118
  ref <309>: DATABASE ENTRY DATE: 2001-12-06
ggaacggatggctcggcccgggacttatcgcggggggagggggatcggatcctaacgggaaagacgggaaaatctccggcatcgccgccaatttctcccgcacgccgcggcgctgctccccctcccctacccacacactccaccaccatcaccaccaccaccaccacccgcacgcgcgccgcaacaacctcactactgcctatcctacctatatggcacggggtgtgggtccctccgattcccccgccacgccactcctctcccctccccacgcaaccgccttcctccgccgccgccgacgccgacgccgacgccgaccccttctcccaatctgcggattccagcgggggtcccccccccctcccaccggcggcgcccggtggtcgtggtcgtgggggaggggagtcaacgaacgagccgagccgcccgcttgccggagctctctatctatctctctatctctatctctatccctccagattccctcctccatcgaatctctgatatttggagggagcgactcgacgcagcatcgcatcgtaaggaaggtcccctccactgtcgatggatcagcaccagctcgacgaggagaaccagagagccgcgctcttccactcctctgccccatcttcctctttgggagctgacggggaggaggagagggagactgtgccgctgctgtcctgcaagatggccgacgataaatctgacactgtccaggtctccgaggatacggcgcaccagattagcattgatccctggtatcaagttggattcattctgacaaccggggtgaatagtgcatatgttctgggatattctgcatcaatcatggtccctttaggctggattggtgggacatgtggcttgattctagctgctgcaatatccatgtatgcaaatgctcttcttgctcaccttcatgaagttggtggcaaacgccatatcagatacagagatcttgctgggcacatatatggtagaaaaatgtattcgcttacatgggctctgcaatatgttaatctattcatgatcaacactggccttatcattttagctggtcaagccctgaaggcaatatatgtattatttagggacgatggagttctaaagctaccctactgcatagcattatctgggtttgtctgtgctctttttgcctttggaatcccttatctgtctgctctcaggatttggttgggattatcaacagttttcagtctcatctatataatgatagcatttgtcatgtcgcttagagatgggattaccacacctgcaaaggattatactattcctggatcacattcagatagaatcttcactacgataggtgctgtagcaaaccttgtgttcgcttacaacactggaatgctcccagaaattcaagcaaccataaggcctcctgtggtcaagaatatggagaaggctctatggttccagttcactgttggttcgttgcctctttatgctgtcacctttatggggtattgggcgtacgggtcctcaacatcaagctatctactgaatagtgtgaagggaccaatttggataaaaactgtggcaaatttatcggcgtttcttcagactgtcatagcattacatatatttgcaagcccaatgtacgaattcttggacacaagattcggcagtggacatggtggtccttttgcaatccacaacataatgttcagagtgggtgtcagaggaggctacctgaccgtcaacaccttggtggccgcgatgctccccttccttggcgacttcatgagcctgacgggtgcactcagcacctttcccctgacattcgttcttgcaaatcacatgtacctcacggtgaagcagaacaagatgtccatcttcaggaaatgctggcactggctgaacgttgttggcttcagctgcttgtccgtcgcagctgcggttgctgcggtgaggctaatcacggtcgactacagtacataccatttgtttgctgatatgtgaggctggaaagtgcaagcatgcagccctggatcagctgtaaattcgtcctcttcttttttatttttttggttaggggatgcatgtaggtcgatagaatgatggagattgcaataaataatttggctaaaatgttgtccagatttggttgtttgaggtgcaagatgtttgcctcaaaacgtaccgctatggttcactttttaagaactgtactgctacctctgtttgcggagatttttgtctgcaggcatgcaggatgaatattattcaagtgctctaatagtttgatctcagc

SEQ ID NO: 16641 - DNA, 1429 bp, Oryza sativa
  ref <308>: DATABASE ACCESSION NUMBER: AK098990
  ref <309>: DATABASE ENTRY DATE: 2002-08-28
gctatcctccacctcggcttatctcctcccccctccccaccaccaccaccaccaccatggccacagccgcttccctctccgccaccgcctcctccctcctcgcccccgcccccgccaccaccggcgccgcggcggcgcagtgctgctcctcctcgtccaccgcgctgttccccacccccgtcccgtcgctgcgcgcctactacccgcgcctgctcctcgcgttccgccgccccgccgtcgccgccgtcgcagacccgcagggcgccgtgctcgaggaggagcagggggagcagcaggacgaggggcaggagcagtacgacgacgacgactacgacgacgggtacgagggcggacgcggccccgcgttcacgccccccacccgcccgcgcaccggcaaggccgcccttccgctcaagcgcgaccgcacgaggtcgaagcgattcctggagatacagaagctgagggagagcaagaaggagcacgacgtgcccacggccatctcgctggtgaagcagatggccagcgcccgattcgtcgagtccgctgaggcgcacttccgcatgaacctcgaccccaagtacaacgaccagcagctccgcgccacggttaatttgcccaaggggacgggccagtcggtgaagattgcggtcctcacacaaggtgagaagatagatcaagcaagagctgcaggagctgatattgtcggtggagatgacctgattgaccaaataaaaggaggatttatggaatttgacaagctgattgcatcacctgatatgatgcctaaggtcgccggattgggaaagattctaggaccgagaggacttatgcctaaccccaaagctgggactgtttctccaaacataactcaggctatcgaagagttcaagaaaggtaaagttgaatacagagttgacaagacagggattgttcacattccctttgggaaggttgattttcctgaagaagaccttattgcaaacttcatggctgttgttcgctctgtcgaaaggaacaaaccatctggtgcaaaggggatatactggaaaacggcatacttatgctcatcaatggggccttcaatcaagttaaacatcaaagaaatgcttgactatggctcagaatcatcagactaaatgccacgaaaagcaccagttaagaaatctggtgtttgctaccaccttcacaaaattaaccatccacccttagcgataaatgaaccgggaaacatggtgggggaaggcaagggaggtgcttaggtacagtttttttttcagtctcacctgcatccatccagcagttacacgatgcccaagtcgacgaaggggtgatattgttggccatttgtacttacgagcaaattatttacggacttatagatgtgttttctgagatgtttgttgtaatgatcaatattttgtccatagtc

SEQ ID NO: 16642 - DNA, 1679 bp, Oryza sativa
  ref <308>: DATABASE ACCESSION NUMBER: AK067119
  ref <309>: DATABASE ENTRY DATE: 2001-12-06
cccttccttccttcctttggacacacctccccatttccctccctctctcctcttccacgagctcacctctcctctcctctcctctcctctcccgcgagcgagcgagagagaggcaggcggtgatggatctggagaggtcgccgccgccgccgccgcccgagggaggaggaggaggaggaggaggaggcgcgtcgtgctccatctgcctggatccggtggtggccgggggcaggtccgtcgccaggctgcaatgcgggcacgagttccacctagactgcattggatcggcatttaatgcaaaaggggccatgcaatgccctaattgtcggaagattgagaaaggccgctggctttacgcaagtgggcaccatccatctcctgatattgatataggtggctgggtgactggtgaaacctatgacatcacctcagatattccatttggttttcaatggtgcccctttagtggattcacccagctagcatctgtatttgaggagggtgaagctgaacaaacttcttatcatacagttggagatcattcaaatgctgctagcagttctcttgtttgcccttaccttgcactgcgtggttttctccatcctgtgcatgtcccttctagttctagttctggtgccgaaaacagttcatttcatcggcatccaactagcttggaaggccatgcagcccacgatttgagcaatacacaagttttccatgcaacagagtcaagaaatcatgacaatgaccaccgctatatgagcaatcttcctgtgtcaggcattcctgatcattctgtagctccatttggtataggattgccgagatatgacagcagcagccaacagagaacaaggccatatgcacatcaccgtcccctagttcacaggcccacacctcgcaacggaagcaatatggttacaccattagggtctgtgccagctgttatggctgagactagaggccatggtcatggtgcgaggggacacatgtatcaacagtcaatgcactcattgcagagcagcccattcccccctacatctagaagggttaggcctagggctttaacaattacatctttcatcgcagcatcatcctcagctgagattggaggacaccatggctttgctcctcctgtgaacaggtgcaattcctcggatggtgaggctgtttctagacctgttgatcggccatatgggtggggccaggagggctttaccccatttccctggatcccagctgacggtgaatctcactggtggggcaccttcaatcccatgcagaaccatacacatggaggctttactcgaagacccaccggggagcgaatgccgcagagccacccagatagtggatatcattccatgcatcctcagaggatgccgccattcttgtaaaggttatcttcctcgttgtttgtgtatatctcaaaattagttggaattatttgctccgagagaaaacgatgaatcagatgctattgtttccaaggaactaaatgatgctgcttctgttgtcggaatttagggttttctagctggcagccctaggtttgattaagggttgtgctttatcctatctcatttgttgcaatgggcagaaactatttggaaacataagcttaaactgtaccaagcagcgattgttgccattgaacatagttgtgatgccattgatgc

SEQ ID NO: 16643 - DNA, 1655 bp, Oryza sativa
  ref <308>: DATABASE ACCESSION NUMBER: AK067120
  ref <309>: DATABASE ENTRY DATE: 2001-12-06
gattgaagccggcaatcctcgccgccgtcgccgcccccgtcgacggcgatagcctcgccgccgccgccgcccccatcgccggcgaatcttccagtggtttgacatagatgagtgtgagatgcgtaagctggaccccaagtatgaagaattatatccatgcagaaaaggggtctgtcagaacacaccaggaagctacatatgcaaatgcaagaaaggaaaaaagtctgatggtacaggttatggatgccaacctgcggattctccagactatagaatggttgtaggtttaagtgtttctgccattgtggtaaccgctatggcatgcatgttgattatgcaattacaaaggagaaggcacaagaaagagaaaattgaatatttcaaacaaaatggaggacacaggttgtatgatgagatgatatcaaggcaggttgacacaatccgtatacttacagaaagagagataaagagagccactgaaaactacaacgaagatcgagttcttggatctggtggccatggaatggtctacagaggaactctggatgacaacaaagaggttgccataaagaagtccagagtaatcaatgatgattgcagggaagaatttgtcaacgagataataattttgtctcaaatcaatcacaggaacattgtgaggttactaggctgttgcttggatgtggatgtcccgatgttggtgtatgagtttgcgcacaatgggaccttatctgagttccttcatggtactgaccacagatcaccaatccccttggatctacgcctgaagattgccactcaagcagcagaagctttagcttacttacattcatcaacatctcgcacaatcctgcacggggatgtaaaatcagccaatatcctgatggacgatcagtacaatgcaaaggttgcagactttggagcttcaaccctcaagtccatggatgaaagcgagttcatcttgttcgtccaagggacgatgggctaccttgaccccgagagctttaccagccatcagctgaccgagaggagcgatgtctacagcttcggtgtggttcttctggagctcttgacaagaaagaaagccttatacaccaatgatttcaacaagaatgaatctgtcgtacagatttctgtcgatgtttcggcagaacaaacaccaagccatgctagaccctgaaattgtggatggctccaatgtggtggcgatcgagaagcttaccaaagtcgttgtgcaatgcatgagcccgagagtagatgaccggccaacgatgaaggaagtcgcagagagactacagatgctgaggaagctccagatgcaggcaacctgtgatggcgaaaacgatcgtgatgtccatgacaattttggaggatcgccgtcagtgatccttcattttgatgagatgacagatagcagcatagaaacgtctaaccttattctgagcgaatgacagtacatcttgcaacatgctgcaacttcacttgaatttgtctgtgtaatgaggtagtaggatgtagttctgttgatgttatagtcattctttccattttattgaaattgaagtgttttagagcatacagtttcagccattcggcttgtgttgtactaaccatttgtttctgtcaatctaatttcttcgagaggcagtcgtgcc

SEQ ID NO: 16644 - DNA, 1234 bp, Oryza sativa
  ref <308>: DATABASE ACCESSION NUMBER: AK067121
  ref <309>: DATABASE ENTRY DATE: 2001-12-06
gttggagtggagtattcctgttccgacgcagcgctgctaccgctcgaagaatgctgagccgatgcctgttggccctgttaaggttgttcctcgtgcaatgggtatgtcaaaggcagggcaaaagacgtgtcaccgctgcgggatgaagaaggccgctcgtattgtccagtgcaaaaactgtgacaataggtacttctgcaacagctgcatcaacaaatggtattctgggttgtccaagaaggatattaagacgcgctgcccagtttgccgtggttcatgtggttgtaaacaatgcacccttggtcagactaagggtgccattagtaaggaatcatcaggtgatcaagacaagctgataagtataaagatttgcaatcatcaattgtacaagcttttacctgtagaactgaaccaggagcagcttgatgaattagaaatagaagctaaaatacaagaaacaaaaatatcagatgtccgagtccaggtagctgatgagcaaagcggatcactcgactgcaataactgtaagctctccgtgcaccgattcctgagaagctgcccaagatgtccttttaagctgtgcttaagttgctgtcagaagatacgtgacgggaatatctcagccgccacccctgaagacaaatttaaccaacggttgcttcagcaagagtcagcccatgaggatggcagcattagttgcccttccatcgagttaggtggttgtggcgactccttgctaaacctggtgtatgtgcccccatctgaccaatctgaagaagtcagttcaggagacgagctagatggtccgggcaatcattctggagttaaagatgctgttgctgagagtaatggaggccctgacagattatccgttggccagcaggagaccgtttcctcataactacaactgccgatgttgctgatgtccctttcatctttgaggtgagtgtgagagtgtcataactgtggagacgctgagagtaatgagcatggaatgttcattctaagggctggaaaggtgaggggtgtgctccggattcgttagacggtagattgcctgatttagcgtgattatcggcccatatcggccattgattttaggtctgtgacctgtggatattctccgagtaattttttccgtacgtgttaaatccttggtttggacatggtgtacataggcctaggtctttgtttacccctccttagttaaaatctggttggagcttgcattggc

SEQ ID NO: 16645 - DNA, 1009 bp, Oryza sativa
  ref <308>: DATABASE ACCESSION NUMBER: AK067122
  ref <309>: DATABASE ENTRY DATE: 2001-12-06
ggctctttccgccgccctctctgctgcctctgcccggcgaggggcggcgcgatgaagcgcacgatggacgcgcggtgggcgcacatcgtgtacgcgttgttggtgccggaggcgttcttccgcgaccccgacggccgcgacggcgtcgcctctcgctctctccgccgccctctcgctatctccgcggccacgctgctttctctgcccggcgaggggcggcgctatgaagcacacgacgaacgcgcggtgggcgcacatcgtgtgcgcgctgctggtgccagaggtgttcttccgcgaccccgacgaccacgacggcgtcgactgcttgagctatctcgctctcttcgctgccctctggctctctccgccagcgtcaccgccacgtcatcttcaccgttgtcgccacctccctctattccgccggctctccctatttcacctccgttgctgtctcctctggtgtcaccgtcgccgccgccgccgcttgcctcatgtaggtaggtgccgtcgcctcacgatccttcaccagtcgtcgccacgacgagatcgttcctccctcctattcagccgccacatctcccagcgaggagctcgggaccaccaggtccggcgaccccgtcctccttacaggcggatccagaaacccggatgaggatgacagccgttaccacccttttctcctctttcatcttcacatgttagaggatccctctccatcttcctcagctcgctggcatgggagtcgcacatgataaggggtttcacgggagccggcagcgaccactgcttctgtgagaggaccgaaggtgaggttggggctttctccccctcctattgtgcatgcatattgatgcgattggacccattgtttggccatatcttcctttactcacacattctgctttcgtcggtatccaattccatctcttgataattatggtgttgtgctatgtttgatattctaatttgtatgttgcacatataattttaattgcagataccaccgctc

SEQ ID NO: 16646 - DNA, 3975 bp, Oryza sativa
  ref <308>: DATABASE ACCESSION NUMBER: AK067123
  ref <309>: DATABASE ENTRY DATE: 2001-12-06
ttgaggttgctgtccgcaaaatggttgattattggacatatgattcaaaaaaagaaacaggttacgttggcctgaagaaccaaggagctacctgttacatgaactctctactacagacactataccatataccatacttcaggaaggctgtgtatcatatgccaaccaccgaaaatgatatgccatctgggagtattccgttggcattgcagagccttttctacaagctccagtatagtgacaatagtgtagccaccaaagagctgaccaaatcttttggatgggacacatatgattccttcatgcaacatgatgtacaagagctcaacagagttctctgtgagaaacttgaagataagatgaagagaactgtcgtagagggaacgattgaaaagttattcgaaggtcaccacatcaattatatagagtgtataaatgttgactataaatccaacaggaaggagtccttttatgaccttcaacttgatgttaaaggttgtcgtgatgtgtatgcatcgtttgataaatatgttgaagttgagcgcctcgaaggtgataataagtatcatgcagagaatcatggtttacaggatgcgaaaaagggtgttctgttccttgatttccccccagttttgcaacttcaactgaagcgttttgagtacgactatatgagagataccatggttaagattaatgaccgctatgatttccctttgcaacttgatttggatagagatgatggaaaatatcttgctccagatgcagatagaagtataagaaacctttatgctcttcacagtgttcttgttcatagtggaggagtacatggcggtcactactatgccttcattcgaccaacgctatcagatcaatgataatattattaccctgttcctatgcatggccacttgatgacagctgaatagatgtgttctccgagacaactccctggcactctattcgacaactgaaactatcttgttaggacctgtatctattggattgcagcatttccgaggcagatttccaaaaaaatattagagtgtttgtttctacacaagagaatatcatatctcaactagagttagccaatgttagtgggacgtttttacacactaacaaatttacataagttctcttaactggacagaaggccctcatgtcaagttcaacatgttactttttcataatatagttggttataggattctgtgttggttctaataagcacctgactagcatggacttcaataacttctttcaagctgatggtcatcagttatcacttatcaaaagaagtatgtggtgtgagattacaggaggaaaatcatatgccttatgcacttttattgtaagtggatgccagtctagggagtaaccacgctgcaacaatataggtataaatttgatgatgagcgcgtaactaaagaagatactaagaaggcccttgaagagcaatacgggggtgaggaagagttgcctcaaataaatcctggtttcaacaacgctccatttaaattcacaaagtattcaaatgcctacatgcttgtctacatccgtgagagtgataaggacaaaataatgtgtaatgttgatgagaaggacattgctgagcatttaagggtaaggttgaagaaagaacaagaagagaaagaacacaaaaagaaagagaaggctgaagctcatctttataccatcataaaggtggctcgagatgagaatttgaaggagcaaattggcaaggatatatattttgacctggtggaccatgaaaaagttcgtagcttccgaattcagaagcagttactgtttaccactttcaaggaggaagttgcaaaggagtatggcatccctgtacaatttcagcgcttctggttgtgggctaagaggcagaaccacacatacaggcctaatcgtccattgagtcctcatgaagaaacacaatctgtgggacaactgagggaggtatcgaataaggcacacaatgctgagctgaagttgtttttggaagtagaacttggcccggatttgcggcctctccctccacctgagaagagcaaggaagatattcttctgttcttcaaactctataatcccgaaaaggaagaactctgttttgtggggaggctcttcgtaaaggccttgggaaaaccctcagaaatcttgaccaaactaaatgaaatggctggatttgtgccaaatgaagaaattgagctctacgaggaaattaaatttgagccaaatgtgatgtgtgaacatattgacaaaaaagccactttccgtgctagtcagcttgaagatggggacatcatctgtttccaaaaatcacctatacctgatagtgacactcaaatgcgttatccagatgtcccttcgtatctggagtatgttcataataggcaggttgtgcactttcggttattggagaaaccaaaggatgatgacttttctttggaattgtcaaaacttcatacctatgatgatgttgttgagagagttgcccgtcagcttggtgtggatgatccagcgaaaattcgtctaacatcccataactgctattcgcagcagcctaaaccgcaacctatctgatatcggggagtggagcatcttttggacatgctcattcattataatcagacatcagacatattgtattatgaggtgttggatattccactgccagaattgcagggcctgaaaaccctgaaagttgcattccaccatgctacaaaggatgaggttgtgattcacagtatcaggcttccaaagaatagcaccattgcagacgtgattaatgatttgaaaacaaaggttgaactatccagtcccagtgctgaattgcgcttgttagaggtcttttaccacaagatatataagatttttccactccatgagaagatagagaatattaatgatcagtactggacactacgtgctgaggagattccagaggaggagaaaaatctcggtccaaatgatcggttaattcatgtttatcacttcatgaaagaccctcttcagaatcagcagattcagaactttggagatcctttttatcttgctatccgtgaaggtgagactttagcagaagtaaaggagcgcatacagaaaaaactccaagtccctgatgaggaattctgcaagtggaaattcgctttcatatccatgaaccggccagattacctccaagattcagatgttgtatctgcccgtttccagaggagagatgtctatggagcctgggagcagtatcttggtttggagcatgctgatactgcaccaaaaagggcctacacagccaatcagaaccgtcacacctatgagaagccagtgagaatttacaattgaaatcacttctgactgtgctggccccttggtggtgtcaaatctgaaagcagcaacagagagatgtagtatggagaagttaaactcgaacagggaaaagcagcaacaagttttggccatttgggtgccgtggcctctattcctttctaccggtgctgtttggatgcagaagtgcacttgatttcattgttcatgatgacaaatttttcatgattttccaccatgctttggggcaatggtgcgtgctattgaatttccttaagttgggtgtgaatgcccccttagggtagatgttgcttcatttttagagcaaagtttcggtacataagattttggtaggggggcatatgtatacagggtatagttctgactcatatcgacttcttgtctttgtgtggatgtaacaatggaaaacatcataccaatcttgctgtatggctcaattttatcttcctttcgcagaaaaaattaaccagaattactgccgcagttagtgcggcgctgggttccgtgatagtaatagctgatgtaagcgtggatatgatgtaattcaccagaaatatgaaatatcccgatttccttcgagaaacaaatatgaaatatcattgaaatgtggtacttcttttttcc

SEQ ID NO: 16647 - DNA, 1216 bp, Oryza sativa
  ref <308>: DATABASE ACCESSION NUMBER: AK067124
  ref <309>: DATABASE ENTRY DATE: 2001-12-06
gacctgttggctgttcttggcttcaagaagctgcgtgttgcagagactcagagaggcttgcaagcaaaatctactattcatttgggtcttgggttctttgccctgattaattgttgggcggttttggtgcgaaagtttcagtttcttgtgtgatgcaaaaaaaactgaaatttttgtggagaggcaaggattgaaactgcttgggtgccaccgaagatcgagttcatggtgaatattgtgagagttcttggtgaagttcttgcctgagaaggaaggtgtgagagttcttgtcaaggttattgcctgagaaggaaggttttgtggtctatcttgctgtgatttgatttctctccccttctgcaaatccccgccaaaaaatgagaagaattcattgacattctcctctccaatttctgattgtccttgcaatccagaatgagctcagtttctttggatgtcatggctccagctctgagacaaattattcacttataccctcttcaactactctagcttctcctttttttccccttagtgttgtctgcttatctgtatctctgtgcaattcatggccctttgataccattttagcctccaattttcattgggattcatcatggatagtacctttagaaagcttaaattagttctagctcttgttgggatcatcgacaagaggatcgccgggacaatcaggccagaatcgctgaggaagtacggggagacggtggagaaatgcctcgcggagtacggcgtcgaacggcctacgatgggagatgtcctgtggaacctggagtttgtgctccagctgcaggaggcaggcccggacatgtccaacattgatagcatgaatcagatctctgaactcccttcaaatgcccagaggataagctccctggagatcagcactgcagatgaaagccgaacggccatggactactctcagatgtcaaccagtaatgccttctcacagctgatcaacacagaagggaggtgaatttggagtgaaattgtcctaagagtcactgcaaaaaaatgttgaacatgttcagttagggaaaatgagatgtttcttgctcagttgattgtctacactcttgtttgattttgcccagatatatataacaagccttcaattgcattgaatttttgttacccctatactgtacatacatatgtttcttatttatcttaaagcctgaaaatggattatgtt

SEQ ID NO: 16648 - DNA, 2055 bp, Oryza sativa
  ref <308>: DATABASE ACCESSION NUMBER: AK098991
  ref <309>: DATABASE ENTRY DATE: 2002-08-28
gcgttttttcccccaatttctcgtctccccccttcctccaatatatcggcggcgatcccggctcgaggagaggaggctccgccgcgattttttcggtgtcgcatcgaaattatgattttcgatgcattttaggctaaaagtgctcgggtctgaaacctacgtgcttttcttgtcgccgaagatggtgtcagcaaatatacatcgacgcacatgaacagcgatgatgcgttgctgaatccgtctgaagctgcaataagcatgacggttttgcaaattatgatactaaaccattcatgctgctacgccctcgtctggaactttcttcttctgatgcaaccgtgcacaagcaaacctagcctcgaagcgattgtgatgagttttagaggtggtgcgggttcgatcacgtggagttctattggtgttcagtgactcttggcaaaagttctcttgtaaaatcgacgacgatggaaaggtacaaagtgataagggagataggcgatggcacctgtgggaatgtttttagggcttataacactgaaacaaatgaaattgttgcagttaaaaaaatgaagaggaagtttttccaatgggaagagtgcattagtctgcgagaggtgaaggcacttcaaaaactgaatcatcccaacattgtgaagttaaaggaggtgactatggaaaatcacgagttgttcttcatttttgaaaacatggaatgcaatttgtatgatgtcataagagaaaggcaagctgctttctcagaagaggagatacggaactttatggtgcagatactgcaaggtcttgcatatatgcataacaacggttatttccatcgtgacctgaaacctgaaaatctgttggtgacagatggcactgttaaaattgctgactttgggttggcaagagaagtatcttccagtcctccttatactgactatgtttccaccagatggtatcgagctccagaggtgctgctacaatcgtcagcttacacacctgctattgatatgtgggctgttggtgcaattttggctgagcttttcacactgtctccacttttccctggtggaagcgagactgatcagctatacaaaatatgtgctgtgcttgggacaccggatcatactgtctggccagagggaatgaacctgcctcgttcaagcagctttaattttttccagatcccaccaagaaatctatgggagcttattcctaatgctactttggaagctatcgacttgattcagcaactttgttcctgggatccacgaagaaggccaactgctgagcaatcactacagcatccgttctttaatgtgggcaactgggtaccaaggccactccatgcctctcacacaaagacaattgaaactagaccgaatccaaggttggaactgaacctgtgggattttggtacaaacctgaggacaactaccttgatttaactctgagtctaaagccaagttttcctggaacagatttttctaacaatgttccagagcatacaaaagaggaaattctgctgtacccaggatttgaaaatcctcctgtgcagtcagggttttggcctctcgttgcatcagaccggccaatgggcgatgttccagccatgtcatcctggccacaggcatatgtggttgacggccaagccacacttccagctgttggattctctggttctccattcggtttgtcccccttacaaccaaatctgtttgagaaccgttcgttcgcaacacccatccggcaggtcaatttcttctgaggggatacaattaacagattgagcactgaaactatttttcagtccatacattcaacttgttcctttatacattgaactcaaataaacgggggcggcagatgaaatgtatataatcgtagcttgtttcctttttcttttctccccatctaaattcccctcacggagtaccctataatgtcagattctatatttatctagattgtgaatatgtgactttccaaaacagttttgtacgtcgatttgtcaaatgataacagcaagtatggatgagcgataactgacgatttgcg

SEQ ID NO: 16649 - DNA, 1741 bp, Oryza sativa
  ref <308>: DATABASE ACCESSION NUMBER: AK067125
  ref <309>: DATABASE ENTRY DATE: 2001-12-06
gtttccgttcggggtcgagggatttcgggggcgcgcgcagccatgaacgagaaggcctccgtctccaaggagctcaacgccaagcacaagaagatattggaaggcctcctgcggctgcctgagaatagagaatgtgcagactgcaagtcaaagggtcctcgatgggcaagtgtaaatcttgggatctttatatgcatgcagtgttctggaattcatagaagcctcggggtacatatatctaaggtaagatcggctaccctggatacatggctgccagagcaagttgcatttattcaatcaatggggaatgaaaagtcaaatagctactgggaagcggagctgccccctaactatgatagggttgggatagagaacttcatccgtgcaaaatacgaggacaagagatggataccgaggaatgggtcatcaagaccatcatctggtgctagagatgagaagagctcagagtcacaaactagtgttaacaggggtggccataatcaaagatcttcatttgagcaacaccgcacttcaccagctgcagtgagcaaaattgctccagtggtttctaggacgcccacccaggcaccacatcagccaaaagcacaaccatcagttcccaaggtttcacctcctcaacccgagaaatcacctcctaatgcaacaccaccaaaggttgagaggccatcagttgcaccacctcctaaggttgactatgcaactgatctcttcaacatgttatcaatggatggaacaaccgagaaagaagcagagtcatcttctaatgatgatagtgcatgggagggcttccagtctgcagagccagtacctagctcagacaaaaaggattctgctaagccagtagaaagtaagccccagtctacatcaggcatagaggacttgtttaaagattcaccagctgtgacagtatcctcagctccagctgccccacaagtaaatgtgaagaatgatatcatgagtctgtttgagaagtccagtatggtttcgccatatgctgtccagcagcagcaacttgcttttatgaccccccagcagcttgcacttctgtctcagcagcaagctttactaatggctgctcttaaagctggaaatgcaccccaaatgattccagggaacgccagtctgctaaatggtaatggttctaatcctgccaatggaggcttgccttcacaaagctggacaaatcttgcttatcagaatcctgggttggctccagtagcagcacagaatggtgccaccaaggttgcgaacaacaatcaggaattctcttttgggaatttcaattttagtacacctggagcatacaacactagctcatctgtcccagcaaatggggccgcaagtgcagctgctaacaagagcacatccccgacctcttcttccctcccctctcaatcaggcaaagaatatgatttttcatcattaactcaaggactgttctccaagcgatgaacacttgctatacttggaaattaaacaaatgggcctgtatgcaacgatgggcacagcagattttattagggggaaccgggggccttgtacactcttttatgaggcagcatttcttcttgtggatattacgacaccttgtagctgtcctggacaaataagaggaagaatatagcagctaattgcatatgttgtttcctacagctgaagagagtcgatattgttcatgatgccgatctctttgaatagaggacgccttgtggctttgttg

SEQ ID NO: 16650 - DNA, 1817 bp, Oryza sativa
  ref <308>: DATABASE ACCESSION NUMBER: AK067126
  ref <309>: DATABASE ENTRY DATE: 2001-12-06
ggttttcctccaccgatggctccttccacgagtctcctctcctggtcctcctccgacgacgacgacggcgccggcgccggcggcgagctgtcccgccctcgcaggcggtggcgggcgcttgtcctggggctcggggtgaggaggaagaggagcatggagggggtgttcgggttcagggagatgatgggggaggagttcatgggcatgttcctccccttctttggcaagatggttcagaaagtggtttcagaagaagtagagaaagcaattttcagacaagtcagcacaccagcgcctccaagactgctagcaggattgaatcagcagcgtccaaggtatcaactcgtgttcctgaatgaactaaagcctgtttacacactgatgaaattagaagccaaggatggaccgggtcttaaggtggctatagtcgaaagactcgaaaacaatcagatgcgcatcgtcaggttcggtcatcttgcttctgctaaggttgaagttgtagtcctccacggcaactttaatgctaaaaatgaggaacaatggacccctgaagacttcagcaagcagatagtatgcgggcgagagaaaagcgcacaacttctcaccggaaatctgacactgaagctcaatggaggggaagcattacttgagaatgcaaccttcactgataactctagcttcactagcactaagaagttcaggctgggtttgaggctagccaacaattctgaagatagggttcttgaaggaatcactgaaccttttcgtgtaaaggagcgtagggtggagggatttgaaaagcactacccgccaatgttggatgacgaagtttggcgtttggaaaagatcggccgcaatggagctcaccaccaggccttgacaaacagtggagttgatactgtacagaagttcttacaatcatattttacggacgaaaagaagctttttcagacttttagcaagatgtcacaggcagcttggaaaaccatcataagccatgccatgacatgtgaagtcggtgacgatctttgcttgtatgaagtgaagggcaacaacgtgggacttttcttcgatgcaatatatcagcttgttggggtgaagtttggtgattcttacaagcccataaatgagctcgacgaaatagagcagagtgcagttgaaacaatgaagcaattggcttatgcgaatataagtggtattcagtatgaccataagatggtcaacaactatcctgtaccgcttcataggttccattgtgggggaacttctatgttgactgactttattcctaaacagcagatcccaacttgtggtcaatacaattcagccctggctggtcaaccatttgaatcaacggagaacttttcttcattccaagaagcctctaatgcttcagtggatatgtcaagatttgtgcagggtcaaacctccaacgtgcagtttagccaacagttgggcatgggcaattttatcccacatcattcaaatcaaggaacattcatacccagaccaagaatcactcctctgtgtatacctaataccgaaaaaacatattttaatccaaacgctcatagcagcatccaggctgatcatgctgccacacgaattggccagtatgcacataatgagcgatctcattcacctgaagaatcatacaagcgcttttctccagataatttcctccatacagatgaagttgtggctttgatgcaacctcacttagtgcctccaagcaacagcgagaatttcagtaacctgctcaacctatcaagcaatgaccaaacctcacagcaaattgccgctccattccagccatc

SEQ ID NO: 16651 - DNA, 1206 bp, Oryza sativa
  ref <308>: DATABASE ACCESSION NUMBER: AK067127
  ref <309>: DATABASE ENTRY DATE: 2001-12-06
gatctgacatctctcctcccccgtccctatccccttcgcccttcgtcgtcgtcgtcgtcgtcgttcgtcccaatctccgcatccctccattcccccctcctcctcgatggctcgcctcctcgcgcaaaccctaaccctaaccctagcccgcccggctgcggcggcggcggcgcccctcctccctctccgcggcctcgccaccaaggtcgaggtcatcgagatcgacctcgccgaggacgacgactcctccgcctccacctcgggccccgcctcctcccccgcgtcggtggaggtggtcggggtcaggcgcctggaggaggcgatccacggcgtcatggtgcgccgcgcggcgcccgactggctccccttcgtccccgggggctcgttctgggttccccccatgcggcggccccacggggtcgcggacctcgtcggccggatcgcggcggcggcgtccggggccgacgcggaggtggtggccggagggctcgcgtacgagccggaggtgtacgcgcccatgacggaggaggaggcgctgtccttctccaccgcgcggggctggccgtcggcctcctacttcgtcgaagggaaattcccacataccaagaagaagtcaaggaaacgtgcaacccgcactgatgaggaagaaagctgattggctaatgctccattgccaaggggaaggcttctacaagaaaaggttgttcagggttacacgtctctgctatgaccaatgtacatatggatgacggcaaggacccaagtgctaattaatcaccccaccccttgcactatgaagataatctgttgcaactgctatgattgggttgcaatctgtatatttcactcagaagctgtagtgttattgtatcgaccagcccttgtgccatagccttggttcacggtaataaaacatggagggagaagctggatgcttgtgtttgtgttctgcaacagccatagaaaatggaacactagctggaatccaacaaggactgtggatggctctttgtgccaagaaaaaaaaaaagaatgtttgcaaagcgctgagataaaaacatctacttccatctccagtcttgaatttgtttccatataaaactgcatgttgtaatgtcatatttgacttgttgagacctaaaaggtcaactgtatgtgcatttggtggacatggcctgcgaagcaaatttgattacattctaaatt

SEQ ID NO: 16652 - DNA, 2791 bp, Oryza sativa
  ref <308>: DATABASE ACCESSION NUMBER: AK067128
  ref <309>: DATABASE ENTRY DATE: 2001-12-06
gggggggcgaggtggccgcgccgcggccacagaatcccggcgagacgaccgtgagtcgctcgatcgctcacgggctcgcggattgcattatcctcacctgccgccgctgctgctacgcccgccattctttctgtcgcctacttgcttcctcctcttcctcttcctcttccctcgtctccccggcgccacctgactgattggattggtatcgatccaagcctatcagcctagctagtgacctgagtactctgccgcttcctccagggccccgacaccgacgccgccgaggtggccaagatccgcgacgccgtcaagcacggccgcagcttctgcggccgcctgctcaactaccgcaaggacggcgccccgttctggaacctcctcaccgtcacccccatccgcgacgacaacggcaaggtcatcaagttcatcgggatgcaggtggaggtgagcaagtacacggaggggctcagcgacaagcggatgcggccgaacgagttgccggtgtcgctcatccgctacgacgagaggcagaaggacaaggcgatgtcgtcgatgacggaggtggtgcagacggtgaagcagccgcgcggggcgcgcgcgccggccgacgcggcgctgctgacgccgcccaagatgagcgacgcggacaagatggccgccatgtcgccggtcgtggcacccggcactccctcgggcggaggaggaggagccgggtccttcaagtcgccgctctgggacctgaagaaggaggagtcccgcctgagccggctcgccagcggccgcaagtccggccgctcctccctcatggggttcaagatcgggaagaggagctcggtggggagcagggaggcgccggcggtggtggaggagccggcgccggcgccaccgccggcgcgcggaggtggtggagaggacggacagctgggagcgggcggagcgggagaaggacatccggcaggggatcgacctggccaccacgctggagcgcatcgagaagaacttcgtcatcaccgaccccaggatcccggacaaccccatcatcttcgcgtcggatagcttcctggagctgacggagtacacgcgggaagagatcctgggaaggaattgcagattccttcaagggccggagaccgaccagggcacggtggacaagatcagggaggccatcagggagcagaaggagatcacggtccagctaatcaactacaccaagagcgggaagaagttctggaacttgttccaccttcaacccatgcgcgaccagaagggggagcttcaatacttcattggtgtgcaacttgatggaagtgatcatgttgaacccctcaggaaccgcctttcggagaatactgagatacagagtgccaaattggtcaaagctacagcagagaatgtggatgatgcagtcagggagcttcctgatgccaacttgagaccagaggatttgtgggcaattcactcaatgcgtgtttctccaaaacctcacaaacggaataacccttcttggatagctatagaaaaggctacaaatttaggggagaagattggcttgaaacacttcaagcctgtaaaacctctcggctgtggtgacactggcagtgtgcacttggttgagctacaaggaagtggtgaattatttgcaatgaaggccatggacaagtcagtgatgttgaaccgcaacaaggtacatcgagcttgtattgaaagagaaatatacgcactattggatcatccatttctcccaacattgtatacttcatttcagacgccaacacatgtttgtctcataacagacttttgtccgggaggagaactctttgcagtgcttgataggcaacccatgaaaattttcagggaagaatgtgcaaggttttatgctgcagaggttgtaattggtctcgagtaccttcattgcctaggtattatataccgtgatctgaagccagaaaacattttgctccaagcagatgggcacattgtactgactgattttgatctttcatttttgacgacttcaaaaccccacgtgataaaaaattccacatcattaaaacgaagaaggtcacaagaatttctccccccaacatttgtctcagaaccttccactccatcaaattcatttgttggtactgaagagtatatcgctccagaggttataacgggtgcagggcatacaagtgcaatcgattggtgggctctcggaattctattgtatgagatgctgtatgggcgtacacctttccgaggaaagaacaggaaaaagacattttataacatactgcacaaagaccttacatttcccagtagcattccggttagtcttgcagcaaagcaattaatccatggattacttcagagagatccttcaaatcgtataggttcaaatgctggtgcaaatgacatcaagcaacattccttttttcaagacatcaattggccactcatacgttgcatgagcccccctgaactagatgttcctctgaaactaattggcaaggaaactcaaccaaaagcgaagcctgatgaagatgttcccctaaatcttgatacattttaagggtagatcaaactggagcagttctttttcctgtatagtaataagaggcttcatgtgatgttagcattgttgagtgttttcagtctgagctgcctcaaaatcgtgtacatgattattcttttggttaggtaaagatcttagtacttcacataaataggatatattcttgtaaagcttatactcttttcttggagatgattcaataaagtagtagtgtttataatatatttt

SEQ ID NO: 16653 - DNA, 2549 bp, Oryza sativa
  ref <308>: DATABASE ACCESSION NUMBER: AK067129
  ref <309>: DATABASE ENTRY DATE: 2001-12-06
gattgcttctctctctcttgcccccatccatggctacgtgtactctccctctgccaccacaaaagtcgcgctttttccccgcctaaatcgtggaagatcagtgcggcggtggtgcgagctcctcaatccccagcccggccaagaattagcgggaaagatacagtttaccgtcccttgagcatggagctctgcacctcttctgtatcaggttcggtacaatggtctcgtatatcagcatttgactgtcgaactcggtcccatggatacgcgagttcaagttcctgggtttgtcaaaggaggagaaaaacatccttttatgtcatgaatgctgcgtcgactggtgctctgccccctacaaagaagctaatcccacgaactaatgtcagaaacatatccggtgataagcccagcagtgcactggagcaacttgatatagaacgtggcgtctgtatccctttccggaagtacactccagagatggtcagaaatagagtcttgggatcaagaggttctgtgctgtccctcgctagtcgaggcgtggagataatttggaaacttggcctttactggtcagctctaatgtatgacttcttggttgggcgagatgaagagattgttccattccgtgcccgccagctccgcaatcttctgtgtgatttgggcccttcattcattaaagcaggacaggttttagccaacaggcctgatattattcgagaggattatatgaatgaactctgtatcttgcaagatgatgttcctccatttcctaaccaggtagctttttccataattgaggaggaacttggacagccattagagagattgttcagcagaatctcatcacggacaatagcagctgcaagcttaggccaagtttaccgtgctacacttagagaaactggcgaggatgttgctattaaggttcagaggccaggaattgagcccatcatatatcgagatcttttcctgttccgaactctcgcatcctttttgaatggaattagccttcaaaaactaggctgcaatgcagagcttattgtggatgaattcggtgaaaaacttttggaagaacttgattacacccttgaagctacaaacatcgaggacttcttggaaaatttcaaggatgatccaactgtcaagatccctcaagtatataagcagtattcaggttctcgtgttttagtaatggaatggatagatggaatcagatgcactgacccacaggctataaaagaagcaggtattgatgtggagggctttctcacagttggagtaagtgctgcattgcgtcagttgcttgaatttggccttttccatggagatccacatcctggaaatatctttgcgatgcgtgatggtcgtattgcttatgttgactttggcaatgtggctgtcctaagtcagcaaaacaaacaaatcctaatcgatgctgttgttcatgctgtaaatgaagactatgctgaaatggcaaatgacttcacaaggcttggctttcttgctagtggaacagatgtgtccccaattgtcccagctctggaagctatttggcaaaactcagccgggaaaggcttagcagacttcaatttccggagtgtaaccgggaagtttaatcagcttgtgtacaattaccccatccgcatcccagaaaggttttctttggttattcgttcattgttgacacaagaagggatttgcttcactctgcagcctgattttaagtttcttgaggttgcatatccatatgtagcaaagcgtctcttgacagatccaaaccctgctctccgtgaacggctgatacaggtattattcaaagatggtctgttccaatggaaacggctagaaaaccttatagttcttgccaaggaaaacgtgtccaagatgagcagcaatcctgcactaaaaaagaatagctcgcaaattgagagaaatcgacaaatggagaagaaattagatctcaccgacacaataaaagacggagcacgtttgttccttatcgacgctggcatcaggagacaacttattatggctttcacggaggactccaagttgcatgtagaagagcttgttgatgtgtacagactggtcgaagatcaaatcgacattccatcagttgctctcgaggttatccaagatttaccatccgtcgcgcgcgatttcatgctttcttggagcgattccatcctgtcagatcggcaatactgatctcaggttaacagtttagagcagcaagcagaagtgctgtcaagacctgcaggagccattcttccttcagttaacctacactaaaatagatagatatagatgactacatttttcctctttgctgtacacaatttggtttgctattcttttctatagtatatcattgtataggaaacttgccatctgcatttcatttatatattttcgatggctctgtatatgccgtttgtatagcggaagaaaaggaacttgtatatagaatgagcttgtattgtgggagaaagtagctatatgtgtacatcgaggaaacttacattataagatcagatcatatgttttgc

SEQ ID NO: 16654 - DNA, 3168 bp, Oryza sativa
  ref <308>: DATABASE ACCESSION NUMBER: AK067130
  ref <309>: DATABASE ENTRY DATE: 2001-12-06
ggtcgagtacgggagcttgttcacacgcctcctcccctacgacgccggcgatgggtaagcggaagcagcgcggcggcggcggcggtggcgggggagcagccacggaaggcggcgcggccaccggcggcggcgccggaggccacagcccctccaccgtgttcgtctccaacctgccgtacaccttcaagtcctccgatctcgaggcggtgttcagcgaggtcgggccggtgaggcgatgcttcatggtcgcgccgaaagggtcagagacgagcagaggctttgggttcgtgcaatttgcaactgttcaagatgctgagcgatctattcagcaaaaggatggattctctgttgctggtagaaaaattagagttaagctagcaacgcatcgtgctccactgaaggaacgtttacagaagaaggagaatgccgtgcaagccaaggatgccgatgcaacaaatgaagccaaggatgctgatgcaacaaatgaagccaaggatgccaatgcaacaaatgaagcatatgctacttctactgcaaaacacaaggagacatctcataaaacagatacagaaccactacagttgttgaaaaaggaaactacactatcaaaggaagtcagcatttccaatactgctaaggtgaaaagctcagaaaagcaaagggttgcaaaaactgtgatattcggtggtcttcgagactttgctatggcgagtgaagtatttcgtctagctggagagattggcacagttgtatctgttagctatccacttccaaaagaggaaatggagctccatgggcttgaacgagatggatgcacaacagatgcagcagctgtactttttgccagtgtcaaatcagcttgggattcggttgttcacttgcatcgtaaggaggtcaagggagcagttgtttgggctcgtcagcttggtggagagggctcaaagatcaggaaatggagagtgatagtccggaatctaccatttaagattacagtaaaggagatcatggatatattcagtttagcaggatttatatgggatgtgtccattccacagaagtctgatgacggggcatcaaaaggctttgcttttgtgtctttcacacgtaaacaagatgcagaaaatgctataaaaaatgttaatggaaaagtagttgcaaagagaactgtagctgttgattgggctgttccaaagaaagtatacactgttgctgcaaaatccagcactaaggatgatgagctggcaaatgtatcagacagaggcagtgacgaggagtctgaagataatcttgttggagaagatgatagctatgaacttgagcaggagacttccaattgtcctgctgatgatttcaaaactgaaatggatatttcaagaaaggttcttgaaaatttgatcaagtcatctgagagggctgaaccatctggcaatgagggttctgatattgatacagacacagaaacagaacaagatacatcagaaaagaaacagaagcagacccatttacctacatctgtacctgcagctgacaagttagaaaattctaaacgtgtggcacaggaggaaaacacccttcctgccacaaaattcaagaaacaagacgctgggctggataggacattattcataagcaaccttccttttgatctaagtaatgaggaggtaacagagcgcttctcagcatttgggaaggttgaatctttcttcccagttcttcacaaactcacaaagagacctagaggaactggttttctgaagttctctacaccagaggcagctgatgcagcagtttctgctgccaatgctgctcctggattgggaatttttataaagagcagggctcttaagataatgaaagcactggacaaggagtcagctcacaaaaaggaacttgagaaggcaaagaatgaggtggaggatcgacgtaacctatacttgactaaggaaggtgaaatacttgctgggacgccagctgcagaaggcgtatccgatgctgacatgaataaacgtagttggttagctagaagaaaagcggaaatgctccagtctccaaaatttcatgtgtccaaaacaaggcttatcatctacaacctgccaaagactatgaccattaatgatgtaaagaagctttgtagagaagcagttatttctcgtgctcacaagcaaaatcccgtcatccgaaaggtaaatattctgaaaaatgaaaagaagagcagcagtactgcacagaaacattcccgtggtgtagccttcgtagattttcaagaacatgagcatgctcttgtggctctaagagtcctaaacaataaccctgaaacttttggtgcagaacgtcgtccaattgtggagtttgcacttgagaacgttgagaaagtgagactccagaaaatttggaaggaccgccgtgataagttgcgagaagctgcgcaagataaggcgaggcctctgggagatcagtctgcaactgatggccctgatgcaaataacagaagggctttcaacaaagggaacaagagaaaatcacacgatagatcatctaagttaccctacgctggtgaagggcctgcagaggatctttcggcagctggagatggtggcactgtggaaagtatggttgaagataaaagaaaggatcaaaggcctgcaaaaagagcacgaaagtcaaacaagggaaccaccgcgttggatggagatagacaagatgcaacaccaaccgctgataggaatcgaactctgtcgagtaaacataatccggcagatgccctggcaaagaggaaaaacagaaatgatagtcattcggagcaaaagagaggaagggctcaaagaaagaccaagaaagagctggctggggaaggaagcgtggataaatcgctggtggagcaatatcgttccaaatttttgcaacatggtctgaacaaaaccaaaggataattgagtgtgatcatcgtggggagaacaacatggtgacccggaccagcttgtcaaaaggctaaaatgtttccagagaactttccacaaactttgcagccccaccattggtctgccaaaattttgcttgctacattttggttgttttgtcccactcttgtcgatcttgacccttgatgacagtggctgatggtcgttggagccatctattatgaccatttgaatgggaatgcttatgtct

SEQ ID NO: 16655 - DNA, 2728 bp, Oryza sativa
  ref <308>: DATABASE ACCESSION NUMBER: AK067131
  ref <309>: DATABASE ENTRY DATE: 2001-12-06
gacgttggcgatgccttcgagctgctgcacgacgagccccatggtcggccggtcgccttcctcgtcttgaatgcaccagcccgcgaccttgcagagtctctcaacctccttcgggtcggcatccttggccaccctctcgtcgaccagcccggccacgtcgccttcgtttagcttgaccacggcatgaaccgggaagtaaatcccagggccgccctccgacgacgacgacggcgcggtgctgttccgccggcccgagacgagctcgaagagcaggagcccgaagctgtacacgtcggcttttgcggtgaccggcgtgccggctagccactccggcgcgaggtatcccaccgtgccccgcatggtggtcaggacgctgctgaagtcgcggccgacgagcttggccatgccgaagtccgcgagcctcgccgccatctcctgatcgaggaggatgttctccggcttgacgtcgcagtgtatgatgcactccctgcacttctcgtgcaggtaagccaagccccgtgccacaccaaccgcgacgttgtaccgttggctccaagtcagggtcacctgcttggagtcggggccggagctggagccgctcatgacgaacaggtgcgagtccagcgagccattggccatgtagtcgtacacgagcgccctcttgtttccctcgcagcagaagccacggagtcggacgaggttgacgtgctggatcatgccgagcgtcaccacctccgttctgaattgcttctcgccttgccggagaccgtcgagcttcttgacggccacgggcgtcccgtccggcagcgcgcctttgaacaccgtgccgaagctcccgctcccgagcttctccgagaagtccctcgtcgcggtcttcacggcatggtagtcgagcagcagcagcgacccctgcaccgccgtcaccttgcccctcctacgccgcatccgcaacaccgccgccaccgccaccacggtgacgaggctcgccaagagcagcatcaccgccgcaacgacgcttccaaggattaccatcgatttcttccacgagtgctccgtcgacgacgccggaacctccgagtgggcgacacggaggtgaagcaccgctccggcgaggccaggatcgccttggccgttctcattagccgcgtaggctttcatgttgacgagctcgccgttccacacgaggcacttcgctccgtcgtgaacgtaggccgtgcaggagcagtcgaccaggcaggtgtgcgcgcacgccttgtcgttcccagctccggccggcgcctccacggagccattcgggagccgcacggtgtacggcagcgccaggaacccgtctccgtgacactcgagagggtgccgcctcacgcagcctccggcggcgttctccagcctccactcctccgacgaccgcggctcgaagccggcggggcaccggcactccgggttggtggcgttgctgcagactccaaagggcccgcacgagccgtacacgtcgcacgcgtcgtggggcaacgagcagaagaggatccacttccccgccgtctcgctccactgccgccgccgcatctgcccgttcacgtccagcatgaagttgccgacggcgcccggcagccggtcgcggtagctgaagaagttgacgctggcgttcggcgcgtaggggacgccggtgaagtagccggaccgcatctccggcacgttcgcgaagatctcgccgtcccagaggccggtcgtccagtaccggtgctcgccgccggcgaggaggtcgaacttggccagcccgcgcgcgtcgatcaccatggagaacgcgccgggcgccgggttctcggagtccgtccacgacgtgaggaagctgtggacgccgcggcccctgtcgtagccgagcctggctccggggagccatgtgtcggtcgggtgatcaaagctctgccacgccacgtgcgtcgtcgtagtcgacgacggcgatcgcgaccgcgaccgcgtcgcgttgctgttcaccacgaggttgccgtcgtcctggagcgtggcgacggtggtgcgcgggggcgacggcgaggaagacgcggacgcgttcgacgaccacagcaaggtgttcgacggcgccgtcgagaacagccgcagatcgccgtggacgctcagctcgaggtggcagctcgacggctcaagaatcgggcgctcacggttggcaacccaaacaaccgtcttcttggagatcttcttgtaccagatgccaaggtagtgcttgttggactttcccggcgagaagaggccgagctcgaagttgccgccattggagaccagcgtctggttccacagcagagactggcctagcgtgagggtgtcaatggcggccgtggggagatgtaggttgaagaagagcagcaggaggacgccgacgaggagcatggtggcgagtgccgagtggcaaccacaattcttacttacttagcgaagagtgattaacttgtttgttggcctcctatatagtactcataggtatctgtcatggcattgattgaagggccaagctttgtttggccatcatgaatccacaagttatgtattagccgtcagccggtcatggcatgatgcagcattggcttcttcaacgatgtttacgtgccaatggactacttttttacagtttatttggattttagacgatatacaaaccgcgacttgtatccaatcagtgtgacaataagtttttggtggcagtaagtttcagcgtggc

SEQ ID NO: 16656 - DNA, 1178 bp, Oryza sativa
  ref <308>: DATABASE ACCESSION NUMBER: AK067132
  ref <309>: DATABASE ENTRY DATE: 2001-12-06
gcctgtcctcacactgccccctccatcgcacgcccccgtcactcctccttcgtaccgccttcgcacgggggacgagctcgtcggctggccgcgccgcgcgcgggggagcggctcggctcgagcacgcagaggaggcgggagggcgccggggcatcatctgagaggaggtcgtgaggacgaggcagctcctccgccgcgctgccgccacatcagtcgcgaccccggcagctcctccgccgcactgccgccacctcggtcgtgaaccccggcgcctcatccgccgcgctgctgccacctccgtcgtgaaccccggcgcctactccattgcctcatagcccctctcctcctccaaccctacggctttctcctccgtccggtgcaccgcctcttccatccccatatcctattcctacttcatctctccctaccgctgtcactgctcaaaccctaagatccgaagggagggaagagaacctaagatcggaaggggagggaagagaagagcgcataggcggtggcaacggcaacctcagcaggcatgctgtcgacttccatcatccctgtcatcctccaggatccaaacatatgttgatgaaaccggcatcacaggccaagcccaaggcaacagtggggtttgaacttcgaagacgatttaatccctgtctttggtgaaaacacaaatcatcatgattcaccatggtattaggagacgaacaactacaggggaatatctcatgcttttatggaaccagctaatgtgagagtatcaaggggagtcttggccgaatccgttgctcatggctggtaggagtgaggagtacataggattccacactacgaggtcgggagaggttcctccttgttgatgggaaacggatcgtttgcggttgttcatggtgtaggtacgatcgatctgaagtttacttcgggaaagatcgtgcagctgaagaacgtgcagcatgtcccttcaataaagaagaatctagttagcggctctctactgtgtagagatggttttagacttgtgtttgaatccaataaatgtgtcgtatctaaatatggcacgtttattggaaaaggttatgacagcggaggcttgttccgctttatcttggatgatatgtgtaataaagttgtgaaccatgtaagcgatgatgatgatgagtccaatgtgtggc

SEQ ID NO: 16657 - DNA, 2729 bp, Oryza sativa
  ref <308>: DATABASE ACCESSION NUMBER: AK067133
  ref <309>: DATABASE ENTRY DATE: 2001-12-06
gagcgagaggagagaggagaggggggcgcaggcgcaaaaagcaagctaccaccgcagcccagctcgaggccaccaccaccaccaccaccacggcacggcgaaaggggaagaagaagaggaaaggaaaaaaaaaaaaattccgcagctgctacctctcgccgccttcgccgccgccgccgcgagaaacccagcggcgtcccgggaaaccctagccccatcccccaccccgccgcgcgccctcatggggcgtccgcgtcggcgccagtagtagacaggagcggggggcccgccccgtcgccgacgaggggcatccaacgatggcgcggatacggcgcgcgagctccggacgagggcttttggaagatgctcgaaggaaaaccttcttaaattttttggctgtggtatttactctggaattgattaccagaatcaatttgattgcccaaacatcagctctaaatgtggttgcccctgctatatctccatctcaaagttggagaccagttcgctccatgttgtcaaaagctaaagttgacattagtatttcagtcagcgaacaaagacgaaagaagctatattcatcaccagctactctatctgtgcaccctccaatgtcagcgccaagctatagctccatttctgatgctgcgcctcctgatgcagcctcaaatactagtgcagctccttctggattagtacaacctccagtatctcctcacaatgcatgttgttcacataacatggtacaaaagagagggagccaagattgccattgtgtttacccagtaagagttgagctttttctccgaaatgtttcactgacgtcaaattggagcgatgaatttctgggggaacttgcttctcaactcagtctgagggttactcagtttgagattgtaaatttctatgttgttggggcttctgggctaaacatcacaatgtatatagctccccatacaggaattagtttctcagccgaccaagttaccgcaatgaattattcacttagtcagcatacagttcagatcaaccctgtactagttggtgactacaatcttcttaatttaacctggttcaggccactggttctagctcctgctccaacattcacaatatcacctaaaccctctccatctcaagcatctacagtaccaagacacagtgcggataccagcaatgaaaaacacatgagcttgattactatcatttgcatatttattggtgctctaattgctgtcttggtgattgccatgtttatttgcttctgcaaattaaggaaagggaaaaggaaggttcctccagttgagacacccaagcaaagaacaccagatgcggtttctgcagtggactcacttcctcgcccaacaagtacaaggttccttgcatatgatgaactgaaagaagcaaccaacaactttgatccgtcaagtatgcttggagaaggaggttttggccgtgtctttaaaggggtactaactgatggcactgccgttgctataaagaagcttactagtggagggcaccaaggagataaggaatttctagttgaagtggagatgctagcaggttgcaccaccgaaaccttgtgaaactcattggttactatagtaaccgtgagtcatcacagaacctactgtgctatgagcttgttcctaatggaagcctagaggcttggcttcatggtacattgggagctagccgccccttggactgggacactagaatgaggatagcactagatgctgccaggggattggcataccttcatgaggattctcagccttgcgtaatccacagggatttcaaggcttctaatatattgcttgaggatgactttcatgctaaagtgtctgattttggtttggccaaacaggcaccggaaggttgcacaaattatctctcaacacgtgttatgggaacattcgggtatgtagcaccagagtatgcaatgacaggacacttgcttgtaaaaagcgatgtatatagctatggagttgttctacttgaactacttactgggaggaggcctgtggatatgtcacaaccttctggccaggaaaatctagtgacatgggcacgaccaattttacgagataaagatacgctagaagaactagctgatcccaagcttggtggccagtatccaaaagatgattttgtgcgagtatgcacaattgcagccgcctgtgtttcaccggaggcaagccaaaggccaacaatgggcgaggtggtgcagtcactgaagatggtccaacgctctgagttccaggaatccataccaacacctccagcacgacccaatgttaggcagtcctcaaccacctatgaatctgatggcacttcatccatgttctcttctggacccttttcaggcctcagcccctttgagactgagaacatatcgagaacggctttctctgaagatcttcacgaagggcggtaacagtggtggtttgtgaagctgttttgggtagagcctcagagtctctgaccacccatttgaaggctggtggtgcaagtgacctaaccagttttattgggaggtaaatcctgtaaattccatttttattcaccacctgcgaaagaccaaattgttacaagaacattcggtggctttgtatgatggaaatgattttgttccaagttcttttttgctcctatagctcctgtctcatttactgtatggatcatagacatttaattaggtgatgtggttgtattcttcagtg

SEQ ID NO: 16658 - DNA, 2265 bp, Oryza sativa
  ref <308>: DATABASE ACCESSION NUMBER: AK067134
  ref <309>: DATABASE ENTRY DATE: 2001-12-06
gtcgattcccctctcccctcactttctctctctctctctctctcgacgcgagcagatcagatgtgccgccgccgccgccgccgggcgagccggctggccgccatggagctgagctgcgacgcgcatctgcgattcgggccgccctcctcttcttcgccgaagtaaataatgcaaagatgagaatatgagtctagctagagcggcggccactggcggtggcgagtcgagcagcagctgccatgaagggcgacagggtgcggagggggaaggaggaggcgcttggcgccggcgggggtcagctctgccctgagtgcgggtacgagtaccccaacgccaaccccaaccctaggctccgccgatcccacagcaagaactgccgccgaaagatgaagatgcccgtggtggccgaggaggctggcgtggctgtgcacaagcggcggcgtggcttggccgtggagaacgccagtcggggaggaggaggagacaaggtggtgcacgaaggctcttctgagcaaggatgctcggcgaaagctaaggaaatttcagctgagccaaaactgatggccgatgatccaatgtcatcacatgagaaacatatgatatgccatcgtcactataagctctaccctaccaaggttgcaccacaatgcaatgatttgtcttttggaccatttttgggtcttcgtaggaaggccatgattgtgactaaaggcattaaagtgatgtcaggagaaacacttgattataagccagaaggaggccgaatcatgttcttatttgaggctggagttgtggatgaactgcatgctagtgccatcagagaccctattggtatatatttgaaggacaaaaatgagacaatgtgcattggctccataaccaaggcgcaacccagggcacggctctggttgatgctatcagaagaaatgaagctatttcacaattctgagaggaggtcggtgtacttcaatggatatgagttttatcctatgtataagcgcttgcatccattggagacatacagaaaactatgggttgtggaagtgaaaccatttgaagatgcttcttttaatcctgtagaggatgagaggaaatattatctattgaaggtcttttcaactgcgattcctaaagaagaaattgatgtacatgttcgatctaacaaggaagttaaaaggcttggggttatttcatcttatgacacttcattctcctgtaaattggactttgaagaccagtttactctatcacatacttcacaagaagaggatgtggtattctatggatacacacttcgtcacgtacaatatcctttcttttacctttattatcataatatttgtagttacagatttattcatgaaggcttgggctacaattcaacatagctatggtctgtggaaactcagtgcgattgacccaccatgggtttgagagagcaagaggagggggcaggggtgttagatgtattacatagctagctgtgtatttacagggcgctttctgcacttgtaaacagttccattgtatacctgttggtccattgcaattccaagtccatttgtgcttaacggtaccacgtcaatgaatgctaggctggcacaatattattatttgtttacattgatataatcacactctgtttacttaacttctatatgatgatggaacttcgtttgaatatagaggtacgcaaccttcttttaatatttcatctgctctcttgctctctgtactaaattttctactctgtagagctgcctatctcatgtcccagtcttctttgcacagtcaaaatatcagatgatccagagtatcgtgcgtctaaggcactcactgcaaagagagaaccagagatgacgattgtgccatatgtgccagatacagttacctactgtggcgattctcggtgatggacctatctggtgcaaggcttttttgatgtgaaatatttctggagctgtcaacgagacctgagacccacgtgtaattttccaatgagaacaaaatgctttgtcacccgaagcctaatgtaggagtataaattaaccactgtgcgctttgtgctcatgtatgtttataaacgttctgactcctgtctcacgcgttcagattccctgcaaggtttcgcggttctgttgctgcgcgaactgttcataacttttattgtatgatcagtcttttctccgtgttgttaatggctggatgccgggacacttgttatatatggcttcacaacggacgaacgagcgattatcaaacttg

SEQ ID NO: 16659 - DNA, 2977 bp, Oryza sativa
  ref <308>: DATABASE ACCESSION NUMBER: AK067135
  ref <309>: DATABASE ENTRY DATE: 2001-12-06
gatcccgaaaccccatcgcctccgctcccctccgcgccatcgtcgtaggctagtagctctccctggtcggcggcgatggacgccaccggccgcggggttttccccaacaagcccgccctccctgccggccccaagaagcgcccccctccgcacacggtgctcctgccggccacgccgccgccgccgccgtcgcgctcctcgctcccgctcgactcgcttctcctccacctcaccgcggccccgccgccgccgcagccgccggccacgcgccggccgcatcccaccccgaccccgccgcactccttcctctcccccgccgcgcagtccctcgtggccgctatctcctcgcagccgctcccctcgctcccggctttcctctcctcccgccgtgacgagctgctgcgctctgacctcccctccctcctcaaggcgctcgagctctctggccactgggagtgggctctcgcgctcctccgctgggccagcgacgagggcgccgccgatgccgcggcgctcgagatggtcgtccgcgcgctcggccgcgagggccagcacgacgtcgtctgcgacctgctcgacgaaatgccgctcccgcccggatcacgcctggacgtccgcgcctacaccacggtgcttcacgcgctctcccgcgcgggccggtacgagcgcgcgctccagctgttcgccgagctccggcgccagggggtggtgcccacgatcgtcacctacaacgtcgtgctcgacgtgtacggccggatggggcgctcgtggccgcgtatcgtcgctctactggaggagatgcgtgccgccggcgtcgagcccgacgacttcactgccagcacagtgatcgcggcatgcggccgtgatggcctccttgatcaggcggtcgccttctttgaggacctcaaggcccgtggccacgtcccgtgcgttgtcacatacaatgcactcctgcaagtgtttggcaaggccgggaactacactgaggcgctgcgggtgctcaaggaaatggaggatagtggctgccagccggatgccgtcacatacaatgagctcgccgggacatatgccagggctgggttctttgaggaggctgccaagtgccttgacacaatgaccagcaagggattattgcctaacacattcacgtacaatactgtcatgacggcatacgcgaatgtcggtagggtggatgaagcactagctctgtttgatcgaatgaagaagaatgggtatgttccgaatgtgaacacctacaatcttatctttggtatgctggggaagaaatcaaggttcaccgcgatgctggagatgcttgaggagatgtcaaggagtggatgcacaccgaatcgggtcacctggaacacgatgttggccgtctgtgggaagcggggtatggaggactatgtcaccagggtactcaacgggatgaaatcttgtggggttgagctgagccgagatacctacaacacactgatatctgcctatggtcgatgtggttcgaggacctatgcttttaagatgtatgatgaaatgatcagttctggcttcaccccttgcctcaccacatacaatgctttgctgaatgtgctgtcaagacaaggtgattggtccactgctcagtccatagtaagcaaaatgctgaagaatggtttcaagccgaatgatcagtcatattcactactgctccagtgctatgcaaagggtggcaatgcagctgggatagagtctatcgagaaagaagtttatgtcggtacaatttttcctagttgggttatcttgcggacacttgtgatcgcaaacttcaagtgccgtagattagaaggggttgagaaggcatttcaagaggtaaaggcacagggttacaagcctgatcttgtcatattcaactccatgcttgcaatgtatgcaaagaatggattatatagcaaggccacagagatgttcgattcaataaagcagagtgggctgagccctgatctaatcacttacaacagcttaatggacatgtatgccaagtccaatgagtcttgggaagctgagaaaatacttaaacagctcaaaagttctcaggtgaagcctgacgttgtgtcatataacaccgtcataaacggattctgcaagcaaggtctgatcaaagaagctcagaggatcctatctgagatgattgctgatggcatggctccatgtgttgtaacctatcacacactagttggaggatacgccagcctggagatgtttaatgaggcaagagaggttgtcaactacatgattcaccacaacttgaagcctatggagctgacatacaggagagtagtcgacagttactgcaaagcccaagcggtatgatgaggcccgtgagttcctgtctgaaatttcagatactgaccaaaattttgatcagaagttgcagcacatgcttgaagcccgtataaaggatgctcaatttggaagataagctactatcccaacgtgtatcatcttatgtcatttttatctttgtgtgctcttcaaggatatggagtttccaagttttgatagggaagtcagtgtagtattacttgtgaagagcctgcatttgccatgggtggcacgctactgcaccaaatggtgccgcacaacgtcaaattaaatggattttcctctcatcttcaacaggtgtacagtgtacttctgaagtcacattcgcggtgcctaagtacagaatctggtagattgtccgattgttttgaagagtcaagattgatttgatctagtgcaacttaatcggttagcagcattatcaatttcttatggactggattgtccatgtgtttttcgattttcaggtcacttgtttatgcttgaatggtttctatagggctaacctgtttataaaaaaaaaatgtagaataccatgttttttttgacgcaatagaataccgtgttagacttttgaactatccattgataatgataataaagtctatattggagt

SEQ ID NO: 16660 - DNA, 1411 bp, Oryza sativa
  ref <308>: DATABASE ACCESSION NUMBER: AK067136
  ref <309>: DATABASE ENTRY DATE: 2001-12-06
gtacccgagagggcctcgccgccattgccgcctcgctcctcgtctcgcgggaacgccgccgccgccgccgccgccattagggcttagggctcaggaggctcgcggcgatgtggtggagggccgcgagggctcgccggcggatcgccggggcgcgggcggcgtccacgtcggcggcggcggcgggggagaagagctgccgcgccgtggtggtgcctcggttcggagggccggaggtgctggaggtgaggcagggggtgccggtgcccgatctgaagccgggggatgtgctcgtgcgcgcgcgggccgtctccatcaaccctctggacctgcgaatgcggtctggttatgggcgttcaatatttgagccagtcctacctctgatcattggccgggatataagtggtgaagttgcagctacagggacttctgtgtcgtcctttactattgggcaagaagtgtttggtgctttgcatccaacagccataagagggacatacaccgattatgcaattctttcacaggatgagcttacttccaaaccatctacactcagtcatgtggaggctagcgctataccatttgctgctttgactgcatggcgtgctttacatggtacggctcgaatttctgaaggacaaagagtacttgtgattggtggaggtggggctgttgggctagctgctgttcagcttgcagtagctgcagggtgtagcgtttctgcaacctgtggaactaaaagtattgaacaagtgttggccgctggtgctgaaaaagctatcgattacactgctgaggatactgaatcagcagttaaaggaaagttcgatgccgtgttggataccataggagtacctgaaactgagagaattggcattaatgttctgaggagaggcggacactatatgacccttcagggagaggcggctgccctagcagatagatatggattagctgtgggacttcctgctgctactgctgttttactaaagaaacaaatgcattaccgttattctcatggaatagattattggtggacatacatgagagctgactctgaaggacttcatgagatacagaggctgtctggagctgggaaattgcagataccggtggagaagacatttcccatcagcaaagtaagagaagctcacgaggccaaggagaaaaggctggtgcctggcaaggtggttttagaatttgactagttttagtaagattcttctcttgtaggaacagaagaaccgcacctgtctgtaaatcgtaagaactttctcctttttctttacctctattttggaaatatgtatcggtttgttggcctgacaaaatttggtcgtcctgtcaagatgcatttgtcatacatggaaatgcagtaagcaataacgtgaggcccgaaagaaattttcatttc

SEQ ID NO: 16661 - DNA, 2394 bp, Oryza sativa
  ref <308>: DATABASE ACCESSION NUMBER: AK067137
  ref <309>: DATABASE ENTRY DATE: 2001-12-06
gtagcgataggcaaatcacatccatccatccattgccattgccacccatggcgccactccccgccgccgccgccgcgccggccttcctcttcctctcccctcccggcaaactgcccggcggcaaacccaggctgaaaccctcctgtgccgcctccacctcgtcttcgtcgtcgtcgtccgccccgctcctccgcgccatccgcgccctccccgacgctgccgacctcgcccccaccctccacgacttcttccccccggcctcgccgccctccacctccgacgcgctcctcctcctcaactacctccacccctcctggcgcaagtccctctccctcctctgctggctccgcgccctccccgatggcgccttcccacttgacaccatcgtcttcaatgtcgccctcaagtccctccgcgccgcccgccagtggccccaggccgagcgcctcgccctcgacatgctcgcctccggtgtccccctcgacaacatcacctactccaccctcatcaccgccgcccgccgctgccgccagttcgacaaggccgtcgagtggttcgagcgcatgtacgcctccgacggcgtcctccccgacgaggtcacctactcagccatcctcgacgtctacgcgcagctcggcatgaaggaggaggtcctcgcgctcttcgaccgcgcgcgcggcagcggctggaagcccgaccatgtcgctttcgccgtcctcgccaagatgttcggcgaggccggcgactacgacggcatccagttcgtcttcaaggagatgcgcgaggtaggcatcaagcccaacatcttcgtctacaacgcgctgctggaggcgctgggcaagaccggcaagccaggcctggcacgcaacctgttcgaggaaatgacggccgagggcgtcgagcccaacgcgcgcacgctcacggcgctcgcaaagatctacgggagggcgcgctgggggcgcgacgcgctgcagctctgggagcagatgcgggagaagaagctgcccgccgacaacatcctctgcaacacgcttctgagcatgtgtgccgacgtggggctggtgggcgaggccgagcagctcttcagcgagatgaaggacccggacctgggcgacgtgccgaagccagacaagtggagctacacggccatgatcaacatctatgggagcagcggggatgcggaccgcgcactccagctgtttgcggaaatggtggagagcggaatcgagcccaacatcatgagctataccattgtgatccagtgcctgggaaaggcagggaggatacaggaggcggtggacgtgctagaggctgggatggccaagggcctcaagcccgatgaccgactctgcgggtgcctgctctccgtggtcgcgctgagcagcggggacgagacggaggtgattctggcttgcctggagaaggtgaggagtaatctggtgaagctgatcaggatgctcggggatgcccgggtgggagtggaggacctgagggtggagctgaagggcatactgaacagcgcggcccctgaggtgcggcggccctactgcaactgcctgatcgacatatgccgcaaccatgggtaccctagtgagagggcagtggagctgttccgcctcgcccggcactatggcctgtactcgaagatccatacgaggaaggaggaggagtggtcgctggacctgcggtcgctgtcggtaggcgcggccaagacggcgttcgacgactggatgaagaccatccgggaacacgaggaggaggaggctctgccacagacgtttagcgtgtacaccggctccagcacccacaaattcgcgcaggggctggcgaccgcggtggcctctcatcttgagcaggtgggggcgccgttccgtgccagcgactcccagcttgggagcttcatcagcagcagggatgatctgctctcctggttgcacaccaccatgtcatcgccggatgttgccgtatgatcgccggttggttgcatcatgcagtcttgcagacaggacaggagggacgacggccgtgccgtcacattaaaatgctcgtcattgtttggttttggttggctgcaaattaaaatgctcccaaagaataggattgcgaggaggatggatggatggtgctgtacatgcgcaaacactccggataattgtcatttctctgccttttttatactagtccagtttgtaggaagctggacaagtgataagcagataagctagtactagtgtggttttctcacctcttttatttatactcctactagattactcacagttgttagggatgaggtgagggcactctgaagatgagagagagctcacagtttatggtttttgtacgacgaaattattattacatatctgggtctgggtgccagccgcccgcttc

SEQ ID NO: 16662 - DNA, 2548 bp, Oryza sativa
  ref <308>: DATABASE ACCESSION NUMBER: AK067138
  ref <309>: DATABASE ENTRY DATE: 2001-12-06
gacggtgtagtgtaccacggtcgcgtcgacgtgccggagttcatcgccggacatggcgaccgccgtcgtacccgggatttgccacgcggtggcgttgatgtggcttcttctcgtgttgttttgctgggcgccggggttgacgtcggcggccgatacggcggcgtacattgtgcacatggacaagtcggccatgccgagggcgttcgccagccaggcgagctggtacgagtccaccctcgccgcggcggcgcccggggccgacatgttctacgtgtacgacaacgccatgcacggcttcgcggcgcgggtgaccgcggacgagctggagaagctgagggggtccaggggcttcgtgtcgtgctaccccgacgacgcgagggcggtgaggcgtgacacgacgcacacgccggagttcctcggcgtcagcgcgtcgtcgggcgtgctgtgggaggcgtcggagtacggcgaggacgtcatcgtcggcgtggtggacacgggcgtgtggcccgagagcgcgagcttccgcgacgacgggctcccgccggtgccggcacggtggaagggctactgcgagtccggcacggcgttcgacgccgggaaggtgtgcaaccggaagctcgtcggcgcgcgcaagttcaacaaggggctcgtcgcggcgaccaacctgaccatcgccgtcaactccccgcgcgacaccgacgggcacggcacgcacacgtcgtccacggccgcgggctcgcccgtggcgggcgcgtcgttcttcggctacgcgcccggcaccgcgcgcggcatggcgccccgcgccagggtggccatgtacaaggccctgtgggacgaaggcacgtacccgtccgacatactcgccgccatagaccaggccatcgccgacggcgtcgacgtcctctccctctcccttggcctgaacgacgtcccgttctaccgagaccccatcgccatcggcgccttcgcggcgatgcagcgcggcgtgttcgtgtcaacctcggccggtaacgacggccccgaccccggcttcctccacaacggcacgccgtggacgctcaccgtcgcgtcgggcacgggcgaccgggagttcgccggcatcgtcaggctcggcgacggcacgaccgtcattggccagtcaatgtacccaggcagcccgagcaccatcgcgagctccgggttcgtcttcctcggcgcgtgcgacaacgacacggcgctcgcgagaaaccgcgacaaggtcgtgctctgcgacgccacggactccctcagcgccgccattttcgcggtgcaggtcgccaaggcgcgcgccgggctgttcctctccaacgactcgttcagggagctctccgagcacttcaccttccccggcgtgatactgagcccgcaggatgcccccgcgctgctgcagtacatcaagaggagccgcgcgcccagggcgtcgatcaagttcggggtgaccatcctgggcaccaagccggcgccggtggtggcgacgtactcgtcgcgcggcccgtcggcgagctgcccgacggtgctcaaacccgacgtgctcgcgccgggctctctcatcctcgcctcgtggccggagaacgtcagcgtctccaccgttgggagccagcacctgtacagccgcttcaacgtcatctccggcacgtccatgtcgtgcccgcacgcgtccggggtggcggcgctgatcaaggccgtgcacccggagtggagccccgccgcggtgcggtcggcgatgatgacgacggcgagcgcggtggacaacaccaacgcgcccatcaaggacatggggcgggccaaccgcggcgcgacgccgctggcgatgggctcgggacacatcgaccccaaccgcgccgtggacccgggcctcgtctacgacgccggggccgacgactacgtcaagctcatgtgcgccatgaactacacggcggcgcagatcaagaccgtggcgcagtcgccgtcctccgccgtggactgcgccggcgcgaccctggacctcaactacccgtcgttcatcgcgttcttcgaccccggcgccaccgccccggccgcgaggacgttcaccagggcggtgaccaacgtcggcgacgcgccggcgagctacagcgccaaggtgaagggcctgggcgggctgacggtgagcgtctcgccggagaggctggtcttcggccgcaagcacgagacgcagaagtacacggtggtgatccgcgggcagatgaagaacaagaccgacgaggtgctccatgggtcgctgacgtgggtcgacgacgccggcaagtacacggtgaggagcccgattgtggcgacgacggcgagctcggctccgctataggacacctgcacagtgactagattacgctctcattctcataagtcatttccgttcgacttaaaaggaaaacaagaacaaataaaagcaactaatacttgtgtgtcagcagcagagcatacgataaaacggttttagatgttgtaacttttgaaatgattttttcaaaaggaaaacttgaaatgataatattggaggttagctagattcttc

SEQ ID NO: 16663 - DNA, 885 bp, Oryza sativa
  ref <308>: DATABASE ACCESSION NUMBER: AK067139
  ref <309>: DATABASE ENTRY DATE: 2001-12-06
gacttccattctcttcacaccatcacatgtagtgcgtgtactcctagagcttagctagagctagcttcctctcgttgatagcttgatacatctctctcgattcgtagagagtttggttggttgatagctagctcgacggcgcggccatggcggcggcgtctcatgcgccgaggtcggtggtggtgagttcgtcgtcgcctgcggcggcgattgccacggccggctgcgtggtggacacgaacacgacgttcgtgcaggccgacccggcgacgttccgggcgctcgtgcagaagctgacgggcgcgccggggagcggcggcagcaagccggcgccggcggcgccggtgatgaggaggccgaagctgcaggagaggcgacgcgcggcgccggcgaggctggagctcgcgcggccgcagccgctgtactacagccaccaccaccacaggctgatgcactcgccggtgtcgcccatggactacgcctacgtgatggcctcctcctcctcgtcgtcgtcgtcctcgctgccgtcgtcgtcgtcctcgctgtcgccgtcgccgccggcgtcgtcgtcgtcgtgcggggtggtggtgataaccaaggaggaggaggagagggaggagaaggccatcgcctccaaggggttctacctgcactcgtcgccgaggagcggcggcgccggcgacggcgagaggcccaagctgctgccgctgttccccgtccactcccccaggagctcctcctttgccagatcttaatttattaattaatcagccttaattatcttgttaatcccggcgatgccatgcttaattaatcctttgtagcaccaagctatctatctgtattaatcaattagatgatcaatatatcaatccatgcaacatc

SEQ ID NO: 16664 - DNA, 2793 bp, Oryza sativa
  ref <308>: DATABASE ACCESSION NUMBER: AK067140
  ref <309>: DATABASE ENTRY DATE: 2001-12-06
gcacctttcccccctctctctctcccacgcactctcgccttctccacacaaagctcgcaaatggcgatctccacctggagcacgcgcctcctcctctccccctccgcctccgcctcgagccatagacctaaccctacccgccgcctcgccttcccctcccccatctccggccccggccgccaggctccccgcgcctacatctccgcgccggcgtccggccccgacgcctacccgtccccggccctcgacgccgcggcggcggcggcggacgtcgccgcggccatcgcctcctcggacgccgtcacgtgggcgggggtctgggccctcctgtcgccgcacagggcccgcatcgcggtctccctcgcggcgctcctcgcgtgcaccacctgcaccctctccatgccgctcttctcagggaggttcttcgagacgctgataggaaggggctccgaacccctgtggaggctgctgtccaaaatcgccgtgctgtatacgctggagcccatatttacaatcgtattcgtgatcaacatgaccgtgatctgggagaaggtgatggcgaggctccggagccaaatatttcgcaggattctaatccagaagatggtattctttgatcgtcacaaggttggcgagttgactggtttgttgacatctgatttgggtactttgaagagtgtcgtaagtgacaacatatcaagggatcgtgggctaagggcactctctgagatcaccggtacactttgtatacttttcacattatccactgagctagctcctgtactaggactcctaatggtctctgtctccgtgctagttgctcttttcaagaggtcaactgttcccacatttaaatcttatggaattgtccaagcacgtatatcagacactgcatcagaaacattttcagctattcgtactgttaggtcatttgggggtgaagaacgacaaatttctatgtttgacaatttggcacttgctttccagaatagtggcacaaaactaggcgtgctgaaatctgccaacgagtcattgactcgggtggtagtctatgtttccctaatggcactttatgttcttggtggaagcaaggttaatgcgggaaaattgtctgttggaaccatggcatcttttattggttacacattcacactgacattcgctgttcaaggagctgttaatactcttggtgatctacgtgggacatttgcttctgtagaaagaataaattctattctatcagcagaggacattgatgattcacttgcatatggtttagccaaagaactagaagattcaaatggtgcagtgcacgaaaatggcactgctaacaaacattacatgtcagcactaaaatcatcaagcagctgtagtaatcttgcctggtctggtgacattcacctagaaggtgtccacttttcttacccactgagatctgatgtggagatcttaaatgggcttgatcttacaattgagtgtggaaaaattacagcacttgttggacctagtggtgctggaaaaagcacagtggtgcaacttcttgcacggtactatgagccaactcatggtcgcatcactgtggctggggaagacatccgtgtatttgataaaagagaatggtctcgagttgtatccttagtgaatcaggaccctgtcctattctcagtttctgtcggagaaaacatcgcttatggtcttccggatgatgttgtttccaaggatgagataataaaggccgctaaagctgccaatgctcatgaattcattgtctctcttccacagggctatgacacacttgttggtgaacgtggcagcctcctaagtgggggacagagacagagaattgctattgctcgtgctcttctgaaaaactctcctattctaatacttgatgaggctaccagtgcacttgatacgaccagtgaacggcttgtacaggaagctctcaatcacttgatgaagggaaggacttctctggtgatcgcgcacagattgagcaccgtgcaaaatgcgcatcaaatcgctgtctgctcagatggcaagatagcagaacttgggactcatgctgaactggttgctagcggtggccgatatgcgtcacttgttggtacacagaggctcgcatttgagtaagcaacttcagaaaatttctgtttcccgaaagacgttgccgacgagctctctcgaccatattttacatcatctgacataatatacggtgataggtttacgaaacacatgtacatgaattacgaaaaccacatgtatcaaagtttacactcaaaacaccgaaggtctcaataggctgtgctcacaaaatcaatgttgtgttctggaaccgcagtttcccctattgtcctgggatggccagcaatattttgtttacgttgtatttacctgatctgttacagaagatccaaaagaaataacacctcttttccttttggaaaggaataaccgttatttccgtcggatttcccgtgaagttatcatgagtacagaggttagataataatgcaagaccaataatacaattgctggtgaactatgatgatgttcagattcattgtagtagaatatatcgtcacattcggtacgagattggtttatttactgacggagggagtggtcatttgagttgttctgtgtagtaaagaatagactacattatgtaactgttgtattgtcactatacttccctttgaccacctccgtgtcaagcaagcagtatcatggccatacccaaaggaaacgatgtaacagttctattgtctcattgtcagacttgcttcc

SEQ ID NO: 16665 - DNA, 1130 bp, Oryza sativa
  ref <308>: DATABASE ACCESSION NUMBER: AK067141
  ref <309>: DATABASE ENTRY DATE: 2001-12-06
gatccatccatccatgtcgtgttgttagcttcgttttcttcttgtttcatcaatccaaggagtgtggaaggccacacgccaagattatatctatgctaatttgattagcagtaggattaattcagtggctagcgtagcttgattagttggtttaattagttggagagtaaagaagatgttgggagtgttcagcggcgacgtggtggaggtgccggcggagctggtggccgccggcagccggacgccgtcgccgaagacgcgggcgtcggagctggtcagccgcttcctcggcggcgccgagccggccgtgtccgtgcagctcggcgacctcggccacctcgcctactcccatgccaaccaagccctcctccgcccaaggtcatttgcagcaaaagatgacatcttctgcctgttcgagggagtcctggacaatcttggcaacctgaaccagcagtatggtctgtccaagggtgccaatgaggtgctccttgtgatcgaggcgtacaagacgctgagagacagagcaccttaccctgctagcttcatgctctcgcagctcgccggcagctacgcctttgtgctcttcgacaagtccacctccaccctccttgtggcctctgatccggagggaaaggtgtctctgtattgggggattactgctgatggatctgttgccttctctgacaacatcgacctgcttaaaggatcgtgtggcaagtctcttgcacctttcccacaaggctgcttctattccaatgctcttggagttggaggcttgaagtgctatgagaacccaaagcacaaggtgaccgcagttcctgccaaagaagaagaaatttgcggtgcaaccttcaaggtggaaggatctacaatcctcacagcgctgcattaggagatttttggatctccagctgttgttgggaaaggaaaactctgtagtctgtaaatggtggtgtaacatagtcgcaaggcatgcatctgatctgtatcatcatcttccgtaaagactagtgctgccagcatggttagcacttttcagtgtttgggtgtgtgtatgatctgtatcctatgctgttcaggcggaaatgaacttcaggcccagctgtgtcagttgaatgtagttgtgttgc

SEQ ID NO: 16666 - DNA, 1802 bp, Oryza sativa
  ref <308>: DATABASE ACCESSION NUMBER: AK067142
  ref <309>: DATABASE ENTRY DATE: 2001-12-06
gagccagccaagccacctaattaacctaactgttctcgtccatatctaacgacggccgcctcctcttccccctcgcccagcgccgccccagcgaaagcaaaatcccctccacgaaccgcgcgaagaaagtatttctcgctcaccggaatccgccgtgaaccgtgagcagttgatgggtttcaggggaaccgccggcgcagcaccctcgtcctcccgcacgtccgatctgcccccttccacgccgtggttccgggagctgtggggggtcaacgccgacaaatagtagcagccgccgtcgccgaaggacagcattggtggatttctcgatttgctgattgaatcaattaaagcaaagggaggggcgtcccttcagcaagagttgggggcttatttatttcagtctgataataagacttctttaagaagactgtgccgactgtaaatatgtataggcagaagatacccaattctgggtgggctgcttttgatcgcaggtggcgcagcaaagatggaagaggggatgacaccgatgtcaattcatttccagctctctcagattatatagcccccagtgctgctagtagctcagttgcggaaaacagtaggccaaaagcaaagccttttgcatcagtgcttcgtccttctgttgattgtgcagctgatggtaatgaaaacggaaataagcatttcacttgtcacagggagaatgcaaactatggtctaaaatctgcatctgaaaataaaattgagctgctgaggggtgctcatagttgggccgacagtaatttaattgaggatgtactggcctctgtgaacaatgatgttggtgaagcatctgctttgttgaaagctatggcgtctccttgttttccaataagggaggatggactacctgatcagctttcttctgagattaataaaacacatggtttaccatcaggaaatggtacagcagaaaataatcttgtaaatgactcgcagttgttgcctctgccaatgaatatgtcgtctgtacccatagaaccggaagtggaagagctcgatgacgattactttaaccacaggaaagatgcattgaagattatgagggctgccacgaagcattctcaggctgcgagtaatgctttcttgagaggtgaccatgctgctgccaaggaactttccctcagagctcaagaagagcgatccgctgctgaagagctgaacaagaaggcagcaaaagaaatatttcgcctcaggaacagcaataatagcatttggaagctagacatgcatggtctacatgcatcagaggctgtggaagtactggaacggcatcttcacaggatagaattccagccaccagggaataatgcagcttcatctgatgaagtagctaggtctgaacccagagtgtctggtccaagcattgagcccggcccagggaaggtggtgtttgttcgtcccatacaggctatcttagaggtgatcacagggattggcaagcacagcaaagggcaggcctcactacctgttgcagtcaggggcttcctcattgaaaatgggtaccgatttgatgagctgcggcctggtgtgttctctgttcgtcctaaattccgtcgccagtgaacctgtggaagtgtgtactgtaccgccaaatggagcattacgctttgtggcatgtcatagtttatttactttgaaattgaatgtaacatgcaatagtttatttacgttgaaattgaatgtaaccatttgtaaaatgctcaagttgtttatctaaaacagaaagccaattcaattctgtaaccatacgaatcggc

SEQ ID NO: 16667 - DNA, 866 bp, Oryza sativa
  ref <308>: DATABASE ACCESSION NUMBER: AK067143
  ref <309>: DATABASE ENTRY DATE: 2001-12-06
ggtgcatctcgctacctaacctagctaacctcctctcttcttcttcttcttcttcttcttcttcttcttcttcttcttcttcttcttcttcttcttctaggctagcactgcacgtgcccaactaacacatacattcatcatatatacacctcctcctccttcttcctctgagttgtgtgtgcatatataatctactagtagagagcagggctaggctagcaattgcaatggcgcctccctatgaaaccagcgccgccggctctgaatcgccggtgccggtggtaacggtggatgtggcggcggcgagcgaccttatcacctcggccggccaccgttacgtcgacgtcaggacagaggaggaaatgaacaagggccatctacacaactccctcaacgtgcccttcatgttcgtcacgccgcaagggagggaaaagaatcctctgtttgtggagcagttctcgtcgctagtgagcaaagaggagcatgtggttgtggggtgccaaagcgggaagaggtcggagctagcatgcgttgatctccttgaagcagggttcaagaacgtgaagaacatgggaggaggctacgcagcgtggctcgacaatggattccccataaacactcctcctcatacaatgtattaacgctttgcagcaccgatgagatgagcgagtgataaacacggactctactgtatctactgtatctcattccaacccctcttctcatctgcctgctagccgctgcttcgtgtgccctgccatgtatatgtatgtgcgtcctgttttcctgtttgttactactggtattatggaggcagccaattgaataaaattgatcatcatgcatgcaatgcacgatgcgtctcc

SEQ ID NO: 16668 - DNA, 3593 bp, Oryza sativa
  ref <308>: DATABASE ACCESSION NUMBER: AK067144
  ref <309>: DATABASE ENTRY DATE: 2001-12-06
gctcgtcgttgctccgcggaaacggaattccctcgatcacctctacgttcgccacaagaaagcccccaacaaattcgcgctggatttcggccccattcttatcccgatgaactcgggaacccttatttcccaccgccgaaaccccaaatccgcatggatctcttcctcctccgcctatataaatgatgcccgggtctcctcttcggtttcccctcctgtccccgagccgccgtggcctagccacctcttcccgcgagtttcctctctgtccgccaccgccgccaactccggccgcgtcgcgccgcctctctggtcgacgccgccttgcgccgttgcctccttcggctccacaagggcgagggctacctcggccgccggttcgcttgtaccgaagaccgcaggaagctgctcgctgatgcgaacccgagcgcctctgcctcccatcgacctccagccgtgacccaccgttgttccccccatcgccatcctcggcatcgccagcgccgaggagaagcccgtctacccctccgttgccgccgcccgtcgtcgccagaaagccgccgacccgagctcgcagccggccgtctccgttcaccgtctgtcgtcttgtaagtactggtttagttttctgtcgttttggaggaccgttcgttcgttggataagctcctgaagatggattgaagatgtttgattgcaagttggagaaaaaggatccataaggagaagatctttggcttatatcccaattgagctacctgtgggagtggagctgaagctttgctagattttcttttccgctgcagttttcttcgtggtgaggactaagtgtctcttatgtaagtttttccgctgcagttttcttcgtggtgatgactaagtgtctcttatgtaagtatttaagcgctttagttattatgatgaatctgcattttaaattgtcagtttgtgtactttggctgatttctggacgagggtttaatgcacaaattagttcggaaattacttgtgaattttcgggcgtgacaatggcgatggcagagggtagctcgtgctcgtgttgcttgatgatgtgcgcggtcgtgatgtggcggcggtctgtgaagaggaagctggacgagaagggggtgagggaagggaagggatagaagggggcggtgatgctggtgcggttggaggcagaggaggaggcggtggcgctgcggggcggtggtgctgcatgggtggaagcattgcaagattgttgcatcacctgacgatcaggagcttctagcaccgctcaagcccacaccacatcagcgtccagtggccgcccccgtgccacggcatcccactagccgatggcaacgaagccgatgagcgagcagggggcggaagccagagcgaactcaggccgacgcaagggcgagcagggggtcgacggccggcagaagagcgagcacaggctagcacaaggggcgagcaggtaggcggcaagcgattgacgggtgcggcgagcagggaggcggcggccggtcgacaaacgagcacaggttggctcacgcagcgagtaggtggcggcgaggataggacagctagattcggcgcacaagtttgcatcgacatcgatttcccctccccaacgcctcccaaaactgagcgcacaggagagagctggaattgtaggacaatgcacagaaaggaggcaattaaaactgtgtatcgtgaagttggtggtgaatgtaaagatggatcaactattggtattgacatgaattcccataacacatcagttaaggagtgcttgagcaaaacagaggttgtgactaccgactcctgcccagaccgtgtaatcatcccagaccctacacctaagagggtgaattctgtcttctacgacattttgccgaaactgatgcccatcctgcaaaaggataatgtccaagattttctccgcttcttccataggaatatggatgtcatgggtcgggacttagtcaccccagaaacctttttttacataatcatggtgaattctgtgcgatgtgccaaagttgtcttggagggccaagcacctgagctggaggggctccgtgcctatcccaactgtgttacctaatatgggttcttccctcttaccaagctgctgagatattttctgttgacatgatcaagttgctcattcggcatggcgcacttgtaaatttacgcacaattggtggtaaagtaattgaaggactactcccactccatgttgcagttgagaacacttgaatgcataagtatcttgatgacaatctatttcctgacgagttgaatccagactacagtaaggcagataccaatgatatctacaagcttatccatcttctgtgcctaccagaaatgaagatcttcatggatacgactaggctgcttgcaaagcacacaaatgatctggttggtgagatttgcaattacataaaacatgggaaacttctgcagactgcagttttgctcctggcagctcaagagcatatccggggtagcaaaagaaatggtaatagtaaggaagatggatttggtgatattattaaatatatctccgagcacaccagttccattaaactggatgttggtataaagaattaggcacagctgaaggaaaaatatatttcatcaacattatggcttgttcaagcaatttccagggctggtaaagctcttggtcaatgcattcaaaggcattcaaagtcccctcaggtgccccacaaggaggtccttgaacacgtgtcatcgattctcaagttttataatttttgtcctactggagaaggcatcagcattgaaagcctaaacctctcccgctacgactgccccttgcccagtggactcatacttgacgaatttgggactactgtagctactcatctgcatgctggaaaggaaaaggctttggtaaagagactggatctccaatacaaaaggagaagtttcttcccatattggcgatcagctttaagtttcgggtttcctgtgacgatctatccatcatactcatatgatgataagcatcatcgtgatctggaaccattcatctataaacgtgaatcgagggacaaaggatcatctccagctccaaaccataacactggccttttggcaagcttgcggcaacccacaaccaattatcaattgacaaggcaatttggtactgctgcattaataaccaatcatcaaacaaagaggctatttggcacggctgcattgacgctcttgaaagtcttgaagaaagcatgaatgaaaaggtatgccatgagttctgttttctatctgcatataacataactttcgtggtgtatataactgaaaaggtatggtgttgggggacgggaagagcatcttcttctggtcttctggacagacgactggaccggatgccaattctatgcttccggatgggggttccatcctgaaccggatgccaattatatgctcttacgtcaaaaacatggaaaggacagttcactccaagtttattttatttttaaattaagatagaaaatatgtaaatttatagctgttaagccaaatatttttattgagaaaaatattatatattttactttaagcagtc

SEQ ID NO: 16669 - DNA, 1389 bp, Oryza sativa
  ref <308>: DATABASE ACCESSION NUMBER: AK067145
  ref <309>: DATABASE ENTRY DATE: 2001-12-06
gatcctcctctctctctctctcactcacagcgacaggggaggagtgccgcgcaccggcggctggcgggggatggccggtgaggcgggcgtgtcggcggccgccgagggaggaaggcttggtcaattgagcacagccgcgcgcgcatgggcggcgggggaagagatgggcgtcggcgacaacgaccgaggagctgggcacgggcggtggccaaagggggaatagctgggcgcgggcggctgccgccgggggaagagatgggaggcaacgacagtgggcgaggagttgggcgcgagcgcccgctcctcccgacgggatcctctcttcctcgtcggtgtcgtcgtccccctcgtccccgctggatcccgccgtggcgcagtggccatcgtcctggtcgcccgccgcgccgccgctccattcgtccgcggcgtcccacctccgcgacctcccggcggatcccgccgccacctccgccgcgccacctgcctggatgtgggaaaaaatggaatcgaccaccaccgcctccaaggggacctcgtcgtgggcagcggccatcgtcgatctcgccgcccctagggccctccatgccggtgcacgaggccggggttgttggcctgcagaatgcggaggccagacgacggcgtggtggaggaccagcttcggtacagtatagttcagttcagttgaggaatcttgtcgtggagaccgacgacgagcgtggtggcggcgagctggttcaccgtcaccaccaccgtctccccgaccttcccctccctaaccactatctccaccttcgcctgcataccatttcacaattaaaaagatgatttgcttctttctttgttttgagttgagccaactaccaccattgattgatgggtttacctccgcgatgccgttgcagagctccctgaaggcgagggcgagctggaagccgccgaggcgtaggctgcgcaacctcgctggcgggcagacgtgcaacagcgtgatgtagtcactggcgcggatgaagttttggatggcccactgcagcgtgccgccatcgccgatggcagcgactgatggcggcgtcgtcgagatgtgatgatggccgtagccgcgcgccgccctgaacccgcgcgccgccacccgggagccgccgtcgccggccgcgcgcgccgtcgcctgtgcgagagcagagagcgagagggaggaaaggagaagagaaaaaaaaaaaagagaagagaggaaagagagcaggagctgacagggacaccctgccatgtggggtccacgtgggtctcacgctgactcagccgtcacgtgagacaaaaccgggtcaaaacaagttaggggatgtgttgtatcggttttatggttgggggacgattttgtaactcggtgacaagttg

SEQ ID NO: 16670 - DNA, 2023 bp, Oryza sativa
  ref <308>: DATABASE ACCESSION NUMBER: AK067146
  ref <309>: DATABASE ENTRY DATE: 2001-12-06
gaccttcctcttcctcccgaccaaacaacctccctcctcctcctccacctcgtcgtcgtctccgccgcgctgtctcctcctctatataccctcacccacactcgcacgcgcaaacccaacccccgcatatgcttaactccccaacccaaaccctcctcctcccccatgggcgcgtgcttctcatcccacactgcgaccgccgccgccgatggcgggagcgggaagcggcagcagcggaagggggatcacaaggggaagctccccgatggcggcggcggcgagaaggagaaggaggcggcgcgggtggagttcgggtacgagagggacttcgaggggaggtaccaggtcgggaggctgctcggccacggccagttcggctacaccttcgccgccaccgaccgggcctccggtgaccgcgtcgccgtcaagcgcatcgacaaggccaagatggttcgccctgttgctgtggaggatgtaaagagagaagtgaagattcttaaagaacttaaaggccatgagaatattgttcacttctacaatgcgtttgaagatgactcatatgtatatattgtgatggaactatgtgagggtggtgaactattggaccggattttggcaaaaaagaacagccgttatagtgagaaagatgctgcagtggtggtgcggcagatgctcaaagtggcagctgagtgccatctgcatgggctagttcaccgagatatgaagcccgagaacttccttttcaaatcaaccaaggaggactcacctttaaaggcaacagattttggtctgtcagacttcataaaaccagggaaaaagtttcacgatatagttggcagtgcctattatgtagcaccagaagttttaaaacgacggtctggccctgagtcagatgtttggagcataggagtcataacttatattttgctctgtgggagacgccctttttggaataagatagaggatggcatattcagagaggtactaagaaacaagcctgattttcgtaagaagccttggccaggcatcagttcaggtgctaaagatttcgttaaaaagttacttgtaaagaacccaagggcaagattaaccgctgctcaagctctctcgcatccatgggtaagagaaggaggagaagcatctgagatccctgttgatatatctgtattgtccaacatgcgtcagtttgtcaagtacagccgttttaagcaatttgctctgagggctttagcaagtacactaaaagaggaagaactagcagatctgaaggaccagttcgatgcaattgatgttgataaaagtggatcaattagtattgaggaaatgcggcatgcccttgcaaaggatcttccttggagattgaagggcccccgtgttctcgagattatccaagcaatcgacagcaacactgatggtcttgtggactttgaagagtttgtagcagcaaccctccatatacatcaaatggctgagcttgactctgaaaggtggggcctacgctgccaggctgctttcagcaaatttgatctggatggtgacggatacatcactccagatgaactcagaatgcacactggcttgaagggttccatcgagccattgctggaggaggccgacatcgacaaagacgggagaataagcttgtcggagttccgcaagctcctgcggacagcgagcatgagcaaccttcccagtccaagaggacctccaaatccacaacccctgtgaacgtcggtaagaaccgagatgagacgtcgtaaattagtcttgtaaaggttgtcttgttcctgtccgcgtgccatgtgatgttgagggtgtcttgagtttttagcatccaggttccgtgtgcagcatgcagataaagtttcggtgtagtacggagtacatacatatttttttcaaaaaaaaatgttacaagcagaaatgctgttctagtctcccattctcctccttgtacataattctatatatgtatgatttgattgcacgtattcatcgcaataaagttgcctgggattgcatg

SEQ ID NO: 16671 - DNA, 1032 bp, Oryza sativa
  ref <308>: DATABASE ACCESSION NUMBER: AK067147
  ref <309>: DATABASE ENTRY DATE: 2001-12-06
ccatccatctctacacatcagcaatatttagctacacagagctagctaggattagctcagcaatggcaggtgctcctcgaggactagttctcctcggcgtttgtgccgtcttgatggcggtcgccgtcggcggtgaggcggcgtcggttgtcgtcggcacggccaagtgcgccgactgcacccggaagaacatgaaagctgaggatgctttcaagaacctccaagtggcgatcaagtgcaagaacaccaacggtgagtacgagagcaaggctgccggaaagctcgatggcaccggcgctttcagcgtccccctcgacgccgaccttgacagctccgactgcatcgctcagctccacagcgccaacaacgagccatgccctggtcaggagccatccaaggtcgtgccaatgtcggagggcacctttgtcgccattgccggcaagacacactacccatcagcgttgtgcgcgtcagcgaccatctgcggtcccatcaagaagaagatcatagaccacttccacaagaagccggtgccacccaagccggagccgaagccggagccacccaagccgaagcctgagccggaacaccccttcctcgaccatatccacaagaaggagaagcacttcttcgaccacttccacaagaagccagtgccacctaagccagagccgaagccagagcccaagccagagcccaagccgcagcctgcgccggagtaccacaacccgagccctccggcaaagaactgatgaatatgatccgcactggacgtttgatcatgccgtcctgccccctgtcagattgtctgcataataacagtttgagatcgaagtcatgcattagctttcatcgacaggagttttaatttgtacttgtatctatttcttctctatcaaatgcagttatatatggtaagataatttatttatatttaatcagtactgttgtggcggactattcactgtatcagccaaagccattggatcgtaagaggttagcattggttaaagaaaaagttatttttatctg

SEQ ID NO: 16672 - DNA, 1304 bp, Oryza sativa
  ref <308>: DATABASE ACCESSION NUMBER: AK067148
  ref <309>: DATABASE ENTRY DATE: 2001-12-06
gtgacttccactcagacttccagactcaagaggcgagggcttcccaatgggcaacatcgcgagctgcggcggcgctagcctacgtccgccgccgccgcatctcgaagcctatagacacggggtgccgcccccgtactaccacagctaccctcgtccgccccccggcgccgccgcgccgccgccggtgccggtgcctgcgcacgtggagcggcacagggccgtggcggtcaacgtcggcgtcaacgtcaagggggacaccctgcggctggtgcccgacgacgacgacgacgatggccgcagcctactcctcgccttctccttcgacgccgatggccccggaagcataactgtctgcttctttgcacaagaagataagtgtgccttgaagaccgcaaaggaaaatttgcttcaacctgtgaccgtgccttttaaggaaggtcgaggtcaggagttcaagcaaccaagtgggtcgggaatcgatgtctctcgttttgaggaatctgagctaactaatgttggggaaggtggtgtattccctgtagcattcaaagtacaaatggatgtgtcaggcaaccaagaatcagaaggggcacatgagaccgaacaatcgaaatatcttgttaaatatgctatatttgtgaagaaagacaatgctgaatatggagttcatgttgtgcagcagatcctttgggtaaatggaatcagatatgtcttgcaggaaatatatggtattgggaacacagctgataagaatgctcatgaggatgattccgggaaagaatgtgtggtttgcctttctgaaccaagagatactgctgttcttccatgcaggcatatgtgcctgtgcagggagtgtgctcaagttttaaaatatcagaccaacaaatgcccaatatgcaggcaacctgttgagggccttcgcgagatagaggttgataacaaaccgattccccaacaaggatctcagcagttaacagcacctcaataaagtctcatctgattgcaagcaaactacctgtacatgtgtcatgtgtatataaaaggtctgtgctttcgggaaggggaaatcggaagttacctggtagcaacaaagctgtttctgatattttgttaaagaatgaacctactgggatttaattgtctacgtttggaccaccaaactcgacttattacttggaaaagacactattttagattgtatggttcaagcctttagcaggggacaatcgttttcttgttctaatttagttactcatccatcactttgatgtgtttaagagcatacgatgtgttctttctagtgg

SEQ ID NO: 16673 - DNA, 2524 bp, Oryza sativa
  misc_feature (1218)..(1218): "n"=any one base of a, t, c, or g
  ref <308>: DATABASE ACCESSION NUMBER: AK067149
  ref <309>: DATABASE ENTRY DATE: 2001-12-06
gcccgggaggcgcacgggttgcggcgttcggcggttcagggagcggtgtccggcgccggagcttgcagctgaagaggcggtatcttgctgaggctacaacatcgattttctccatccactcatctcccaaaaccaaagatggacaacagaacaaggtttatgatttatgcgtaaagggaggctcggtgtgtagtcaaaaattgaaggagagggagggagaggtaacaagtttctcccccaaaacgcttggtggttcagctgaacccccatgccccaccggtaggtctcacagaattgtacatcatgcagctttttctcctgaatttccagggtcacgggacagtttgcatggcatgatcatattttgctaaggttctattagagtgtcattcaatggcccatttcatggatttacgggctttcatcctgcgtgcacgtgttttaaagctttataggcaggccttgcgcatgactcgccgagctcctgtgcatgcatgcggtcagacatttttaaaccttgctttcctatctttgctgtctaatgtttactcttgaagttacaactaataactgtccttgaatgttctttgtccagatgagttgaggcaaactgtaagagctgagattgaaaaaaatcgccgttgcgacgataaacagaagattaagttcttgatcagtgaaggtctgcaacgattaaaaggccttgatgagatgcttgacatgacaggaaatagttaacctgagtttcatgtcggatatgaggttcaatttacacggaagctgggtttgcatgagctcctgcaaaacattcattgctctgtgacctcctacacctgatatttccagaacccataaggcatcaggccacatgaacttgtggcctcctggattagagtttgttagaacggacccattcagattctttgcctcgttctatccaggggataggaaagatatcaggctcagatatattatcatggtagatcatcgatggtgtgcgtgcatatgggacgaaaatgcagttaccgaggcatcatgcttgattttgcacacatctattcagtcaagatatgctagcgagctttagaagcaattgggatttctttagatgctatcttgagaccctgaatttccaggtgttacatctgagaaaatagcagctagagatggattaagctgaagaaaggtatctgacttgtcgtttaggtacgtctgctntgaggcgatgatgttcaactttttcagacccgatggcttacttttcatatttgagatactgacctcatgtttcagtcctgatgttcttaccatttcttcgttgcaatttcttagctggtatgatgaggtcattaaacatgtactttctttccaactatttcattatatgccacaataaagatacttggtaatatatgctggtcctgccgtgctggtatataaaaatatgctccatgatcttaagcttttgttttgttgtgatcatatcaaatgaagggatacctgctaacattacttccattaggtaacttattatgtgacaatcgctgtttttagtgctttccggacccaatttgtggggatctcactatcaccatcgattgagctggtgctcacactgttaatctactctagattttggaattttggattatgttgtcttacttaaaaatgaagtgattctctaagaaaaaagacaacccatgtgaagctgcctgtagtactgatacattggtacaaataatcactatcaaatgctttcattcatttaaagaaggatcatcgtcataaagctatgtttggttactaaacaaagattcatgcatacatgatgcatactcccaagtcccaacaacacaacttgtgtggtccatataatcttgatagggttcatctgctcttgtccatgatgccttggactccttaacgaaccgggttcccttttgttaggcaccggttttccttcccctttttgatttgctttgcaccagctatttggcgttctatacataccaaactatttccttttgtttgcaacttgatctgaaatttgtttagacatgtacagatattctggatctatcataatttaaacactttgaaattaaattgcccttcgttccgtcgctggcctggcgaatttttttttaatactctgaatttgaactgagagtgatagcctgataagattatcactacttacttcagttcagatagtcacagaagaaaattgcaagtagaaataaaataacatacactgatcaaacaaagggtatgcagctataggtttgttataaaccatggattgtcaactgacacaacttttatggtacacaaagcatattgtagtgatatatttttcagttatagatggttctaagataatactcttcgaacagtctcctggcagtatgctaatgcatactaggcctcgaaatactgtagaaatcttatgggaattagtcaattccttcaatgtctgcagaagttaggaaaacattttcagtatttctgtggatgcattagc

SEQ ID NO: 16674 - DNA, 1810 bp, Oryza sativa
  ref <308>: DATABASE ACCESSION NUMBER: AK067150
  ref <309>: DATABASE ENTRY DATE: 2001-12-06
tgttggttgggatgaatcaactgcaggggaaagaccaccaagagtttctttatgggaaattgaaccattgacaacctttccaatgtatccatctctgttcccactgagagttaagcatccttggtattcaggagttgcttccctgcatgatgacagcaatgctttaatgtggctgagaggagttgctggtgagggaggttttcagtctctgaactttcagtcacctggtattggctcctggggacaacagaggctccatccatccttactgagcagcgatcacgatcagtaccaagcagtagttgctgctgctgctgcttcccaatctggtggttacttaaaacagcaattcttgcaccttcagcaacctatgcagtcccctcaagaacactgcaacctcaacccattattgcagcaacaaattctgcagcaagcaagccagcaacagataattaatcctgatgcccaaaatatccaaacgatgttgagcccaagtgctatacaacagcaactccagcaactacagcaaatgcagcaagttcagaatgatcagaagcagaagattcaaccagatcaaagctaccaagttcctacaagtgcagttctcccaagtccaacatcattaccgagtcatttgcgagaaaaatttggcttctctgatcctaatgcgaattcttcaagcttcatcacctctagcagtagtgataacatgttggattcgagcttccttcagggaagttcgaaagctgtggacttatctcgatttaatcagcctgtagctagtgagcagcagcagcagcagcaacaggcatggaagcagaagtttatgggttcacagtcagtgtcttttgggggctcggttttgcataactcacccacaagcaaagatggttctgttgaaaacaaaattggtcgtgatgtgcaaaaccagtccctttttagtccacaagttgactcttcatccctcctgtacaacatggttcctaatctgacttcgaatgtttcggatggcaacttatcaacgatcccttctggatcaacttatctgcagaatgcaatgtatggttgcttggacgactcttctggtttattgcaaaatacaggagagaacgatccagcaaccagaacatttgtgaaggtttacaagtcaggttcggttgggaggtcgttggacataacccggttctctaattatgctgaacttcgagaagaactgggtcagatgttcggcattaagggtcaattggacgaccctgatagatcaggctggcagcttgtattcgtcgacagggagaatgatgtgcttctccttggagacgacccttgggagtcctttgtgaatagtgtatggtacatcaagatactttcacctgaggatgtgcataagatgggaaagcaaggaaatgatccacggtatctgtcctgaagtgagagaacatggtgccatttctgggcttccaggaggattctgcagtgcatggtggcactcttgctctcgacaatgcacgtcgtcagaagtcccaaatttgtatcttgcatgtacgccgtacatgtttccagaactctctgttacctattcggtgcaggccaccggaaccacgaaacctgatattttgtaggttccacttaggaatcagtatcggtttaactcttatcctagatgatttgtaactcgcacggcagtccactgttttcatgtttcatcgagtcttcctagacattaaacttagttgatattgtatcaggatttatgtgtattgagattcctctacatgctttcaaccaaaaaaaactgcaataatcgaagcgc

SEQ ID NO: 16675 - DNA, 2318 bp, Oryza sativa
  ref <308>: DATABASE ACCESSION NUMBER: AK067151
  ref <309>: DATABASE ENTRY DATE: 2001-12-06
gagacgcatcaatcaacaaaataaataaataaataaacaaacggatcaaaagcagcagcagtagtcagtagacgccttccaagacaagctcaagcaaaagcaagagacaccaaccggcggcgaggaggcaggaatcgcggcggcggggtcgccggagatggggagggaacggggtggcggcgaggggatgacgatgctgcagcggtggtcgtcgtcggtgtggagcgtgagcgggagcgggcggctgctgtgggcggacaaggcgtggcgcgcgcacgccgccatggcgttcacccagctcgcctacggcggctaccacgtcctcaccaagtccgtcctcaacgtcggcatgaaccagatcgtcttctgcgtctaccgcgacctcgtcgccctcgccctcctcgcccccgccgccttcttccgcgagcgccgcacccgccgccccctcacccctcacctcctcgcctccttcgctctcctcggcttcaccgggatcttcgggaaccagctcctgttcctgctgggcctcagcttcaccaacgcctcctacgccgcagccttccagccagccataccggtgttcacattcctcctagccgcaatcgtcggtgttgaggtgatcaatatcttcaccaaggacggcatcgtcaaggttcttggcacggctgtgtgcgtctccggagccgtgctgatggtgttctatagaggtccatccttgattggcatgggaggaggaggaggaggaggctccaatggtgtgggtgagaatgtcctggccggcacatggagcagcaattcttacacgccccaatggttgacatcggccatgctccaatacggtctagaaacatggaatcttggtgtcatctgcctcattgggaactgcttcctgatgggcgcttatctggtcatacaggctccagtgctgataaaatatcccgcgagcttatccttaacagcttactcttattcatttgccactgtattcatggtgctgacaggggtagttacaaccaatgggctccatgaatgggcattgacaacgaccgagatcattgctattctatatgctggaattgttgcatcttgcttgaattacgcaatcatgacttggtcaaacaaaatccttggtccttctctggttgccctctacaatccactccaaccagcatgttctaccatcctgtcaactatatttcttggtaccccaatatatcttggaagcattattggaggagtctttatcattgctggtctataccttgttacctgggcccgttacaatgaggcgcaaagggtactggcaattggatatttagaccctcttcttgtggaggatgaggatccaccaactcccaagacacaggaaagttctttcactggctccattgatccttaaatgagctgtcctgaacagtagctgcagaattacttcacgtataaatacagttctcgcctatactcctacgtcaagatttccatcacttttagaatttgtagttggtttatgttccatctccatcatcaggaatatcagaatactgagctctatgctgaaaataagtttgaacaatagccattgttttgagctcatatcaaggagccattttttcatcaatggaggtgccattggctaacaatggtcagtgatcctccagcttcaacagttgtttttacagcccactggtggtcaccagtaggaacagcttcagtgattaaaggtagaccttaaatagcttgttacttactgattctacttatcgcataatagatcgtatgtatattgttaccatctgatgttccatttgtaatattgaaaagttatgcacctaaagctacccaaagatttaattcatatttgtaccacacttaattaacaaaagaactggaaacgtgtttttttttgttattttggtgcagagatttttccaaaatgactgatcttaggcttggttttgtgtttctcttcagcaggttgttctctaggcctgggaactcaatctgaaacagagttgagttattgattacttgcggcaagacagctgttcttctctgatgatgggacccaatgtattctttgctttgttcaagtttatgtcttgagagcacaatagtttctgtccaaggaaaagagagaattccaggattgtgctttcgttgtgtctgtctagtaatgattccgttgcttcatttgttttatatatgtgatgtaaattgtcagtacacactgttacttttttgtattacctagtgtaaagtatataaaggaaaacactgtatgcaaaatccttactgtctagtgcatattcttgttctgc

SEQ ID NO: 16676 - DNA, 1496 bp, Oryza sativa
  ref <308>: DATABASE ACCESSION NUMBER: AK067152
  ref <309>: DATABASE ENTRY DATE: 2001-12-06
ggggacttaacattccggttcttcttgcagaaaggagggggctctggatatgcatcaccagtcacaattgggtcaatgctatatgatgggaactctttggttgattcagatcattcctatcatataatgacagagacgaatcataggttacttaatgtcagctatgacattcactatgtcgggaattggtcgctagaaacatttcgccgtcagcatatctctgcagagggtgtttatgatgctaagacaggctccttgtgtatgattgcttgtcgggtggttaatatctcgttggactgtgaaattcttgtaactgctcagttttctcctttggatacaaaagtagcacagcatgtcaaggggacaattagaagcttgaggaagaagactgaccctcttttctttgaaccgctggacattgcttcgtatgggttgtacatagacaaagtggatgagtcgatgtggagaatggacttggaaagcaccatggccctgatctcgatgacactatcctgtttgttcattgctgtgcaactgttccatgtcaagaaggttcctgaagcgcttcctgccatgtcaatcaccatgcttgtagttctctctttgggttacatgatacctcttgtgttgaactttgaggccctcttcaagaacagtaacaaacagacatttccactttcaggtggtggttggcttgaggtgaatgaagtcattgtgcgaatcattaccatggtaacctttctgatgcagttacgacttcttcaattggcatgctctgcacgttccatggatgtaagcaaagatcaatcatgggctgctgagaagaaagtgctttggatatgcttgccactgtacattataggtgcagtcgcagcttgggttgttcacatgcaatttaacaacaaccgaaggatgcttagaaaggttgctcgcttacctcgggttaatagacatgcattctgggaggaccttgtgtcatatgggggattaatactcgacgggttcttgctccctcaggttatcttaaacgcatgcttaggctccaaagtgaaggcactttccccgggattttacattggaagcaccatgattcgtgcgctacctcatgtgtatgatgtgttcagggctaagcattttgtgcccagcttgagaccattttacaggtatgcaaaccctcgcgatgatctcttcagccttgcatgggacattgccataccatgtggagcaatactgctgtcggttcttctgttccttcagcagcggtttggaggcgctttcttcatttgttcgaagaacaggaaggcaagtgaatatgaaatggtttccacagttagctcttaacaagttttcatctgtgcaagagaaatatagagaaggtttctataggctaagaaataggttgcttcttatgtctatgtttgctttacacacttacatacctgccttgttgaagcaaaattacatacaaaagaagctattcaggttgggcattcagc

SEQ ID NO: 16677 - DNA, 2355 bp, Oryza sativa
  ref <308>: DATABASE ACCESSION NUMBER: AK067153
  ref <309>: DATABASE ENTRY DATE: 2001-12-06
gatcgcgttgcccaaataattacacgaatcgaaccaaaccctagcttttcctcttcgattcccgatcccccacccagcgactcgccggaaccctagccctagatcccgcgcggcttgccgccgtgctagccatggcgtccctcaaggagctcctcccgacgcccaaggcggcggcgtcgacgttctacgaccacagcagcgacccgtggttcaaggagcggtatggcggggagtcggcgcaatccgacgcggcggcggcggcggcgaagccttcgggccccgccaagcccgtgccgccgtacgggaagcgtggcgggttcgtgccgcggcggccggaggacttcggggacggcggcgccttcccggagatccacgtcgcgcagtacccgctcggcatgggccggcgcgacgagaagggcggctcgaagatcctcgcgctcaccgtcgacgccaagggcagcgtcgccttcgacgccgtcgtgaagcagggtgagaacgcctctaagatcgtttactcaaagcacagcgacctcgtgcccaagattgccacggctgattccgaggcaaccgcggacgacgaggagtaccagaaacagatcgaagaaaccactgaacgaactaaagctgccttggagaaggttgtcaatgttcggctctccgccgcacagcccaagaatgtgccgacgcatgattcagagtcaaagtttatcaagtataagccatcgcagcaatcggcagccttcaattcaggtgccaaggagaggattattaggatgtcagagatggctcaggatcctcttgagccaccgaaattcaagcataagcgagtgccccgcgcttctggatcaccgcctgtcccagtgatgcactcgccaccacggccagtgacagtgaaggaccagcaagattggaagattccaccatgcatttcaaattggaaaaatccaaagggttacaccataccactcgacaagaggttggcagctgatggaagggggctgcaggaggttcaaattaatgataactttgcaaagctctctgaagcactgtatgtggcggagcagaaaggccagggaggcagtacagatgcgatccaaggtgcagagggagctgcagctgaaggagaaggagaggaaggagcaagagctaagggcacttgcacagaaggcgcgcatggagaggactggtgccccacctgcacctacaggggttcctgctggtggtggtagaggtgctgttggtgacagggaggaagatatggatttggagcagcctcgtgagcaacgaagggggagtagagaagaaagggaagcaaggattgagcgtgacaggattcgtgaggagaggagacgtgagagggagagagagaggaggctggaggccagggatgctgcaatgggcaagaagagtaagctcactagagacagggatcgtgatgtcagtgagaagattgccctgggcatggcaagcactggcggtgctaaaggtggggaagtcatgtatgaccagaggttgttcaaccaggataaaggaatggactctgggtttgctacagatgatcagtataacatctactccaagggtctcttcacagcgcagccaactctatccacactttacaggcctaagaaggacggtgattctgatgtgtatggcgatgcagatgaacaactggagaaggttatgaagacagataggttcaaaccagacaaaggattttctggtgcttcagagaggtctggaaagagagacagacctgtggagtttgataaacaggaggagaatgatcccttcggtcttgatcagttcttgactgaagtgaagaaggggaagaaagctgttgagaagattggaagcggaggagccatgagggcaagtggtggatcctcaatgagagatgattacgagggtggaggatctgggaggtcccgcattaactttgaaagaggtcgttgaggtattagatctgcatgttttgttcagaagtttctccatgcattccaaatgttatctggagggtattctgttgagaatatcaacttcttgatgagaggacttgatgtctgagttgtcttaatgcaacgtctacttccaaggggcatcttaaggagtgtacctgtttagatcctgtgattatgcttgttgtttatctatttgtggatggatctgtaagcttaacttatcatcattccatatcccttatattttgtggtgctttatgaagtctcgatgtgtctggctgaccttacattttctggtactgtaccaagtctttaagatgtatctgcctatctggctgaaatactgagacacgggatacatataaattccgtgttctgttttttcacaagttct

SEQ ID NO: 16678 - DNA, 3079 bp, Oryza sativa
  ref <308>: DATABASE ACCESSION NUMBER: AK067154
  ref <309>: DATABASE ENTRY DATE: 2001-12-06
gttcgggttcgcaaggaatggtgaccttcgagctgcgctgcacctgtttgacgaaatgaggcttagaggcgtcaagccaggggtcaattcttggaactgcatcatctcaggctgtgtgcagaatgcgaggtatgacgaggctttgaacattttttgcgagatgtgcgagagcgagagtcctgatgcagtgactgtggctagcatactccctgcttgcactggcttgatggcactgggcattggaaagcagctgcattcttatgttatacgatgcggaatcaagttaaatgtttacattggctcttcgttgattggaatgtactccgagtgtggagaatttggttatgcgagaagcgtgtttgcagccattgaggagaagaatgccactgtgtggaatgaattgattcggtcatatatcaatgaggagaggatgaatgaggcttgggaggcttttcgcttgatgaaggagaatggattgcagcctgatactatcacatataatagcttcattgctgcatatgctagagcaggtcagaaagaacaagcatataccctgctgtcaaacatggttgaaattggcttgaaacctaatgtggtatcgatgaatgcgttaatatccggtttgcatcaccatggccgtcatgcagatgcattggaagctttccgatacatgcaggtctcgagtgatggagaagcaaaaggctgggcattacctggcaattcaattcaaccaaatggtacaaccattactagtgtcctctcccttttgacagatctcaggttagatcgtcttgggaaggaagtacactgttatgcttttcggagtggtttgatatcaaacatatttgtttctagcaaactggttgacctttatggtaagactggtgatgtgggcaccgctgataaagtcttccggagaatcagtaacaagaatgttgtcacatggaacagtatactagcatcctacaggcaaaataggaagccagaaattgctttgaaactgttccatgaaatgatcaaatccaatttacttcccaacttagttacattacagattgctcttttgtcttctggtatgactatggcattgcagcatgggagagaattgcatggttacattaggaagaactggccagatggttatccaactgctcttgcaagtgctttgattgatatgtacgggaaatgtggtaagattgaggatgctagattggttttcgaatgcactgatgaaaaggacatagcaacatggaatgcaataatgagtgcatacttgctacataggatacctggagaggttaaaaaattgttcaagtatattgaacaatctggaattcaaccagatcctgtgactttcattatacttctttcagcttgtaagcaagaaggttccatggaggaagctcgcagatatttctacagtatggaagatgtatacggcatacaaccaaccttaaaacactatacctgcatggttgacatcatgggaatggctggcttactggaggagtcactagaacttatccagaagatgcaacttgaaccagatggatgcctatggtctatccttctgaaagcttgtaagctgcactcaaatctggagatcggtgagaaggctgcgaaagcgctttttgagcttgagccaaacaatacttcaaattacatgtcgctgtccaatatatatgccgacaatggcttgtgggagtccactgaggctttgagggttgccatgacagaacaggggttaaatgtagagagacaatgtagccgcttgtatcttggtacagatgtacacacatttgaggctggagattcctcgcatcctgcattcgaaaagattttgagtacatggaatgacttatctgataggatggaacagtcagggtatcctcctcaggatattgagccctattctaatgccgaagctgatccattgtcatgccaacacaccgagaggattgcattatgttacgggctaatttccgtgcgtgttcatgatctgatccgtatctcaaagaattttaggatgtgcatggaatgccattcatcaatcaagttcatctcgagggatatgaaccgggaaatatttgtttcagatggttgcacctatcaccattttcagaatggagcatgcagctgtggagatatgtggtaaattgaagtcagtttgacacaaaagtactcttcttgtatggtcaaaactgcatttatctacccaaatattgccgggccggccaagaaatgccaaccaaatttacttaagattgaagaatatatacaaatatacaaagttataagttcaacaagaagctgtcgaagtaatggaagttgtcaccggagcaacttaccaaaagcaaaagattacactaagagactactctcctatatttctgaaaaccccagcttccttccaaatcgtcacttcctctttgattgaaccaaacaggaaaccggctgagcgccgctggttctgaaacacacgcgcatttcttttcttccaaaccatccaacaaacaagcagcacaaggctgtcaatggcgtccttgtagttgttccgaaaattttgccgcatcgctaaccaccattcgccaaccaatatatactatcttatgagtccaagcctgactcagatggcagcaggaagccaaccccaaatatcttatgatggttacaagagactgtacagcaaccaagttaagttctttcccataaccttcttgaagcactccatgatctcttatatataccatgatcgatgtgcttcatgggaaactgggagctctgagttcttgcaaagatcagatggagaaggtgcacctctggtcagaattaatcggaagaaaaggttggtctggatgtggcagcttgtgctgacgccatttcaagaaaagtgatatgaattatgcacatatcctataaaacatgcgcatggattatacgtggatatggtgagatcagtaatgctcttcagctaatgattttcaggcagctggtaaccccgggtatgattacaggtaacctaacctcgtgattgtcatgtatgcatctgtgtctgatatacggttgtacttcaacttcg

SEQ ID NO: 16679 - DNA, 1078 bp, Oryza sativa
  ref <308>: DATABASE ACCESSION NUMBER: AK067155
  ref <309>: DATABASE ENTRY DATE: 2001-12-06
gaatgattaaaagttgcgcggcctcgcctgatggtgcgcctcctccacctgctccgcgccgcatccgctcccacctacccccgccgccgccaccaccttgccctcctcccctcgctccggctacgagtgccggcgcccgccgccgccgccgccatgtcgagtgccgcggcggcgcaggaggtcgccgaccagaagcgcgcgctgcggtccgaggtgcggagggcgctcagggccctcacccccgagcagcgcgccagcgaagaccaggctattcaaaatgcaattttgaactcttcttggttcaaagaaagcaagcggttatgtgcttatataagctgtgcacaattgcgggaagttgatacatcaaaagtactgtcagaagttttatccccaaattctgaacatggacatgcaaaggatctttatgttcctcgagtggaagataagaatcgcaatatgcggatgctcaaaatcactaccatggatgatttagttaaaaattcaatgaacattctagaaccatcaccacttgatgctagtgggaatgctcgtgaagaagtgttgtcaacctcttcccctgttgatctttttctattgcctggacaagcttttgataggactggacgaagattaggacgtggtggagggtactatgacacattcttgatgagatatcaagaacttgctaaagagaaagggtgggatcagcctcttctagtcgcgctttcatactcggtgcaaattttggaggaaggcatcatcccagtcaactcaacagatgttcctattgatgctctggctcatcctctggcatcattccaatcagtcctgcagcattggcgaggatataattgagctgattggtttctgctttgcgttgacagtcaacctctcttccctgaacaacacttttttagataatgcttcaccaaagctgagaaatttttcgatcaagtgattttgttacgcaatgtatctgtattctgaatatgaattgattttgtctgcgtattgtaatgacaactttgatcaaacatacaataagttcaatatatattcatagaggactatggacctg

SEQ ID NO: 16680 - DNA, 2697 bp, Oryza sativa
  ref <308>: DATABASE ACCESSION NUMBER: AK067156
  ref <309>: DATABASE ENTRY DATE: 2001-12-06
gaggaggagggctagagagagaaaggtggtagtagagtagtagtagatttgaggaggtgagagagagagagagagtcatctctcttctttgtatcccccgtcgccaacttctcctaccaacttctctctctcttttttttctcctcctcctcttcttcttggtggccgctcgccgccgccgacgccgacgccgccggcgggtctcgtcgtcggtacgtgttactacgggggccggtctgtggcccctaccctccgtcgccgtcgtcttttcttgttcgcgtgtgcgtttatttctcggccagaggttggcggcttccggcggttcttggattccggcaggattgatcggcgtggtgtttcttggcccccccgcgaattccggcggcattctgatggcgtgcttcttctctcttctttttttctcttgctggttgttttgttgagttcgtgtggggtggtaggattggaaggtggcggtggttggggggtctttgggtggtgagggaagggggtgaattctctgtgttcttgggggttgttgttgttatcatctgagcctcttaggattggttgggtggcggaaggttggttgttgccacctgccctgttcgtgtttgcgattgatttgtactacacagtgggtgcttctcctatgtgcaaatcagataattccgcggtaacaaagtcagcgtaggattatgttggtgatgatgatgactagtgtgcctgaaaattccatctttgcagtagtccttggcttgataatacagatagattctttgcagagttcgtgcacttcactgtcacaacaaagaaatcttttttcctcaagagttaaattctagtaggattcgttggattctgtaggccctggagtgtgcttgctaggtctgtgctaactgttagtggtgactggtgacaagtacatcaccttgatttcttcttttttttttcactcactatttttagggcgtttatttggttactcctttcgccgagtttcagttaaagctgacctgtgcctccacgtgacgttagtggggcttttgtcagatgatacagctccgttgaggatcgtgctggacattgctgcactgtcagcatccttgttcctttgctgtctatttgagccctcaatttccagtgcctgtagtactcttcactgtctccatggaagttgtaggcctgttgaatgttgatgtcttattgtcaacagttttgttcccagagattgataactcacatgagtttatcagtttttgtagtacgattggctcctttagattccattttattgattagtaacttaatgctaataagtaaaaagatatgagtgtgatcttccacatttgtttgttagtgcattaacccgccactaggtttgccagtcgcatctatgtgctactatcacaaaacattttttttgtctattgatgtgaagaacaaatagtcaatattattctgtatatatttggcaatatggttaagattaccattcatagggaagaaatagatatggccaataagagaagtgtaacgtaattccagttcgagaaatggtggcagtaccaaatgccgaattagcggctgtaccaaatgatcaatgcctctggggtttcccttctcttcagctctccccggtttcaccaatgtgttgggcactgaacactgttgttgtttccagcaggtggcattgaaatatggttagcttgaggaggcgccggcttttggggctttgttctgggaaagattcgttaccggttgattttccaaagcctagtgacaatgaaaattctgtggaagttgcacaccctaacataaagccattcagtgtgcacccgctgcccctgactaaaaattctgatgtacttctggaatcttcaaatgggtctgattctttaaaggaagagaaaaaccattactatccaggcaaggaaatcaagcgcagaaaacgacatagaagaaagcagtatgtggaccaagaaccatgcataatgagaggggtctacttcaaaaacatgaaatggcaagctgctataaaagttgacaagaaacaaatccacttaggtactgtcgggacacaggaggaagcagcccgactatatgatagggctgcttttatgtgtggaagggagccaaactttgaactttctgaggaagagaagaaagaactacagaattacacctggaaggacttcttggatatgactcgagacaccataaccagcaaaaaacaaaggaaagttggattaataaggcgcaataagacggactcgctggtaggacagagtgatggtgatactgagatgatcaatggtggcggctcatcgcactcggaagatggagatgctgagacctcagcatcttaattaagactgccaccagagttcatggacagccagattgggtctttcaacagattcgtttcaatgaagacataatttccatttaggtttttgttctctcaataattaatttcatgtgcataagggccctgatggtctgataaaggttaggctagagaaatcatgccatcccatataaagttggagatggtccattataggaacacatttctctgagcaaatgagcaatcatgtatagaaacaccaattcctgaactgtgtatatctttaccccaaatttctctacatgtaactagattacacatttaataaagaatttatttttcctttc

SEQ ID NO: 16681 - DNA, 2003 bp, Oryza sativa
  ref <308>: DATABASE ACCESSION NUMBER: AK067157
  ref <309>: DATABASE ENTRY DATE: 2001-12-06
gaggagtcccacttcctcgctgctccgaagtgtcccgcacttctcgtcttcctcctcgccgtcgtcttccacaaccaccaccgcgccgccgcctaccaatccatccagaccttctcctcccccgccgatgcacacaaatcgccggtgacgtcacgccggtgaagcagcagcactaggagaaggaggagcatatggcctgtgtactccgcctcgcctcccgctcccgctcccgctccggcctccggcccaccctcgccgccccgcgcgcgtctccggttccgcctccgccgccgcgggtgggacccacacccgtcgccccctcgccggcgcctctccgcggtctcctcctccccctatccccgctccgcctcgcttcccctgatgccttctcatcgtcgtcgccgtcgcccgcgtggctcctcgacggcctaaattggcggcgggcggggatcgggaggaggtggttcgcgaccgaggcgtccgcggcgtcgacggcggctgagctggtggacgtgcccctggcgcagaccggggaaggcatcgtcgagtgcgagctgctgcgctggttcgtcactgagggtgatcaagtagatgaattccagaggctctgtgaagtacagagtgacaaggcaactatcgaaataacaagtcgtttcaaaggaaaagtacatcagattcactttggtcctggtgacattgtgaaggttggtgaaactttactgaagatgatggtgggcgacagccaaactgtatctcatgatagtatagcttcatccactgatcattcacatgcagtggatgctgcaaatccttctggtgaaggcagtgttcctagtggcacactctccacaccagcagttaggcatctagcaaagcagtatgggctcaacataagtgatattcagggaacaggaaaagatggtagagttttgaaagaagatgttctgagttatgctgccagcaagggtctttgcaaagaaccgacatcagctttggaagagaacattgatcaagtggagttactggagggaaggggatcattacccgatgctaactcttatgaagatagaagaatttctctcaggggctaccagaggtcaatggtcaaatcaatgaccctggctgcaaaagtaccacattttcattatctggaggaaataaactgtgatgctcttgtggaacttaaggcatcctttcaaaatgcgaataaagatcatactatcaagcacaccttcctaccattcctcataaagtctctttctaaggcactgagtaaataccctttgttgaacagttgttttgttgaggaaaccaatgaagttattttcaaaggatcccataacattggggtagctatggctacagaacatagattagtggtgccaaacatcaagaatgttcaatcgctttcaatattggagatcacaaaagaattgtcacgtctacatgagatggcatcgcacaacaggctgagcacagaagatattgctggtggaaccataacactaagcaacataggcgccattggtggcaagtttggctctccgcttctcaacttgcctgaagttgccattattgcactcggacgcattcaaaaacttcctcgctttgatgatgatgaaaatgtttatccttcctcaataatcaatgtgactgttggagctgatcaccgagttgttgacggcgccaccgttgcaaggttctgtaatgagtggaaaagccttgtggagaagccagaacggctattgctgcatatgcgatgatccaattggatatctgatgcaggcgagggcagaccatttgcacaggtgctctgaaagcctgaaaacacaggcaatctggcatgatcgcatggagatttcgtactgtaagcctatgaaatctttttgctggacaaagaatctgtcaagtaaatatttatatgaatgtagtgagctgacagtgcaatggcacactgtgtaaaataattctaccacactggaataaagcagggaattgttccc

SEQ ID NO: 16682 - DNA, 2073 bp, Oryza sativa
  ref <308>: DATABASE ACCESSION NUMBER: AK067158
  ref <309>: DATABASE ENTRY DATE: 2001-12-06
gcctcctcctcctcctctcctctctcccgtcacgggcgcatctctctctctctctctctctctctctctctctccccgcacagccgcgccgcgccgccgtcgccttctcgggcgagggcgaagagcgagggctcctgctcgccgccgcccctccccctcgtccgcggcgcgccggaggtcaggtagaagatggagggagctggcagagatgggaaccctcttggcggttaccggattggcaaaaccctagggattgggtcatttggcaaagtgaagatcgcggagcatatattgactggtcacaaggtggcaatcaagatcctcaatcgccgtaagatcaagagcatggagatggaagagaaagttaaaagagaaatcaagatacttagattatttatgcacccacatatcattcgcctttatgaggtgatagacaccccagctgatatttatgttgttatggagtatgtcaaatctggagagttgtttgattacatcgttgagaagggaagactgcaagaggaagaagctcgacgctttttccagcagatcatatctggtgttgaatattgccatagaaacatggtggttcatcgtgatcttaagccagagaaccttcttttggactccaaatgcaatgttaagattgcagactttggcttgagtaatgttatgcgtgatggtcactttctgaagacaagttgtggtagcccaaattatgcagcacctgaggtgatatctggtaaactatatgctggccctgaagttgatgtgtggagttgtggtgttattctttatgctcttctttgtggtacccttccatttgatgacgagaatattcccaacctttttaagaaaataaagggtggcatatatacccttcccagtcatttgtcacctttggcaagggatttgattcccagaatgcttgttgttgatcccatgaagaggatcaccatacgtgaaatccgtgaacatcagtggttcacagttggtcttccgcgttatttagctgtgccacctcctgacactgcacaacaggttaaaaagctcgacgatgaaactctgaatgatgttatcaatatggggtttgacaagaatcagctaatcgaatcacttcacaagagactgcaaaacgaggcgacagttgcctactatttactattggacaataggctgcgcacaaccagtggctaccttggagctgagttccatgaatctatggaatcttctctcgctcaagtaactccagctgagacaccaaactcagccactgatcatcggcagcatgggcatatggaatctcctgggtttggcttgaggcatcatttcgcagctgacaggaaatgggcccttggtcttcagtctcgagcacatccacgagaaataataactgaagttcttaaagctctgcaagagctaaatgtttgctggaagaagattggacattataacatgaaatgcagatggagtcctagttttcccagtcatgagagtatgatgcataacaaccatggctttggtgcagaatctgctataattgaaactgatgacagtgagaaatcaacccacactgtgaaatttgaaattcagctttacaaaacaagggatgaaaaataccttcttgacttgcaaagggtcagtggaccacagcttctctttctggacctgtgctctgcctttctaactcagctgagagtcctttaattatgccgttgtctgcttcccaactgaacttcctgcagcataccgtggattgtcacgtttcatttaagatatgtacataatgaccataatcctccagtagataatatttcctggagtgtgtagacgttagaggctgccagtgatgtattttgacggtaattggccaaaccagaggtaacaggcaggaggcaaacctttctctgtttttttatttgccgttgttgttgttatatgacggtttagacttatctagagtccttgaaccactttgcttgtttacggtgatctttactagcctgattgcccagcctgagaatcacctctgtcgttatgaaagttgagcagttggcatactattgttgatcc

SEQ ID NO: 16683 - DNA, 2549 bp, Oryza sativa
  ref <308>: DATABASE ACCESSION NUMBER: AK067159
  ref <309>: DATABASE ENTRY DATE: 2001-12-06
gagttttctctcccattttggcttcgccccacccactgcctctctccccactgtgctcgcatcgcaggaagaacccgaccggcgacgcctcctccacggcgaaatccccatagttttctccacgaatcgatccaattcgcggcctttcccttccccctggggccaattcgcgtggaaattcgggaaaaaaaaggcgggatttttctgcctttttctttacccccctttccctttttgactctccgcacggttcttctttttattggtgtcactgattgtgtttctcgtggaaaaggcgcggttttaggggtcgtctcgatcgcggatttggctccggaggcgtcgatttgatcctagcaagattgaggaatgatggattcgtgaattttgatcgagttgcttgtttggacgatccgttatgattaagcaaatcctgggccggcttcccaagaaggagaagccgggcaagtccggggagaaggatttggccggagtcggctcgtcgctgcctgatgcaagaaccaccacggatttgaccatgtctagtgggatcgccaatcctaacaattatacagccgcggtcacaaatcccggccagaattacaccgtcaaggacgcccatcatggtggtgctggtgtcagcaatggtttcttggcgccgcccgtgtttgaggcgcttccgagcttacgggatgcgccggcgccagagaagcccagcttgtttctccggaaggtggtcatgtgctatgtggttttcgacttcacggacccgaccaaggatgtcaaggagaaggagatcaagaggcaaacattgctggagctcgtggattatgtcacctcagctacggggaaattcccggagcccgctgtgcaggaggtcatcaaaatggtgtccaccaacttgttcagggtaccgaaccccgcgccaagagagaacaagccgcttgagtcatttgatatggaggaggaagaacctgtcatggacccggcttggccgcacttgcagattgtgtatgaactattcttaaggtttgtccagtctcctgagaccgatgctaagctggccaagagatacgtcgatcatggtttcattatcaagctgcttgatctctttgactcggaggatcctagggaaagggagtatttgaagacaatacttcataggatatatgggaagttcatggtgcaccgtccattcattaggaaggcgattaataatatcttctacaggttcatatttgagacagaaaagcataacgggattgctgagctattagagattttggggagtataatcaatggttttgctttgccactcaaggaagagcacaaattgtttcttgtgcgagcattgattccactccacaaaccaaaatgtgttagcatgtatcatcaacaactgtcatattgtgttactcagtttgttgagaaggactgcaagcttgcggatactgttataaggggtttacttaaatactggcccatcacgaatagtgctaaggaggtgatgtttttgggcgagttagaagaggttttggaagccactcagccagcagaatttcagagatgtatggtgtcacttttctgtcagatcgcccgctgtctgaatagttctcactttcaggtggcagagcgagctctgtttctgtggaacaacgaccatattgaggtcttgatcaagcagaacagcaaggtgatactgcccataatccttcctgcaatagaacgaaatacaaaagaacactggaaccaggcagttcaaagcttgagttttaatgttcgcaagatattcatggatcatgaccctgtactgtttgaggagtgcctcaagaagtttgaggaagatgaagcaaaagaaaccgcgttgagatcaaaacgtgaggccacatggaagcgcctagaagagattgcctcgtcaaaaactatcagcagtgagccagcagttcctccagaggctacagttcattagcagcgctcctcagcgttgcttgctgaatgctgacgtcgtatgagcagctcgtttgccagatctagttagatcactgatgtgaatgctcatggattcctgcatgcctcatgttacttgctcctgaacattttcgcaggctgacttgtatatacaaggtagatgatggacttcgaatcttcaacagggctcagagctgtgtctgttccgagatcgtagcacctgttcttcgccgtgggacaaaggaaaggaggcagattatgtccttgcttttctgagatgtatgtgctagcctgctaggggtcaaggtgcagactggagctcagtgccctgatgttgaggacggttagcagcacatgagagagtagcaagtaggaacagagtttgcttgttgatcatggttttgcagaaatacaatgtttttatgtatgaataacttcgagtcttatcatgataatatgtaccccgggtgtacatgtgtttgctttttctagatgtatacagaaatttgtaacgaggaatgcttcctgcttgcatcaatcgatgcagagttgctgactggtggtcaatttggaattattgc

SEQ ID NO: 16684 - DNA, 1890 bp, Oryza sativa
  ref <308>: DATABASE ACCESSION NUMBER: AK067160
  ref <309>: DATABASE ENTRY DATE: 2001-12-06
gaggcgcatccacccaccccaaccgaccaaagctcgcccctttgccctcggtcatgagcctcgccgccgagtcgccgtcgccgtcctccccgtcgtcgtcgagcggcagcgacgacttcgcggcgctcctcgacgcggagctcgagctgacctccgccgccgactcggcctccgccggagacccctccgccgccaccgacgacgacgacgaaggtggtgacgaggaggaggaggatgtggtggtggtcgtggaacaagaggacgccatcgtagagcagagcagtaccaaacggcgtagagtggaggaccaacaccgtcatcaagcagtagtaatgaagtcagatgaggataccgttggttcttctaaagatgttaaaattgatgaatgcccaccacatcctgggttttttggtggactttgctatagatgtgggaaaagacaagatgaggaagatgttccaggagttgcttttggttacatccataagggtttgaggctaggtacaacagaaattgacagactgcgtggagctgatttaaagaatttattgcgagaaagaaaactagtactcattttggacttggatcatacactgatcaactcaaccaaactctttgatctttctgctgctgaaaacgaattgggaattcaatctgctgctaaagaagttgttccggacagaagcttgttcacattggagacaatgcagatgcttacaaagttgagaccatttgtccgtagatttttaaaagaagcaagtgatatgtttgagatgtatatatacactatgggtgacaaggcttatgcaattgaaatagcaaaacttcttgaccctgataatgtatattttggctcaaaggtgatttcgaactctgattgcactcagcgacaccagaaaggtcttgatgtggttcttggagatgaaagtgttgcagtgattcttgatgacactgagtatgtgtggcagaaacataaagaaaatctgattctaatggagagatatcattattttgcttctagttgtcgccaatttggttttggtgccagatctttgtcagagacaatgcaggacgaaagggagaatgatggtgctttagctacaattttagatgtcttggagcgcatacacacaattttctttgatccggatgatcaaaaacctctttcttcacgggatgtaagacaggtgatcaagagggtacggcaggaagtacttcaaggctgcaaactagtgtttacgcgtgtattcccgttacatcagcgccaacaagatcagatgatctggaagatggccgagcagttgggtgccgtttgctgcacagatgtggattctacggtcacccatgttgttgctttggatctaggaacggagaaggctcgctgggctgttagtaacaagaagtttttggtccacccccgctggattgaggccgcaaatttccgatggcaacggcaacaagaggaggattttcctgtagctcgaccaaaggagaagggtaaagaaaatgccgctgatgctcctatctcaaaggagaacggtgacaaaaatgccgctgatgctgctaacgcaaagaagggtaacgaaaatgtcgctgatgctggtagcacaaaggaggggagtaaagaaaatgctgatgatgctgctaactcagaggaggagtaaagaaaatgctgatgatgctgctaacgcagagaagagtaaatctgatggtgctgccagcggtgcaactggctcgtaaccagcttataccttttgtaaaccgttgcggacattgctgtagctgcgaacctacattaggatacgtactcttgcgaaatagaaattgtggctagtttgaatcggactgtgcggatgatggtgttatggtacatgtgagatttttcctact

SEQ ID NO: 16685 - DNA, 1018 bp, Oryza sativa
  ref <308>: DATABASE ACCESSION NUMBER: AK067161
  ref <309>: DATABASE ENTRY DATE: 2001-12-06
gccttccatctgcagcagcaaccgccgcagccgccgccgatggcgatggcgagcacctaccagtaccagcagtaccagcagctgcagcaggcgcagcagctcttccaacgcgacgcgcagaccatcacccccgaggcgctcgagagcgtcaaggccgccctcgccaccagcgacgtcctcgaccccgccaatgccagagccaccgcaacctcctcctccgaccctgccgccaagaagaaagccatcccccgccgcgccgccggccaatcctgggaggatcccaccctcaccgactggcccgacaatgactatcgcttattttgtggagatctgggcaatgaagtcaatgacgacgtcctctcaaaagctttttcacggttcccctccttcaacatggcaagggttgttcgagataagagaactggcaaaacaaaaggatatggatttgtgagcttttcaaaccctactgaccttgctggagcaattaaagaaatgaatgggaagtatgttgggaaccgccctattaaattgcgtaaaagcaattggaaagagaggaccgatgttgatgctctagaaagacagaaaaatcacatccagaagaaacctaaaatgcccaagaaaagtatccttcacaagtaaagctatattagccctactaagcgccatccatgtaaacatactttgttgggtgatggggctcaagaaaactactcttactgcaaaggttgtggaccagggagggtgtacatttgactgcagctgtctgttagcagagtggtgcgtcgcttctaagcaatttttcttcttacgacaagctgatgtttacatctgcaggaagtttgttaaagctgaagctagttttgctgatgtttactgagaatgactccctagaatggatggtttgcttaaggtggtaatgatgtgtatttagatatggcatttgcatttaaggatggcattgcaatgtaataaagatgttgttggtattgtagtttatcttataaagtggcatcgcagt

SEQ ID NO: 16686 - DNA, 2507 bp, Oryza sativa
  ref <308>: DATABASE ACCESSION NUMBER: AK067162
  ref <309>: DATABASE ENTRY DATE: 2001-12-06
gaccccccctcctcccgcctcccatggcgacggccccgctcgccttccacctcccattccccttcccctccgcctcccgcccgccgcctagacttctacccccctcacgccgccctcccgccgcccgcctcgccgccacgcgccgcttccgcccgcccaccgccgacgacgagccccccgaggcggcggaggactcctcccacggcctcaaccgctacgaccagctcacccgccacgtcgagcgcgcccgccggcgccagcaggccgagcagccggagatcacccccgaccacccgctcttctcgtcccctccttcctccggggaggccggcagctacgaccccgacgacgagttcttcgatgagatcgaccgcgcgattgccgagaagcgggaggagttcacgcggcgtgggctgatcaagccgtccgccccggcgccctcgcagcccgaggaggaggacggcctcgccgacgagctctcccccgaagaggtcatcgacctcgacgagattcggaggctgcagggactcagtgtcgtgtccctggccgacgaggaggacgaggaggcgaacggcggcggtggcggggtggattacggcgacgacggggtgcccctcgacgacgacggcgaggtgttcgatgtggccgatgaggtcggcctcgagggggcgagggtgcggtacccggccttccgcatgacgctggccgagctcctggacgagagcaagctcgtgcccgtggcggtgaccggcgaccaggatgtcgcgctcgccggggtgcagcgtgacgccagcctcgtcgcggcgggggacctctacgtgtgcgttggggaggaagggcttgctgggctcaccgaagctgacaagcgcggggcggtcgccgtcgtcgccgaccagaccgtcgacatcgagggcacccttgcttgccgcgcgctggtcatcgtcgatgacatcacggcagctctccgcatgctccccgcctgcctctacaggcggccttcgaaagacttggcggtgatcggtgtcgctggcacggatggggtcaccaccacggcgcacctcgtcagggcaatgtatgaagccatgggtgtgaggactggcatggtaggcgttctcggggcctatgcgtttggcaacaacaaactggacgcacaacctgatgcctctggtgaccccattgccgtgcagaggctgatggcgacgatgttgtacaatggcgctgaggcggctttgttggaggcaaccaccgatggtatgccgtcatctggtgtggacagcgagatagattatgacattgctgtgctgactaatgttaggcatgccggcgatgaggctggcatgacctacgaggagtacatgaacagcatggcctctctgttttctagaatggttgaccctgagcgccatcgtaaggtggtgaacattgatgatccaagtgctccattctttgctgcacagggagggcaagatgttcctgtggtgacatattcatttgagaacaagaaggctgatgtgcacactctgaagtatcagctttccctgtttgaaacggaggtcctggtacagacaccacatgggatcctcgagatttcgtcaggccttcttgggagggacaacatctataacatccttgcatctgtagcagttggtgttgctgtcggtgcaccactggaagacatagtgaagggcatcgaagaggtggatgcaattccaggccggtgtgagctaattgatgaggagcaagcatttggggtgatcgttgatcatgcaaggactccagagtctctttcgaggcttttggatggtgtaaaggaactgggcccacgtcgaattgtcacagttattggatgttgtggtgagcgagaaagagggaagaggccagtgatgacaaaagttgcagctgagaaaagtgatgttgttatgttgacatccgacaacccagcaaatgaagatccattggatatcctggatgatatgctggcgggagtagggtggaccatggaagaatacttgaagcatggcacaaatgattattacccaccactgccgaatggacataggatattcctacatgatattagaagagttgctgtacgagctgctgtcgcgatgggtgaacaaggagatgtagttgttatcactgggaaagggaatgatacttatcagattgaagtcgataaaaaggagttctttgatgatagggaagaatgccgagaagccttacaatatgttgatcaattgcatcgagctggaatagacacctcagaatttccatggaggttacctgaaagccactgattctgatgtattcaatatagccgggcttcttctttgcttgctcaaggagcagcattttagattctccctttttgctatggtaggatgtacttcagaccagcgggtgctcaaggttgactacttgacccccagtactaactgctaacttctcagtgatactcagtaggtacaaaatatatgcaatgcagcttccccttaatttctgctgcc

SEQ ID NO: 16687 - DNA, 2178 bp, Oryza sativa
  ref <308>: DATABASE ACCESSION NUMBER: AK067163
  ref <309>: DATABASE ENTRY DATE: 2001-12-06
ggcgaggcgtttggcgtgggagcgaagccctctccctctctctctctcccgttggcggcttgcgcgcgcgcttccagcctcggaacgcacgagctcatgctcatgccgccgctcccggttgttcgtcttccgcttcctccttccgccgctcatgcggcccccacggcgcagtggccgcgagctctccgccaccgcggtgggggcggcatcgaggcgcggggtgatggccgcgggcgagggcggcgtggggtagtgtgcgccatggcggcgggggaggccgggcccgggcccgggccggcgccctccaggacccagatgataatggataagatctccagcggtgaagaagttggcggtgctgggggtgcgtactcatacaacgcattgaaaagactggatcaaatatggtctagcatatgtgaagcgcaatcagattccaaagtccctgaagttgttactcgagtccaagggccattggttgattatgatcttggtgatggctcagagatctttgatgtattagtgtgtggtggcacattaggtatatttgtagctactgccctcagttataaaggccttcgggttggaattattgaaagaaacataatcaaagggagagaacaagagtggaacatttcaagaaaagagcttatggaacttgtagaagttggcatcctttctgaagaggagattgaacagataatatcaagtgatttcaatcctactagatgtgcatttgagagtaaaggtgaaatttgggtggagaacatccttaatcttggaatttcgcctgctaaacttgttgagatcatgaaagaacgcttcgtttcttcaggaggagccatatttgaggggaaaagtttgtcaagcatttctgttcatgatgactttgctgtattaaacttgagtgatggtggttctctgccttgtcgacttgttattgatgctatgggtaatttttccccaattgtgcgacagatccggtcaggcagaaaaccagatggagtatgccttgttgttggtacttgtgctcgtggatttgacagaaatacaacaagtgacattattttcagtagctcatccataaagagagcaggaaattcaggagtacaactgttctgggagggttttcctgctggttctggtcccacggatcgcactacatacatgttcacctatgttgatccacattctgggggcccaaagctagaagaacttttggagacgttctgggatcttatgcctgcttacgaggatgtggttcttgaaaacctggatataatgagagtcatatttggaattttcccaacctatcggaatagccccttgccagctgcatttgaccgtgtcttgcaggttggtgatgctagtggaatccagtcacctgtttcttttggaggttttggaagcttgacaaggcatcttggtcgtttgtcaaatggtatatatgaagcagtttcaggagatcttctggatgcacgtagtttgcagctgctgaacccttatatgccaaatttaagtgcatcatggttgttccaaagagcaatgtcagcaaggccgcagatcgatgtttccccaacttttatcaatgagcttctctttgctaattttgagtcgatgcagaaacttggggattcagtacttcggccatttctccaggatgtaatacaatttggacctctggttaaaactctgggtctagtaatgatcactcgaccacagattttgccttccatttttaagcaggctggacctggagtcattcttaactggtcaggccattttgtgatgcttggttactatacattcctttccacctttatagacccaatcctcaggccttgggttgaatccttgccattgaggaacaaatatcaatggaaacgatatctcgaagcatggaagtatggagctggcttagattatcgccaaggggaataatcagcttcttttggaattagtctatatttcattgagaaagaaatacatacagataaaggaacatatataccttttctattaggtcaaatcactgtacagtgtagatacaaagaaaatttctttcttttttcagaccaagacagtgaataacatgttagttattgagaacaagtaatatgcggttcacttgtaagtacatattattaactgaagtgaatatgtaatgtctacattttc

SEQ ID NO: 16688 - DNA, 1641 bp, Oryza sativa
  ref <308>: DATABASE ACCESSION NUMBER: AK067164
  ref <309>: DATABASE ENTRY DATE: 2001-12-06
gggctttaactcgagcaggcaaccaggacgcggaggctgcgccaccgccgccgccgccgctgccgctgccggccacttcctccaccctcccctgagcctgtgcgcgcccaagctccacttcgtctcgcctctgaaccctagctccccctggtggtgtctcgaattctctcgtcgcgccatcgccatcgaacccggcggtgatttcgtttgcttggtgttcaagttgtgaggagacaatatgaggcagtggttttgttgtaattgccactttgacgaggaggatgaccatgggaaggaacgctccaatgctcagggcaataagatggatgccaagcaaaagtcttcaaaacctcctgctggtcaacctgaaccagagatagccccacttacaattgatgtccctgagttgtcactggaggacttaaaacaaaaaaccgacaattttggatcaaatgctctgattggtgaaggttcatatggacgagtataccatgccactttggatgatgggaggcaagcagcagttaaaaaattggatgcatctgaaaatgagcctaacgacgaattcttgaaacaggtctcccaggcatcaaggctaaagcatgaaaatcttgtggagatgttgggttactgtgtagagggcaattatcgtatactggcatacgaatttgcgaccatgggttcccttcatgatgttctccatggaagaaaaggagttcaaggtgcgcagcctggtcctgtacttgattggacgcagagggtaaaaattgctatagaggcagcaaaaggcttagagtacctgcatgagaaggttcagccttcaatcattcatcgggacatcagatcaagcaatgtacttctgtttgaggacttcaaggcaaaaattgcagatttcaatctcttaaatcaagctccagatatggcagcacgccttcattcaactcgtgtattaggaacctttggatatcatgcaccagaatatgctatgactggccagctgacgcagaagagtgatgtgtacagttttggtgtagttcttttggaactcctgactggaaggaaaccagtggaccacacaatgcctcggggacagcaaagtctagtcacttgggctactcctagattaagcgaagacaaggtcaaacaatgtgtagatcctaggttaaagagtgaatatcctccaaagggagttgctaagcttgctgcggtggcagctctttgtgtccaatacgaagcagagttcaggcccaacatgagcattgttgtcaaggcgctctctcctctgcttcaacaaaaaccagcagtgccagctgcctcagagccggcgccagcaactgagaattaagatgttagctcatggtagacctcccggcacatgccagttcgtaatcagcgcattctgtgtgtaattgcaattggtttaagaagtttcttttgtggggttctctgttggatgcagatcacatggatttctctttgccttttgttgctaccttaggtttgcggtttgagatttgtgctgtacattggtctgtaggtgcaagaatactgcttcctctcttttccacagcttcacttcagaggtgtcaaatactccagacatcgtttgaactttcaatagatgcaacatgttctgaattt

SEQ ID NO: 16689 - DNA, 2618 bp, Oryza sativa
  ref <308>: DATABASE ACCESSION NUMBER: AK067165
  ref <309>: DATABASE ENTRY DATE: 2001-12-06
gggtggatacggcgggtacactctgcaagcctgtgaacccagtagtccagcagtactcaccatggccgcgctgcgactgccaagagcgccgaccaccgcggcgctcgccgccggcgtcccccaccggttcccggcaccggagggggagcctccgccgccgcgcggccccaacagggcgcacctcaacgcgctgctcacgtcgtacggccgccgcggccgcctccgcgacgcccagctcctgttcgaccaaatgcccagccgcgacgtcatctcctggaccgccctcctcaccgcctacgccgacgggggagacctcgcctccgcgcgcctcgtcttcgacgacatgccccgccgcaacgccccgtcctggaacgcgctgctctccgtctacctccgcgcggcgcgcccgcgggctgcccacgcgctcttctacaagatgccggccaagaacgcggtgtcctacggtgccatcatctcggggctcgccaaggcggagatgctgcatgaggcggagttggtgtatgaggagatgccatggcagtggcgtgacccagtagggtcgaatgcgctgatggctgggtacttgagggtcggggagcttgccatggcactgagggtgttcgagggaatgacggtgagggatgtcatttcctggagcgccatggtcgatggcctctgtaaacatgggagtgtgtcagaggcgaggagggtgtttgacgccatgccagagcggaatgtggtgtcttggacttcgatgattcggggatatgtgaaacgtgggatgtgcagagatggtctcctcctgttcctgaatatgagaagagaaggtgttcaggttaacacaacgacactctcagttgcgctggatgcttgtgctgcggccagtcttgccagagaagggattcagattcacaatttgattatatcaatgggatttgagctggatattttcttgggtgattcaataatcataatgtattctcgttttggttggatggttgatgcaaaaagggcgttcgactgcatgcagcagaaagacatagtatcatggaactcactgatcacaggttacgttcagcatgacatggttgaagaagcacatgtgcttttcaagttgatgcatcagaaggatgctgtttcttggacatcaatggttgttgggtttgctaacaggggttggatgagggaatctgttgaacttttcgagcaaatgccagtaaaagacgaggtcgcttggactgcgatcatttctagttttatcacaaatggggactatctaagtgcagtgcggtggttttgccgcatgtcacaagaaggatgcaaacctaacacaatagctttcagttgtctgctgagtgctttggctagcctggcaatgttgaatcagggaaggcaagctcatgcatattcgatcaacatgggatgggtgtttgactctgccgttcacacttctttggtatcgatgtatgcaaaatgtggaaggttggctgggcttatcatgttttctcaagcattagcaacccaagccttattgctattaattctatgattacagcatttgtgcaacatggtttcgttgaagatgcgctgaaactatttaccaaaatgcaaaatgctggatacaagcctaatcatgttacatttttaggaattctgactggttgcgcacgtgctggttttgttcaacaaggttacaactactttgaatcaatgagaccagtttatggtgtagagccaaaccctgagcactacacatgtatggttgatcttttaggtcgtgcaggcctccttgctgaagcactggaaatgattaactcaatgccccagaatgatcattctgatgcatgggcagctttgctcagtgctagtagtctccattctaatctcgcttttgcaaaaatagcagcacagaagcttcttgagaaggatccttacgatgcaacggcttacacagtcctgtcaaggatgttctcctcagcagggatggaggatgaagaaatgctaaaagttgtacagctatccaacttggccagtaagaggcctggttatagccttattatgcaggataaggccactgaaatataacacatactgagaaccttctagttgactagttctagatctctgaccgatgaaaacaagaatgatcatgttacatggcactgctaaatgagaattaggatggcataaaaaagatatcacatgacttgtacataatgcctaaaatgtggatatctgaccaggtgcttggtgatatgctgttggcccagaactcgagatccatttttctggcaggtccttatttcttataggattaagtttgtccattttgatgcagctgagttttcacccttaactatgaaatcatctaacttgcactcttcaactaccaaaatgggcacaaataactccttttcaccacaaaaaatgtcttatttggccagaataacactggtggttttaagggtaggggttacactgattttgatagttaaagggtgaacaatagatcctttcttttctgagggtaacaattagatagtattgtagttcatgaatttacagtatttgttatttaagacctgtcataatctttatattgattccatcttcttttt

SEQ ID NO: 16690 - DNA, 2063 bp, Oryza sativa
  ref <308>: DATABASE ACCESSION NUMBER: AK067166
  ref <309>: DATABASE ENTRY DATE: 2001-12-06
gagccgcaccgcacgctttcttgcataagaactcccccccctcctcgctccccgccgccgccgccgttttcttggagaggagaaatccgtaggctcagaggatttttggtagtcttgtttcgtgatattcgtgaagagggggggagctaaggggggattcgtaagatcagaattggatcacgcgggggcgcgctcgggatcgggggttccaaacacagcttcttcgttgaatttaagtggatgtactaatggagtcaaagggtggcaaaaagaagtctagcagtagtcgttccttgatgtatgaagctccccttggctacagcattgaggacgttcgacctgccggaggcgtgaagaagttccagtctgctgcttactccaactgcgcgaagaagccatcctgatagccctttcggcttctccatcctagtagtttaggatttcttgcaattccattttggcacttttcttctgacctatttctctggctgctgcttcctgataatcgaccagttctctagtcttgctccctgcactcctccctcctccatctccggcacagtgttctgaccaacctgctccaatgggtgtcttgtctgctgctgaccctcccccagtctcagcaattgggtttgagggctatgagaagcgccttgagatcactttctctgaggcacctgtctttgctgaccctgatggtcggggtttgcgcgccctctccagggcccagattgactctgttctggatcttgcacggtgcaccattgtgtccgagctgtccaacaaggactttgactcctatgtcctctctgagtccagcctgtttatctattctgataagattgtgattaagacctgtgggactacaaagctcctgctcacaattccaaggattcttgagcttgctgaagggctttctatgccacttgctgctgtgaagtactcccgcgggatgttcatcttccccagtgcacagcctgctccccacaggagcttctctgaggaagttgctgtcctcaaccgctactttggccatctgaaatctggtggtaatgcttatgtgattggagatccagcaaagcctggccagaagtggcatatctactatgctactcagcacccggagcaacctatggttacccttgaaatgtgcatgaccggactggacaaggagaaagcttcagtctttttcaagacttctgctgatggtcacacatcatgtgctaaggaaatgacaaaactctcgggcatctctgacattatcccagagatggagatctgtgactttgacttcgaaccctgcggctactccatgaatgcaatccatggctcagcgttttctaccattcatgtgacccctgaggatggcttcagctacgccagttatgaggtcgtgggcttcgacgcctctactcttgcttatggcgacctggtgaagagggtcctcaggtgctttggcccttcggagttctctgttgctgttaccatctttggtgggcatggtcatgctggaacatgggcaaaggagctcaatgctgatgcttacaaatgcaacaacatggtagagcaggagctgccctgtggtggcctcctcatctaccagagcttcgacgctactgaagacgtacctgttgctgttgggtcgcccaaatctgttctgcactgcttcgaggctgagaatatggtgaaccctgctcctgttaaggaaggtaaactgggcaatcttctcccctggggagaggatgcgttggaggagaatgatggagtgtttgatgagtaagatgggacttctggtgacgattcgctgctttgttttcattccgtggcatttttatctgttgaggttgtcgtttggttattctgtgaagcagccagccaggctattagtattttcgcttgtaagcatgtgttctgatcttgggacgtatgcttggtctaaataataatggtgaactaaaagctctaggtggtcagctgcgtctgccacaatgagcatgcgtcgggagaaatgttgtcaaaacatatgaataagtatttgcgggaaatttcctttgccttctgct

SEQ ID NO: 16691 - DNA, 1118 bp, Oryza sativa
  ref <308>: DATABASE ACCESSION NUMBER: AK067167
  ref <309>: DATABASE ENTRY DATE: 2001-12-06
gaagcgaagcaaccacaccaggcaccaaggcaccaaccaaccgcgcgtcgaagcttctgggccacgccgccacaaaagccgaagcggaaaggaaaagcctccctcgatgcctcctctcctcgcctccacctcctccacgtcccctctcctcctcgcctctcgcctccgcggaggcggcggctgcggctgcggcggcgcccctctcctccaccggacgcgccgcggcttcctcgcgccgagcaccaccaccacccagacgacgaggacgagtttcgcggcgatgagctggctcgggaagctggggctgggcgggctggggggaagcccgcgggcgtcggcggcgtcggcggcgctggcgcagggccccgatgaggaccgcccggcggccgggaacgagttcgcgcagttcggcgccgggtgcttctggggcgtggagctcgcgttccagcgcgtccccggcgtgactcgcaccgaggtgggatacagccaggggaacctccacgacccgacctacgaggacgtctgcaccggcgccacctaccacaacgaggtcgtccgcgtccactacgacgtctccgcctgcaagttcgacgacctcctcgacgtcttctgggcgcgccacgatcccaccacgcccaaccgccagggtaatgatgttgggacccaatacaggtcaggtatctactactacacccctgagcaggagaaggcggcaagagaatctctggagaagcagcagaagcttctgaatcggacgattgtcactgaaattcttcctgcaaagaggttctacagggcagaggagtaccaccagcaataccttgcgaaaggcggtcgcttcgggttcaggcagtctgcggagaagggttgcaacgaccccatccgttgctacgggtgaagggcaagtttgaaccagaacgccacacaagaacagtgcttgaataaggataaataatagccagacaaaaattatgcagcataatactattttgttacctttgtttgtatcaatccatcgattgtaagagatgagctgaacctggaccatgatacttgccgctgattatgtacaaaccaccttagaaaacttgatatagtattatccttttcgatgcggg

SEQ ID NO: 16692 - DNA, 1468 bp, Oryza sativa
  ref <308>: DATABASE ACCESSION NUMBER: AK067168
  ref <309>: DATABASE ENTRY DATE: 2001-12-06
ggaaaaagttaatgagttatgttaccgggagttattacaagtagagtgagaggagacggcgcggcggcggcggcggcggcgggatggagagggagaaccgggtggagaccatctcccggctggcccagtggcgcatcgacaccttcggcccctcctcctaccgccgctccgattccttcaagatcggcatctggaactggttcccttcccaatcccaatcccccactactcagagatcaccgatttgccctatcaaatcaaatcatccgccaattcgatccgaatccgtgcaggtacctatcggtggagaaggctcgatatgtatacgtgaggctgttcccggagcccgggcgggtggccaaggaacggcccccgctcgcccgcttccttctccgagcttgctggtccggcccgccacgccgctcctgcgtctcccctgtgcatgagcatctcctccgaagcagcgaagactttttctggcaacttgatacgatgtacgctgggcgtttcactattgatgttgagtttttggacctgaagatagcctctaacaatgctgcagaatcatctacctcgatttggccaaatgaaagcatagcggtgcagaacattgctagtaagagcagtctcggatgcctttcgcgcatgctcacggagtcgatacatgcagacgtcaccataaatacgactgatggtgtcctcaaggcccataaggccatccttgcatcatgttctcctgtgtttgaaagcatgttcctccatgatctcaaggaaaaggagtcctccacaatcaacataaatgacatgtgccttgagtcttgctctgctctgattggcttcatctacgggaccataaagctagaccagttctggaagcaccgcctctcgctgctcgccgcagcgaacaagtacagcatttctgatatcaaggactgctgcgaggagagcctcctggaggatataaactctagcaatgtcctcgagaggcttcacgtcgcgtggctgtaccagctgcaaaagctgaagaaagggtgcctgacctacctgtttgtttttgggaagatatacgatgtgagggaggagatcaatagcttcttccagcacgcagatcgtgagctgatgctggaaatgttccaagaggtcataactgcgtggaagcccatatgagcgctagctccaaactgaccctatatatgggggggtctgtaaatattcggttgcacttgtgaagatgtacactgcgtccttgctagttgtaccccaatgtggatcagtattcagtttaagattcacaagtgtttatagtagaggaaagtggttgtgtaaatagtcgtgtggaaactgcagaactccgggcggcaaatgtgatgtggtgtgtaaatatcagatgcttgaaggcatgaattcatgtttatatgcatcatctgtggtggaatgcttgttgagaagcagcatgcatggaattagc

SEQ ID NO: 16693 - DNA, 1138 bp, Oryza sativa
  ref <308>: DATABASE ACCESSION NUMBER: AK067169
  ref <309>: DATABASE ENTRY DATE: 2001-12-06
gtcctgctcggcttcccccccatcccccgccttctcccctccgactccggccacctccgcggcggcggagcatcctagggtttcgcgccggctcgccgccggcgtacggagagggagggtgtaacacgcgcaggcctgcgccgtcgtcctgctctgggaacttccgcgtgcagcgagggatggacgagtgggttcgccaggccgaggtgtgggtgggacaagccgagaggtggatccggcagcagcctcccgagcaggtttacgtcgccgtcgcggtggtcgccgtgacggttctgttgctggtcgcagtttcgtgcctgaaatcctcgaaagcaaacaccatagtgctatctgggctcagtggtagtggcaaaactattctcttctaccagcttcgggatggatcaacacatcaaggaactgtgacttcaatggaacaaaacaacgatactttcgtgcttcattctgagctggagaggagaggcaaagtaaaacctgttcatgttgttgacgttcctggtcatgcaaggctcaaacccaaacttgatgaagtcctgcctcaagcagctggaatagtttatgttgttgatgctcaagatttcttgtctaccatgcatgctgctgcagagtacttgtatgacatcctgacaaaggcaactgtagtgaagaagagggttcctgttctgatattctgcaacaagacagataaagttacagctcactcaaaagaattcatcaagaagcaattggaaaaggaattaaacaagctccgggaatcaaggaacgccatatcatctgctgacatcactgatgaagtcaagcttgggaaccctggagaagcatttaatttcagccaatgccagaacaaggtgacagttactgaaggtgctggtctgaccggtaatgtttcagcggttgaggagttcattcgtgagtatgtgaaagcttaggccttagagttgtcggacctttacagaatagagtttgtattcgttcaaaattgtcatctaagcggagactgattttcctgatggaagaaggaaaaccttcatcatctcatctgcatctgcttcattccattcatgcgtgtgagaaatttcaacattttcttgaaaggaaagcatcggacattcagttg

SEQ ID NO: 16694 - DNA, 1968 bp, Oryza sativa
  ref <308>: DATABASE ACCESSION NUMBER: AK067170
  ref <309>: DATABASE ENTRY DATE: 2001-12-06
gagatgatctgaccaagaggagaagaagaagagagaggatcccaaccccaccacctctcctcctcctcctctctctctctccgatctgcctcgccgccgccgcggctgctcttctcctctcgcctcgcctcgtgcgcgcggcgagttcgacctcctcctcctcctctccgagcccccgcctcccctggctgcgggcggggggtttcgagggggtggacgcggcctccgtgtcggcttcggctcggatcgaattcaaagaagaggttggaaaccttggtggtgtagttagtgccaccgcccctgtctggagtggcatgtagttttcgcaaggctttgtttatgattttgtcgatggcgaggagatgaaggcatcgcaggtgtggcaacggggcagcaaggacatgacagccatgccccctccgcgccaacgaggcgccgcaagaagcccatgtggataatcgtgctgctgtcgctggtgtgcgtcgcgctcatcggggcctacgcgtaccctccgcgccgctactccgcgtgctacttcttcgcttcgagcgtctgcactcctttcaaggattggctccctactgtgacccgacgggagcgaacagacgaagagatcgtctcgtctgttgttatgagggatctccttgcaatgcccatgcctgtctcgaagaatccaaagattgccttgatgttcttaacaccaggttcattgccctttgagaaactatgggagaaatttctacagggtcatgaggatcgatattccatttatatccatgcatcgcgtgaaagacctgtacattctagttctttgtttgttggccgagagattcatagtgaaaaggttgtatgggggaggatttcaatggttgatgcggagaagaggctgctagcaaatgcattggaagatgttgataatcaatttttcgtcttgctatcggacagctgtgttccactacatacatttgattacatatataattttttgatgggaacaaacgtcagcttcattgattgcttccttgatcctggaccacatggaagcggaaggtattctgtggaaatgctccctgaaatagaacagagggacttcaggaagggtgcccagtggtttgctgtaacacgaaggcatgctttactgattttagcagaccacctttactacaataagttcgagctgtattgcaagccagcagagggacgcaactgtattgctgatgagcattatttgccaaccctcttcaatatggtagatcctggtggaatctctaattggtcagtgacacatgttgattggtctgaaggaaaatggcatccaaggtcgtatagagctattgatgttacctatgcactcttgaagaacataacggctatcaaagagaacttccgtattacaagtgatgataagaaagttgtgacaatgacaccctgtatgtggaacggaacaaagagaccatgctacctttttgctagaaagttttacccagaagctctcaacaacctactgaagcactccagctacacgtccacttgagctctacacgattctttgcttttggcctaggaattccctaggatttatttcttcttctattttatgtaaattgtgaaattgatatttagctgcgtaacacagattcagggccagagacatatcaacgttgctgcggcaatggcgatgtcttgcaaattctgagtccctaggtagggctgaggcgatatttatttagttttgatacagccctcattgtaacatgttgtgcttttttgtatgttgctatgagctgctcttcacgcccacattttctctcttttctttctagtttcctagctcctcccatctgttgaggaataggcgtttttgtcagattggaactgttattatatgatccattctttgtagacatgaagagattattatgacaccagcacaaccttacagttaatctgccctcttgagttttgttt

SEQ ID NO: 16695 - DNA, 1188 bp, Oryza sativa
  ref <308>: DATABASE ACCESSION NUMBER: AK067171
  ref <309>: DATABASE ENTRY DATE: 2001-12-06
gtggtgctcagtttcatacttatcagtgaattagatcatatacttgtgtccttgacagctcgttaattagcatggctaggtctctcgctgctctccttctccttctggtcgcagccgcgggagccagccatgccgcgtcgccggcggagatgtactggaagatcgcgctcccgacctcgccgatgcccggcgccattcgcgacctcatcagcccggcgagctcagcggcctcagcttcgaaggataaggaggatacggtgggctccgtgttcttcctcgagaaggacctcttcccgggctccaagatgacgctccacttcacccgcgccaccgcgcggcgccgcggctgctccctcgcggccgcgccgactccgtcccgttcgcctccgaaaagctcccggagatcctctcccagctctccatccccgccggctcgccgacccccgacgccatgcggtccacgctcgccgtgtgcgaggccgcgcggatcgccagcgagacggcgcccaagcacaagcactactgcgccacgtcgctcgacgtccatggtcgagctcgtcgcctccagcctcggcacccgcgacgtccacgccgtgtccacggaggtggtcaacacggccgcggccgacgccgaggcaggcgtacagggtggaggccgtgaggcccgtgccggtgcccgggggcgacatggtggcatgccacaggatgccctacgcgctacgccgtgttcggggtgcacgggatcaagggcgcggcgtacacggtgacgctggccggcgccgacgggaccatggcggaggcggtggcggcgtgccacggggacgtggacgggcacggcgtggcggtggcggaggcgtacaagaggctcggcgtggcgcccgggaaggtggcagtctgccacttcctgcctcaggacgacatgctctgggtgcgcaactgaatgaagcagctacctgcgcgccatccatggctaattaagctccttcctatattttcgatctacctgccggctggctatcatgttatcatcgcgtgtgtgtgcgcgccgatccgacatgcccacactacacgtcgacactacacgtgttttattttgttaattaataagtctggacaaccaggtcatcttgtacggcacttctcccctctgtcccgaaataaaccaacttataaagattgaagtttgtc

SEQ ID NO: 16696 - DNA, 2788 bp, Oryza sativa
  ref <308>: DATABASE ACCESSION NUMBER: AK067172
  ref <309>: DATABASE ENTRY DATE: 2001-12-06
gacttatttttttacttttcggtgaagcccgggaaaaagggcgctccatttcggagatttcgcacttcccaccccttcccttcgcttcctccctccctcgcctccgcctcatcgccgattcaaccgattcgccatcgccccccacctcgccgccgtcgccgccgccgcctcgtaaaccggtgggattttgcggggaggagggagtttggtgcgggagaagggggcggaggagtgggtggttttgttttttttttttttgtattttgtttttgtgtgtgagagaggggggaagggggcaatggagatggacacatcgccatcgtcttcggcgccgtcgtcgccggcggcgtcgtcggactccatcgacctcaacttcctgccgttcctcaagagggagcccaagtcggagccggcttcaccggagcgagggcctctgccgctgccggcagcggcaccgccgcctccacctccgccgccgcccccaccaccgccaccgcaggtgcaggcggcgacggtggcaactccggtgccggcgacgcccgacctctcggcggcggcggtgatgacgccgctgcagtcgctgccgccgaaccccgaggaggagacgctcctggcggagtactaccggctcgcgacgctatacctgtcgtcggcgggggcggccggcgtaatcgtgccggcggcggcgccggaggcctccgcgggggcggtggcgcagcccgggtcggggtccggcgcgaagaagcggcggccgcggtcgtcggagctggtgcgggtgtcctcgctgagcgtgcaggaccagatctacttccgggacctggtgcgccgggcgcgcatcacgttcgagtctctccgcgggatcctgctgcgggacgacgagcgcgcggaggtgctcggcctcacgggcgtccccgggttcggcgccgtcgaccgccgccgcgtccgcgccgacctgcgtgccgcggcgctgatgggggaccgagacctgtggctcaaccgcgaccgccgaatcgtggggccgatcccggggatctcggttggggacgccttcttcttccgcatggagctttgcgtgctagggctacacggccaggtgcaggctgggatcgactttgtcacggctgggcagtcttcctcaggggagcccatagccacatctatcatcgtgtccggtgggtatgaagacgatgacgatcgcggcgatgtacttgtgtacacaggacatggtggtcgtgaccccaacctccacaagcattgtgttgatcagaagcttgagggtggcaaccttgccctcgagcgtagcatggcctatggtattgagatccgcgtgatccgtgctgtcaagtccaagcgcagccccgtcggcaaggtatacttctatgatggcctctataaggttgttgactactggcttgaccgtgggaagtctggcttcggtgtttacaagtacaaaatgctgcgcatcgaggggcaggagtcgatgggctctgtaaattttcgactagccgaacagcttaaggtcaatgccctgactttccggccaacagggtatttgggctttgatatttccatgggtcgagagatcatgccggttgcactgtacaatgatgttgatgatgatcgtgacccacttttatttgagtatctggcgcggccaatatttccgtcctctgcagtccaagggaagtttgctgagggtggtggcgggtgtgagtgcactgagaattgctcaattggatgttactgtgcacagaggaatggcggtgagtttgcatatgacaagctcggtgctcttttacggggcaaaccactggtatatgagtgtgggccatattgccggtgcccacctagttgccccaacagggttagtcagaaggggcttaggaatcggcttgaggtattccggtcaagggagactgggtggggtgttcggtctttggatctcattaaggctggaaccttcatctgtgagtttagtgggatagtgctcactcatcaacagtcagagattatggctgcgaatggtgattgcttggtgcggccaagcaggttccctccaaggtggttagattggggtgatgtctctgatgtctatccagagtatgtggcaccaaacaatccagctgttcctgacttgaaattttcaattgatgtgtcaagggcaaggaatgtggcttgttatttcagccatagttgcagtccaaatgtgtttgtccagtttgtgctgtttgaccattacaacgcagcttatcctcacctcatgatctttgccatggagaacattccaccattgagggagctaagcattgactatggaatgattgatgaatgggtgggaaagttaaccatgtagtcaggctgtctactagaaggcaatactcagtttatcttcctttgttttgatgctttcataatccttctcatggagatttttgaggtgattgctgacaacaagtttctctgatggcgaataacagaagcttgcatatgggatgatgtttcaagccttcccatgaggaaggcaaagtcacagctcattgtcatccactaggcatcaaccgtccgttgtatatttttgcatggtagctgcagtgccccgtggctgattccctctcacccttgaagcttgatgcttgcttttgtaggaagcttgttttgcgcagcaagcaccgagtttcatacttgacctctgtttttctttttttttcccttcaattgctacgagaactccatatgtacatatatctgtacattacatgacttcaaaatgtgtcccacttctgtctgt

SEQ ID NO: 16697 - DNA, 2089 bp, Oryza sativa
  ref <308>: DATABASE ACCESSION NUMBER: AK067173
  ref <309>: DATABASE ENTRY DATE: 2001-12-06
gaatagttgagatgttatccaaagagtattattcttcgcgcctgctgctggcgcagccgcaacttggttctgttctgtcggcacatgacacgagctgagctagtgttcctgaaactgaaagataacgtatggtaaaccctctttgcttgctataaattcccgtcatcgcgtccctgaatcctcgcattcaacgaacaacgactactcttgactccactcaggagcagagcatggcagtcaatcacaaactcagcgccctcctcgtggccacggcgttgccgctgctccttctctccactgcagatgcgggcgagattggggtgtgctacgggagggatgcgagcaatctgatcgatccgccggaagtggtgaagcttctgaacgcgaacagcatcacgatggtgaggatctatgacactgacccgacggtgctcaacgctctcgctaacacaggcatcaaggtgatggtgatgctacctaacaaggatcttgcttccgctggtgcggatgtggggagcgcaaccaactgggtgaagaacaacgtggtgccgtacctcaaccagggcacgctgatcaatggcgtggccgtgggaaacgaggtgttcaaacaacaacctgaactgactggtatgcttgtctcggccatgcaaaatgtgcaaatggcgttagcgaacctgaacctggcggatggcataaaggtgtcgacgccgattgcattcgatgcactcgatgtgtcgttcccgccatcagatgggaggttcaaggacagcatcgcgcagtcggtgatgaagcccatgatcgacttcttggtacggactggctcatacctcttggtaaatctttaccctatgtacgctgcggcggatccgtcgacccacatctctatcgagtacgcaacgttccgtcctaatagtggtgtgctcgacgaaaaaaccggcatcatgtatttcagcctctttgatgctgagctcgatgctgtttacgccgcaataagtaaagtttccggtggtagcttgagggcatcattggcccaaggagatcaaatgttagttcaagttgcagaaacagggcattcctctggaaatacatttggtgggccagtggtcgttgaagctgacgcggatttgaacgcaatagctacaatacccaatgccaaagcgtacaacaatggtcttatcagacgtgtgctctccggatccccaggtaagcacgacgtctctgcctacatcttctctcttttcaacgagaacttgaagcctgggccagccacggagggacactttggcctattctacccaaacggccagcaggtgtatgaggtcaactttcaaggtggtagaagtccctgtccaacgaatgcaagctggtgtgtggcgaacccgaatgttgataatgcggcattacagagagcgttggactgggcgtgcaataatggcgcagactgcagcgctatccagctgggcaaagcatgctatgagccgaacaccttagttgcacatgcatcttacgcattcaatgattactaccaacgcaagggccaggctagcggcacgtgcaacttcaatggtgtcgctttcatcgtctacaagccatcaccaagcatctgcgatccgaacccaagttggtgcgttgcgaaagatagtgtcggggaagcacaactacagaatgcactagactacgcgtgcggtagttgtgccgactgcagcgccatacagcgcggtgcacagtgctttaatccggacaccaaagtggctcacgcaacctatgcattcaacgactattaccagacagccggtcgggccagtggctcgtgtgactttgccggtgccgcaaccattgtcacacaacaaccaaagattggaaactgcctactcccaccaaacaacgcttgatcagaacaaactgtctaggaagaccaaaagctagcctagctagctaccaaaggcagtgaggatgggattaaagaataattccatattcttctacagagaaaataaggattaaactttttgtatttcccgttggaaattttaaataaataaatgtactgtttgctcctgttgaatgaaattccgcagttacttgtttc

SEQ ID NO: 16698 - DNA, 2607 bp, Oryza sativa
  ref <308>: DATABASE ACCESSION NUMBER: AK067174
  ref <309>: DATABASE ENTRY DATE: 2001-12-06
gactgcgcacacacacacacaaacacaaagatggagagggtagcaacactggtctcttgtatagcggccgcgaccgctatgctgcttgcggtggcagcagccgcagcggggagtggcggcggcggctgcacgcggagctgcggcaacatcagcgtgccgtacccgttcggcgtggaggccgactgctactaccccggcttcaacctcacctgcaaccactcgtaccacccgcccacgctcttcctcgtcgacggcgccggcacgtcccaccaggtgctcgacatctccatctccaactccacggtgcgcatcaacagcagcctcatcgcgttcaccaagtctgccgacaagcaagccgtcatcaacacaacgtgggaggtgagaggcccgtactacctgttggatgatccttccaatatggtcgtcttggtaggctgccaagcgcggttcgacgtccggggaggaagcaacaacaccctgatcagctcctgcaccgtcgtgtgcccatcacctgatcctagcaccacctacatcggagctggcgacggctcctgctcgggcgtcggctgctgccaggcgaacatcgtcctacgctactctcgctacaccgtccagatccacgacctgcaagagcaggatgcgccgtcgtccagtcctacttttaatgatggctcggcgtacatagtagatcagccattcaattacaccggccttatgattttcgaaaaaaatttccctcaagcgctcccagccatgctagactggttcatagtaggtgataattcgacatgcccgatgtcgacgaatgagtctgcgcctgcgcctgcgtccgctgccgagtgtcgcagcgtgcacagcttttacgaaggttactacggtgacgtttctgacgatgtggtggtggggtatcggtgccgctgctctccgggttaccaaggaaatccttacgtaaaagatggatgctacggtatgtgtttaccctctctgttttttttacggaattgccagaaaacttgcgcaagttttttttcatcccagcttcccaatttttagccgtacgatgctacgttaaaatttgtgttaaaccagttatatattataattacagtatagttacaattagttacaataagatgcaataactgtaactatattataacctctatataatttaggtataaaaggttgcctatatttttttaatacttatatacaagttatattatagctataatataattatgaggagttacatcataactatgttacattatatttaaaagtttccacttaaaaaatttgcaacagattttttagataattatcctctatctcataatatatgacattacttagttcattttaaactatccaacgtcacaacaaaataaatatatttataatatttttagatgcatctatacatgatgtgacaaatttccaactacaaaggacaacattcaaatttctctaaatctctactacttaaaaaaattatttttttaaagaagtttccgtctgtctacaacaaaaaaaagagcgaaaaaaacgtaaaaagaaaaaaaaagaaagtccgattcaatcaatgacgcggaaaaaaaaagctgtaaaaaagggtgataaaaaaacgtaaggaagggtgaaaaaaggcgcggcagatcgctcccttgtgtcctaaccccgagtctgattaaaatagataaaatcaaatcttttgcaaaagtcaaagcctcctatttctatttctgaagatattctgtcacacaatccccaaccccgccccaaaaaaaaattcccggtcagaattccatcgcacaaataaaactgaagcatatacacacaaattttatccaaaaattcccatgcagctagatctaaggggagactaccgccgtcaccgccgaaccgccgccaccgtcgcagggacacctggccaccgccggctcccctcccactgcgccctccccaccgccagatccggcggagggaaggacaccgcccctatccgccgcctcccctcccaccggaagggtgggcgccaccgcctgccgccgcacgccacgatcaagccctcccgcggccccatggcgagggagaggaggcgaggggcagagaggctccaccgcccgtctcacggaaagagagccgctgacgccaaggattagcttgccggccgctgctcaccactgctcgccaggcagccttggcacaggatcgcatgtagaaggagagggagagaggaggcaccacggctgagtcgccggctcagggcaagggcaccgccgtctcaggggaagggtgccacggggagcgacgccgccatggggggagggacggagatggaggggagaagaagaaaaaccgagaggaggagagaaaaactgagaggagaaggaaaacgagataaggatctgcggaagactcgaggcacgcggcgctctctctccgagcggtaaaaaaaagtcaattgtgttacttgtaataatcatagtctaagcaggggttaagataaatcaagtgtagagtgacatacaagcagggagctaatcattctcatactaaaatatctaagctaagtggaaagaaaatagaaagagaatctattcc

SEQ ID NO: 16699 - DNA, 2014 bp, Oryza sativa
  ref <308>: DATABASE ACCESSION NUMBER: AK067175
  ref <309>: DATABASE ENTRY DATE: 2001-12-06
gtgtggaggggagcgagcgtgcaaggaagaagaagaagaggcatcggcatcgcgtcgggaaggccccccatggatatggatcctcccaccaataaccctagcccccctggtccccccgactccccgccgccggagaaggggctcgcctccctctccctccgcacctctcacctccctcccgacttcgagatccacgacgactacgacgacgacgacgacgagggctacctcactgccgtctccagggtagggagcatcagcacctccgcctccgcctggaaggacgacctcgaagacgccgacgtggctccacccagccccagcagcagcggctacgccgccgagaggggcaccagcctcgcctccagcgccgccgccaacgacgatccccaaccccaacccgacgacgacgattggccccgcgacaagaagcatctccacgaggacgatacttctgcttcatggcgcaaacggaaaaagcacttcttcatcttgagcaattctggcaagccaatttattctaggtatggagatgagcataagcttgctgggttttccgccacgttgcaagcaatcatttctttcgttgagaacagtggtgaccatatcaaatttgtaagggctgccaaacatcagatagttttccttgtcaagggtccaatatacttagtttgtataagttgcactgaagagtcatatgaaggattgaggggacaactagagctcatgtatggtcagatgctgctgattttgaccaagtctgtcaacagatgctttgagaagaaccctaaatttgatatggcaccattgctaggtggcacagatgcagttttcctatcacttatacatgcattcagctggaatcctgctacatttcttcatgcgtacacatgccttcccctcgcccaatccacaaggcaggcggctagtgcagttttacaagacattgctgattcaggagttttgtttgcactgttgatgtgtgagcacaaggttattagtctagtgggagcacaaaaggcaactttgcatcctgatgatatttttctactttcaaatttcatattgtcctctgaatcttttaggacttcggagtctttttcacccatatgccttccaagatacaattctatggctttcttatatgcttatgttcatttttttgatgaaaatacatacttgacacttcttactgcaagatcagacgccttttatgatctgaaagattccaggtcccgcattcagaatgttctcttgaaggcaaatgtccttgtggaagtccaaaggtctctgcgtgagagcgcactgcgcattgaagatctccctgctgatccatcttctcaatctgtatcaccacctccacagttctctcaagatctgcactttcagttattatcttctgaaatggcaattggtggaccagctggactttggcattttatatataaaagcatttaccttgatcaatatgtatcatctgagttccccttaatcataagcaatccaaagcaacagaaaagattgtacaaagcttatcaaaaattgtatgcttccatgcatgataaagcaactggtccacataaaacccaattcagaagagatgaagattatgttctgttctgctggataacccaggattttgagttgtacgccgcttttaatccactggctgacaagagtcaagcaatcaaggtatgcaatagagtatgccaatggatcagggacctggaaaacgaaattttcgtatacggagaaagcaccctttcctggtgatatattgtcttgcagtaccatcactgttggggagatatgagggattaggtttgtataacattttcactaaagtcatgattttatttgctacccagggtatttcatgtcaattttaattggttcctgtttgttgtcaatgccatttcgtttctttcactctatgtatgttcttcgtgtaatctaatccgttagtaccttttagagttagtaatttccatcgggatccatactcgttactgtt

SEQ ID NO: 16700 - DNA, 939 bp, Oryza sativa
  ref <308>: DATABASE ACCESSION NUMBER: AK067176
  ref <309>: DATABASE ENTRY DATE: 2001-12-06
ggcacggagatgagtttgtcgcttctgcaaggctactcctccgccgaggaagacgacccagccgccgccggcgccggcgctggcgagctgagcgactccggcgactcctccgctgaggacgccggatcagacggcgaggaggcttccgctgctccgaggccagccgcgaagccccgcccccgcccaaaccctagccgcggggatgctggcggcggcggcggggacggctcattgctgccctcagcactggatgccttcgcggagatatcgggcccgccggagttcctgaacaatagagtcgccgagcccgaggaggccgtggaggcgctcggagtgctcgaccgccgcggcaagggcgggaggggaagtgacagcaagcagccgcctcctggtgccgttgtggtcgcaaaacctcaattggttgcaattcgtgaacgagttagcagtggaacaaatggtgccaaccctccagtttctactgaaggaaagagaataataggtgcggcaaatcctggtccagaagatgctgctgatcttctaagaatgtgcctccaatgtagtataccaaagacctattcacacgcacgaggtatggtgtgtcctgtttgcaacgatagaccagagcaggcaagagagccagaaaagaagaaaggatcgaccgtcaaagacaaggagaagatcaaaaggatgagggggcaatcatcacacgcttcgtggaagagtgaaactgagatggccctgcggcaacaatttgactgattactaactagtgccacctcctatacttggtgtcatgtgttatgtacactgcgaatacttatgtaatcctatcttcatcaaaatcccgtagaactgcctccaagagtcatagtcggttcccgattgtgtttgctgtattttcagttttccaccatgaatatggatttgctcgataagctg

SEQ ID NO: 16701 - DNA, 2329 bp, Oryza sativa
  ref <308>: DATABASE ACCESSION NUMBER: AK067177
  ref <309>: DATABASE ENTRY DATE: 2001-12-06
ggttctctcttctctagtagactcgttctctcttcccctttccttcccctcggcctcgactcccccgtctctccgcgccagctcgttccccgccggcgccgcccagcgccgatctccgtcccgggggcagcagcgggcgccgccgacctgctgcttccgcccgcatcctcgtcgccggtttggcccggctctgaagtaagcaggattctgaatctgagaacgaggagttggattgggggactatggctcagatccccaatctcgacaatgctcctctcaatctcgcggccctcagggagcagtcgcagaaggacctgctaaacatcctcaagagtattagggggaagaagtgtgtagttattgatcccaagctcgcgggtaccctgtctctgattctgcagacctcactgctaaaggaatatggtgcagagttgcggcttctctctgctgaacccctccaaactgagtgcgctaagatcctatatctcgtacgctctgagctgaagttcatgaaattaattgcaagccagattaagaacgatgagcctaaagggcttcagagggaattctttctttactttgtgccacggcgcacagttgcctgcgaaaagattctggaggaggaaaaagttcatcagaaattgacactcggagagtaccccttgtatctagttccattggatgaagatgtgatttgttttgaacttgatcattctctgcaggaatgccttattgaaggggatactagttctgtttggcatgttgcaaaagctatccataagttagagtttgcctttggagtaattcccaatgttcgggccaagggtgttgcatccaccaaagccgcagagttgctgaatagtatgcaacaggaagatcctgtcaacatggatgatatggggactccggagataaacactgttattttgttagacagagaggtggatttagtgacaccgatgtgctctcagttgacatatgaaggtttattagatgagatgttgcaaataaacaatggatctgtggaggttgatgccactattatgggagcccaacaagatggtaaaaaagttaaagttccactgaattcaagtgataagttgtacaaggaaattcgagatctcaattttgaagttgtagttcaggtcttgcgccaaaaggcaacatctattcagcaagattacgccgaagtaaaatccaccaatactcaatcggtttcggagctgaaggactttgtgaagaggttacattcactgccagagatagctaggcatgttcatttggcacaacacttgcaatcatttactggaaaaccttcctttcatgcccgattagacattgaacaaacaatattggaggtgcaaaactttgaaatatgttttgaatacattgaagagatgatacataagcaggagcctattgaaaatgttcttcgccttctagtgttactttcacttacaaatgctgggttgccaaagaagaattttgactacttgaggcgggaaatactgcacagttatggctttgagcacatgcccttgttatacaatctggaaaaggctggcctatttaagcgccaggaatcaagaagtaactggattggtattacaagggctctacagcttatagttgatgtaaatgatactgcaaaccctagtgatatatcatacatattttctggatacgcccctctcagtattcgccttgttcagcatgctgtgagatctggatggcgatctattgaagaactgttgaaactattgccaggtcctcatctggatttgaaaagaggtagttcggccattaattcttcattggatgtacaccaaggtttggggcttcaacagagtattgacagggttggacatcgttctctggttttggttgtctttattggtggggttacttttgcagagattgctgctcttcgattccttagttctcaggaagggatgggctatgacttccttgttgcgaccacaaaggttgtcaatgggaacacaatactcaggccaattataaccaatagcaaagaggtgatgatatagagtaaataatcttttgctgcacatccttttcttttctgattgtactctcacacacccgagctccacttggttctcatagttgttacggctcccttgtatgttctcaaactgagtgtatatattttaacatctgtagatctttctagattaaaattccgcattctagtttggcatttcagttctctattgcgcgttttcattttccttttctacctcttgttgaatgtgcaaacttgaacgacaccagttatttctctttcaaatccactgtattttgcatc

SEQ ID NO: 16702 - DNA, 1842 bp, Oryza sativa
  ref <308>: DATABASE ACCESSION NUMBER: AK067178
  ref <309>: DATABASE ENTRY DATE: 2001-12-06
gagtcgacagttcaacaccatccagccatccaccttccccctgagtgtagcgtgcgcggccatggcgggcggagacgccgaggaggaggaggaggaggaggaggagacctacacgacggacgacgcgctcacgcgcgccggcttcggcaggttccaggccctggtgctcgcctacgcctgcgtggggtgggtcgcggaggccatggaggtgatgctgctgtcgttcgtgggcccgtccgtgaaggctgaatggggggtgtccggcgcggcggaggggctcgtcagcagcgtcgtcttcgccgggatgctcatcggcgcctgcctcggaggcctcatctcggacagatacggcagaaggatcggttttctttccacggcagttgtcactggtatatttggtttgctcagtgccttctcccccaactacgcatccttgctcgtcctccgctttgttgttggtttgggattgggtgctggccatgtgctgtccacttggttcatagagtttgttcctgctgcaaagagaggtacctggatggtcgttttccattgctcttggactgtgggaacaatcttggaagctctgcttgcctgggctgtcatgccagtacttgggtggaggtggctgcttgcattgtcttcggccccatgttttatcctgttcattttcttccccgtaacacctgaatcaccaaggtatctatgctcagtaggaagaacaatggacgctagggtcatcttggaaaaaatagcaagaatgaacaatagctctctccctcctggcatactgacttatgcctccacaaggagaatcgacaaagtgctcgatgattctgagacagcacttctaattacagaagatggtggttctggaattgatgagcatacaagttccaagcctggtggaattactgcacttcgagaatcttggtcatatgatctaataagatcaacctttcttctttggtttgtctatcttgcaaattattttgcttactatggggtaatattgttgacctctgaactgagcaatggtcagagaaggtgtgcatcagttgggataaattttatgcaaccaaaggatgccaacctttacagagatgtgctagtgaccagtttggcagaatttccaggtctggttttggcggctctattggttgacagaattggtcggaaagtgtcactggggatcatgcttttgttgtcctgtgctttccttgcaccacttgctgtacatttgggacaaggttcagtaactactcttctattctgtgcccggacttgcatcatgggaggctttgctgttctatacgtgtatacccctgagatctatcctgcatcatctcgcaacacgggggtaggaatcacatcttcctttggccggattggcagtatagtttcacctgtggtgactgttagtttgtcagagaactgccgccagaaagaagcagtgtttttcatggacctgatgctctttctagcagcagtggcatgcgccctcatccctctagagaccaagggccggcaaatccagtgaggcagtgatgctttcttcagtttgatgtacagaatcacattacattttggtcaattggagactagggcattctttcttatccagcacatatttacacctgccaaaattcactgacattttggattcaacaaagatgtgttcacctttcatgtgcaattgcagtgttgcaacaactgaaatgcaccagctagctctcaattccatacaagggtgaagactgaaaaaggtagcagcaacaactgtattaaattttgaaactcatgaaagggttggattaaattttggattaaagtggcatgcttttc

SEQ ID NO: 16703 - DNA, 1272 bp, Oryza sativa
  ref <308>: DATABASE ACCESSION NUMBER: AK067179
  ref <309>: DATABASE ENTRY DATE: 2001-12-06
gacacaaaacagcagaaactctagtgatcacaagctcagctcagctcagctccctccttctccccggagaagcagcggccggcacggcagcaatggagaccctcctctccccctccacattgctctcccctctccgcggctccaagaagaagccggcgagccccgccgcgtcggcgtcgtcgtcgtcgtcgtctcccgccaggtccgtcgtctcctgcgcgctcaggaggcagcagccgccgccgcaggcggtcgccgcttggcgcggagacggcggccgcggtggcggcgtcgggagctgggcgacgttcttgcagcacggcctggccgcggcggcgctgtcgctggcaatcagcatggcgccggcgcccgcgccggccgtggcgtcggagttcgacgtgctgaacggcgggccgccggaggacacgtacgtggtggacgacgccggcgtgctcagccgcgtgaccaagtccgacgtgaagcggctcgtccgcgacctcgagtcccgcaagaacatcaggatcaacttcatcaccgtgcgcaagctcacgagcaaagctgacgcgttcgagtacgcggaccaagtgctggagaagtggtacccgacggtggaggagggcaacaacaagggcatcgtcgtgctcgtcaccagccagaaggagggcgccatcaccggcggcccggccttcgtgcaggccgtcggcgacgagatcctcgactccaccgtctccgagaacctcccagtgctggcgacggacgagaagtacaacgaggcaatctacacgacggcgaagcggctggcggcggcgatcgacgggctgccggaccccggcgggccgacgttcaaggacaacaagagggagtccaacttcaagacgaaggaggagacggaggagaagcgcggccagttcacgctcgtcgtcggcggcctgctcgtcatcgccttcgtcgtgcccatggcgcagtactacgcctacatctccaagaagtgaacagcagcggctacctgttctttccaacaaaaaaagagagaaaaaatgagcagcatatggtgctgctctgtacagtaaatttgctcaggagatggctaaatctcccggttttctgtcggaattttagaggcgaaacagagaattatgatgaacacaggtgcaccaccgtgccggttaatttttattgtagtagcataactgaggcactgagcaattaggtgcaaatcagcacttccttaccccgattcctcttcttctataaccatttttttttgttgtt

SEQ ID NO: 16704 - DNA, 1116 bp, Oryza sativa
  ref <308>: DATABASE ACCESSION NUMBER: AK067180
  ref <309>: DATABASE ENTRY DATE: 2001-12-06
gattcgccatcgagcccgccggagccaaaacgccttctgcggcagcatccaccaattcgccatggcctccgagaccgagcccgacgccgtggtgttcgaggctccggcgcacttccgcatctacaagagcggcaagatggaccgccttcaccgaccaccctgcctgcccgctggcgtcgacgaggccaccggcgtcgcctccaaggacgtcgtcatcgacgccggcaccggcctctccgtgcgcctctacctccccaagatccaagagccatccaagaagctccccgtcctcgtcttcttccacggaggcggcttcctcatcgagtcggccgactcctccacgtaccacaactacgtcaaccccttcgccgccgcggccggcgtcgtcgtggtgtccgtcgactaccgcctcgccccggagcacccgctgccggcggcctacgacgattcctgggccgggctactgtgggcggcgtcagcgcaagatggctggctcgcggagcacggcgacgtgtcccgactgttcatcgccggcgacagcgccggcggcaacatcgtgcacgacatgctcctgagggcggcctccaacggcgggccgaggatcgagggcgcgttactgctgcacccgtggttcggcgggagcacggttctcgagggggagcccccggccgcggccgcgctcaccggtatgatatggtgctacgcgtgccccggcgcgtccggcggcgcggacgacccgaggatgaacccgcttgcgcctggcgcgccggcgctggagaagctcgcgtgcgagaggatgctggtggcggcggggcagaccgacgggctggcggcgagggaccgcgcgtactacgacgccgtggcggcgagcccctggcgcgggacggcgacgtgggtggagtcggagggggaggggcacgtcttcttcctggagaagccggagtgcgacaaggccaagcagctcatggaccgcgtcgtggagttcatatccgccgggtctcctgcctgattaaaaattagctccatccggatgcgccccgcgttgaagtcgtcgtaatgtatcgaacttagggctcgaataatttggactgatcatcctttcatgatttctgtgtt

SEQ ID NO: 16705 - DNA, 1325 bp, Oryza sativa
  ref <308>: DATABASE ACCESSION NUMBER: AK067181
  ref <309>: DATABASE ENTRY DATE: 2001-12-06
gagatgagcgcgcccccgccgcgcgctgcctacctccgccgcccgcgcgcgcaccacgccaacgacctgcgcctgcgccgcacgcgccgcgccgcggcgcggcggcggccggcgaccgctcgccgttcaaccccgtcatcgtgcttcgccgctcccccgccgccgccggcgacgacgactccctcgccgccgccaccagcttcgagctcttctacgacgacggcgcgggctccggcctccgcccgctcccggagaccatgtcggacttcctcatgggctccggcttcgagcgcctcctcgaccagctcacccagatcgaggccggcggctcgcccgcgccagggagaacccaccggcctccaaggcctccgtcgagtccatgcccaccgtcaccatcgccgcctcccacgtcggcgcagactcccactgcgccgtctgcaaggagcccttcgagctcggcgacgaggccagggagatgccctgcagccacatctaccaccaggactgcatcctcccatggctcgcgctccgcaactcctgcccggtctgccgccacgagatgcccaccgacgccgcccgcccgcggcccagcaatgccggcacagaggaggagacggtcggcctcaccatctggaggctgcccggaggcggcttcgccgtcggtaggttcgccggagggaggaggcccgaggagagggagcttccagttgtgtacaccgagatggatggagggttcaacaacggcggcgcgccgaggaggatctcctggggttcgaggcagagccgatcgacggagaggagtgccattaggcgcatcttccgcaatgtgttctcgtgctttggtcgcagccattcatcgaattctcaggcctcgtcttcgcattcgaggccggagttgaacgatgcgtctgaccggagcgccgtgttcagccatggctcaagaagccggagcacgagctggaggctcgaagatggccatgccgacgccatggtgcaaagataggcctcaactgaagtaaggaaggtcgtcgattgtttccatttcgcgcatatgtatttagaggaaaagaaatttgtagtagaacagaattgagaattggtgttgtacataggagcagcatcacatctactagtagatgataacttgcagggaagaagatgcccacgatggtgattctgaaatgagcatttgttgtttagagtgatgaatttgctcttgctggtagcaaatgtcgcttggaattctatgattcattcaaattcattgtggcgatgattctttgcatctgtgagaacggaatgaatgaaaccattttgatgtttgc

SEQ ID NO: 16706 - DNA, 1176 bp, Oryza sativa
  ref <308>: DATABASE ACCESSION NUMBER: AK067182
  ref <309>: DATABASE ENTRY DATE: 2001-12-06
ggcaaatttgcaaatgctgcatgccgggcgtctcttcttctctgtgtatcccttgttcttttgatattttgaatccgtttgtacagggatgtattttcgggttcttggagcagccaaagcagatggcttcttccggctacggcggagagaggctacagcctgatcgacgaggccggccaactttttttttccagtgaattgcatgcatgtaagtagcaaacaacagctgacgctgggttcctgaatcctatggcttggcagaacacggctccggcaccaatgcccggcatgcaagggtggcaggcggtggcgttccgcatctccggcgacaaggccttcttcttcggctgcgggttctacggcgcccaggacacgctctgcgacgacgccggccggcactacttccgcgactgctacatcgagggctccatcgacttcgtcttcggcaacggccgctccctctacaaggactgcgagctgcactcgacggcgcagcggttcggctcggtggcggcgcaggggcggcacgacccgtgcgagcgcaccggcttcgccttcgtcaactgccgggtcaccggcactggccgcctctacgtcggccgtgccatgggccagtactcgcggatcgtctacgcctacacctacttcgacagcgtcatcgcccccggcggctgggacgactgggaccacgccagcaacaagagcatgacggcgttcttcgggatgtacaggaactgggggcccggcgccgacgcggtgcacggcgtgccgtgggcgcgggagctcgactacttcgccgcgcgccccttcctcggcaagagcttcgtcaacggattccactggcttacacctgacgtctgaaagccgtttttcggcaccacaattaatttactggagacaagaacgtacatttgttagtacagcaaaagcgaagaatagaacattacgataaatataaagtattgaagtgactagtgcagtatatagcggtagattcattcgttcattcgttttgtctgatccggcttataatgatagctgctatagaattcaagcacagctctttacaagatctatagtagctatgtagtactgttttaaaagctttgtcatgtagacatgtacccatgcatgtgaggtgaatagtgaatatataattgattttgttgttacttt

SEQ ID NO: 16707 - DNA, 3231 bp, Oryza sativa
  ref <308>: DATABASE ACCESSION NUMBER: AK067183
  ref <309>: DATABASE ENTRY DATE: 2001-12-06
gctcctccgcttcgcagaccagccagccatgcctcccctcacgagcgccctcctctcccgctcctcctctacccgcatccccgccgcggcggcggcggcggcggcgatctcgaatcccgcgggcgccgccgcgtcgtcgtcgtcgccgtcaccgccgcctccgagctctcgccccaggccggcgtcccccttcacgtccggcctcgctggccgcatcttcggcggccgccgcgccgccgcgcgctcctcgtcgtccgccgcggccgtcttcgagcggcgcttcgcctcggcggcggcgaagaactcgtacgatgaaatcctgacgggcctcgcgaagccgggaggcggagcggagttcgggaaatactacagcctgcccgcgctatccgatccgcggatcgagcgactcccttactcgataaggattcttctcgagtcggcaatcagaaactgtgatgagttccaggtcaccgggaaggacgttgagaaaatcctggactgggagaacagcgcaccaaagcaagtcgaaatcccatttaagccagcccgtgtcctcctccaggatttcactggtgttccagcagtggttgatcttgcgtgcatgagggatgctatgagcaaacttggcagtgacccaaacaaaattaatcctctggtacctgtagatcttgttattgatcattcagtacaagttgatgtggcaagatcagaaaatgctgttcaggcaaatatggagctagagttccatcgtaacaaggagaggtttggatttttgaaatggggttcaactgctttccgtaacatgcttgttgttccacctggatctggaattgtgcatcaggttaaccttgaatatctggccagagttgtgtttaacaatggtgggatcctttaccctgatagtgttgttggaacagactcccacacaactatgatagatggtcttggtgttgctggatggggagttggtggtatagaggcagaagctacaatgcttggccagccaatgagcatggtattgccaggagttgtgggcttcaagttaacagggaagctgaggaacggtgttactgctacagatttggttctaacagtaactcaaatgcttaggaaacatggcgttgtcggaaaatttgttgaattttacgggggaggcatgagtgaattatcactggctgatagggctacaattgcaaacatgtcaccagaatatggtgcaactatgggtttcttcccagttgatggaaagacattggactacttgaagctaactggcagaagtgatgacactgtggccatgatagagtcttacctgcgtgccaataagatgttcgtcgactacaaccagcctgaagctgaaagagtgtactcatcttatctggaacttaacttggaggaggtagagccatgcttgtctggaccaaaacggcctcatgaccgagtgactttgaagaacatgaaatcagattggctgtcttgcttggataatgatgtaggcttcaagggttttgctgtccccaaagaatcacagggtaaagttgctgagttctctttccatgggacaccagcaaagctaaagcatggtgatgttgtaattgctgctataaccagttgcaccaacacatcaaatcctaatgtaatgctgggagctgctttagttgccaaaaaggcttgtgaattaggccttgaggtcaagccatggattaagacaagtcttgcacctggttctggagttgtgaagaagtacatggactagagtggtctgcagaaatatctagaccagcttggcttccatattgtaggctatggttgcacaacctgcataggaaattctggagaacttgatgaaacagtatctgctgcaatttctgacaacgatattgtcgctgctgccgtgttatctggaaacagaaattttgaagggcgtgtgcacgcattaaccagagcaaattatcttgcctctcctccattggttgtggcctatgcccttgctggcacggtcaatattgattttgagaaagaaccaattggcatctcgaaagatgggaaggaggtttacttcagggacatctggccttccactgaagagattgctgaggttgttaaatcaagtgtgctacctgacatgtttaagagcacatacgaggcaataaccaaaggaaatcctatgtggaatgagctgtctgtatcagcaagcactctctacccatgggacccgacatctacttacatccatgagcctccttatttcaaggatatgacaatgtcccctcctggcccacggcctgtgaagggtgcttactgtctcctgaactttggtgacagtatcacaactgatcacatctcacctgccggaagtattcaccctgacagccctgctgctagatatctgaaggagcgtggtgttgaaaggaaggacttcaactcatatggcagtcggcgaggaaatgatgagatcatggctaggggaacttttgccaacattcgccttgtgaacaagttcttgaagggtgaggttggcccaaaaaccatccatattccatcaggggagaagctctctgttttcgacgctgctacgaaatacaagaatgaaggacatgacactattatcctggctggtgctgagtacggtagtggaagctctcgggattgggctgcgaagggtccaatgctacagggagtcaaggctgtgattgctaagagctttgaaaggattcaccgcagcaaccttgctggtatgggtatcattcctctatgcttcaagtcaggggaggacgccgacacccttggattgactggccatgagcgtttcacggttcacctcccggccaatgtaagtgagatcaagcctgggcaagatgttactgtgacgactgataatgggaagtccttcacttgcacacttcgatttgacactgaggtggagcttgcatactacgacaatggtggcattttaccgtatgtcatcagaaagatcgccgagcagtaggatgaacgctcaagaagattgcgatgaggcgaatcgtaattgttgtaaacagcttgattagcgcaaccccattttttaggaatacctttcaaataaccttctgagatatccgcgaagaactcagaaattttgtgagctactacacttgcagttgtacgctgccacgggaaatgcggcgctaaatgacgctatgtgaacattaacattttcacttaaacacacgttgctaataattttccggc

SEQ ID NO: 16708 - DNA, 1475 bp, Oryza sativa
  ref <308>: DATABASE ACCESSION NUMBER: AK067184
  ref <309>: DATABASE ENTRY DATE: 2001-12-06
gcctttcccctctcaaaaaagggaaaaaggtcgcctcgcctcacctccttccacggctccaccgccgctgccgcgacggcgaccatggcggaggcggcaacgcgagggctgccgccggtgagccccggcctcccgctcccggaggagctcgtggtctgggagatcctggtacgcctaccccccaagcccctcctccgctgccgcttggtctgccgcgcatggcgccgcctcacatccacccgcgacttcctcctcgcccaccaccgccaccagccctccctccccctcatcgccgcctgcgactacgccgatattatgtacctcatcgacgtcctcaccctcaccctcggccgccgcaggggcgccgccgcgcggctccatccggtcgcccggtacgccagcaccgccgactacctggattcgtcctgcgatggactccttctcatctcccggaacaccggccccccgcaatactccatctgtaacccgaccacgcgccaattcggtgacctcccgctgatctccggattcatgttcttggggttgtaccagcacagccccaccggcgactaccggattctgctctaccgagctgagaaggtggtgttggaagatctgattcctgggcatgtcgagagagatgccagctacgtctacacattgggctccaacgacatgcccaggcgcatcggttgggcagagccagaggtgtccatgttagccggccacagcagacgctgcagacctgcccagcttcatggcagcctgctgcattggtaccatagcatcaaacgtatgattctggtgttcgataccacggccgagtcattccggtggatgcgcgcgcccattgacaagacggagaatgaattgaaccgggaactctgggcagatgtgcttgagatggattctacacttggcttgtactgctgtaatcatgacaagacgattgtaaatatctgggctctgcaggattacgagcaagaggtctggtccatcaagtaccaggttgaattgccggttacatgtatcaggggggaacttgacgtgggtgattcttggagtgtgatggtttcgtccgaggatggggatgaggttgtggttgtgctggttgattgcggacaatcggtgctttgctttgatactgacggcaagctgttggcgcgtctcgaacatgatggtaatgacatcatggttactcgtatgaagcttaaacaaagccttgttccacatgcattctttccgttgctaaaaagttatgtcgtgaatgatttgcctttcatctgatgtctgctaaatgaagtttgagcacacaaacttattattttctgaattgtgcttttatgtatgaaaacttcttagctgaacttattgcagatgaatgtgcaaccaggatacaataattgtatttggccacatgaatagttggttcattgtgacttataatgcaaaacctactacgtcttgattgaatt

SEQ ID NO: 16709 - DNA, 4239 bp, Oryza sativa
  ref <308>: DATABASE ACCESSION NUMBER: AK067185
  ref <309>: DATABASE ENTRY DATE: 2001-12-06
ggatggtggtgccgccatgaatttgatgtcgtattcgttattgaagaagttgggcgtggagatgatgagttgaagaagaccaacatgactctcaacagctttaatggtgaaccaatggaggcgaaaggtatcttttcagtggagcttaccagggggaacaagacgttgccaactgctttcttcatcgtcgatgtgcaaggtaactatagtgttattctgggtcgttgttggattcatgccagttgttgtgttccctccaccttgcagcaatgtttaattcaatgggacggcgatgatattgagatttttcaagtggatatatcgtctgaggttgcaatggccgatgcttcaattgaatggcaacatgggaatattcaatgcttatcggggttagatctttctagctatgattacattagtgtctctaaggatggttttgtacttattttctataaattcggctagtttagtatagctaggcaatattactttgtatcatgagtaaagatgctaatctagagtagttacaaaagagggttgttggtaattcttatcctcacagataaaattcgcaagtgcacggaatataccgatgtagtacttcacccgggagtattctcaggttcgatttccacaaggaacatgtgtgtcagctcttcaccaagttcgtccaaggacacgaagctaaagtgatgtgaccatggctactacagatacaaccattgctcacatcatggatgaacaagatgacatcaagatcaagtcctccaagtgctagaatccgattcggccacctactacattgctgaattcaatcagccgccgaatctgcatacaacctccgtttttgacccgtgagtacttggtggaaagctcttggagtcctctttccagcggatccggcctcaactccaaattccatcccagtcgtccacaaatgaagaaacaaggtgttgcatcaccagtcatgggcctttgggcttgtaactttgtttgggaccccggcccaagtggggcccaaggggggctgcgccccaaacagagggaggacgcccttctgacctcctccatcccttaaatagctagtaacccctccaaggttagtcgggttttgtttagatgaaagtttagccattgctacttccttgcagcgtgtgtgtcggctagaccgtccgtctgcttttattcgaaaccccaacttatcgtgtgtattcattcctatttgcaattcagattgcttttatcttgttcttgcttgtttcttcgatttgcttgcaagaataaggttgatctgcatcggcaagatcaacaacccacggagaggtgtatcgatcactaaggcgcaacacaacgtctcgtacggttgtagccggatcgtcaacgtttctcccaaatcatagttacctacaactcaccgaaagatcgggccaacaatagccttgagtgtcgaggggaactcagggttcatcaggtggtatcagagctttcgttgctcggtgagtttttatctacctataaccagaaaatttcccaacaaaaaaaattgtatcctatacctagccatctttgtgcctttgcattgttcttttcagtttttacgttgttgagttttgtgttgcattgtcgagtcgtgttgctggtattagcgtctagttcgtttagagtttcgagttctggtcacgttttgtaccacagtcatcgccgcccccgtgtctctgttgttgtcgggacctacgaaaacagaatcggctcgctgccacagttctattttcgtagttttcagaagtttctgttggttagtatttgagttcttgagttgcatagcttctgtttggtggttgtgccgtgatggtgtgtgccgtgatggtgcgcctgtgcatgcgcgcgtgagaaagatgaaaggagaagattagattagattgactggtttggtttatatttagtgccaagtctgtttctatttatcacctggtacctttccaaaccaaggccgagtgggattccttcccttgcgtcatctcgtagccgagacttgtgagtccgactcacactccctcatgattgtttctgtccgagttggttaaaaacttcgatgaaattttattttggtgtcgattcaagatccgtttgcaaaaacggaaccgacataacttgagcattccatttttgtataatttttaattttggtttggacttctacagttgagtccctgtaattttcatatttacatttgagtccctttgaccttacattgaggtccttgagtcggtttttggtaaaaaatcaaaaaaaagagaaaaaaaaggcagaaaggtgctaaaaaaaagagagaaaacaaaagccgccccaaaaaaaagagaaaggaaaaataaagaaaataaagaaaaataaagaagaaaaagaaaagaaagaaagaaaagtgaaaaatcagttgaatcattgagatttcttttatatatcagagcatgcttgagttgtttctagtgctatcttgtggtatcgtttgtgtctaggctcgcgtctctagtacgttctagcctaggaccagcacggtacttgactttgaacaattattcaactttgtattctctgatttgagcatttgctattgctttgctacatatttaagcctacccagagctccacagatttgattgcagccgtacagcaagtgtttgccaaggcatcgatacatccaaactccattggggtgcttggttgagtcagtgtacattatcattccgcttgctttggtaagaacttataagagcttggtgaaaagcttgagtatgtgtaatatttcagctgccactacctagtagttgataggagcgtgcatattcttgtgtatgtttcttgtttgctactaaccatggcaggattacacaaggggaaacgagatggtcatgctcaacctcgacttcttcaccatcaacgagatatagcgacttcttcacgcattgcatatgagggagctcagaacattcaccatgaggagaagagcgatatgctcgagatgtcatctccatcgctcacgaaggaagaagagaagactgatgcacctacattatctgaagagggcataaaaggtaaattaaatggtgctgatattactcaaggtgagtgtgcttctgatgagtcacatttgtccactatccatgctaatctagagcaaattttggtggaaactacttttgatttgcctttgtcacaagttgatttacttgctattccttgtgataaagaagagttgtgtaataatgcttcacttatatccctaccacaactagtgaatgaacatgctatttctagtgtttcattgtgtgctgattttaagcatgatgttcacattgctaatgatgttgaggaacgtaaattgataacttctttaaatacttttagctatgttcaatttgatgatttttgagagctcaataatttggaggagaaattagttgcttagtctgatttgccatgtccaactaatgctatttttcatatctttggcaaatataatgatagaggaatatatttggtgcatagagatttcagttgttcggattttgagaaacatgttattgctactcacacaacatcgagtttctctagttttgattggatgaaacaggttattttgaatggactatgtgacgagcaccgtatagaaaaatcgaggacggttttccgtgaagaaggggaggatgatgtgaccatggctactacggatacaaccattgctcacatcatggaagaacaagataacatcaagatcaagtcctccaagtgctggaatccgattcggccacctactacactgctaaattcaatcggccgacgaatctgcatacaacctccgtttttgacccgtgagtacttggtagaaagctctcggagtcctctttccagcagatctggcctcatatccaaattccatcccagtcatccacaaatgaagaaacaaggtgctgcatcgctagtcatgggcctttgggcttgtaactttgtttgggaccccggcccaagtggggcccaaggggggctgcgccccaaacagagggaggacacccttctgatctcctccatcccttaaatagctagtaatccctccaaggttagtcgggttttgtttagatgaaagtttagccattgctacttccttgcagcgctcgtgtcgactagaccgtctgtctgcttgtattcaaaaccccaacttatcgtgtgtattcattcctatttgc

SEQ ID NO: 16710 - DNA, 926 bp, Oryza sativa
  misc_feature (28)..(28): "n"=any one base of a, t, c, or g
  ref <308>: DATABASE ACCESSION NUMBER: AK067186
  ref <309>: DATABASE ENTRY DATE: 2001-12-06
gagtaggtaggccggcgccgccggcgantcgggtggggaggagaccgacggggcgagacgggagaggaggtccggcggccggcggcggcggcgacggcgacgacgcgagagcaggggagcaaggcggcggcggcggcgacgacgcggcgccgatgtgcacttggtctcggtgaagattgggaagccgtcgtccccgtaggattcgtgcctcccgacgatgcgcctggcttgccgccgccgcggagatcgtcggcaccatgaagttcttcgcggcgcccgcggggcgagcgggcttgggcgccgtcgtcctcgtcgccgcgtcacgctgcccgctgttcttcttcgcactacttgttcttctcctattccagccgcaccaccagcttgccgcgtcccacgtcgccgtgaaccagcaggtgagccttgtgccggatgcggcggcggcgaaggcggccggggtcgggaacggcgcggtggtggacgtgggcgacgaggaggaggagggcagcgggtcgaggtggatgctgatagtggtgacgacgacgcggtcgggcggccgggagcggcggcggcgcaacgccgcgctcgcccacgtcgagaagcactacttccccggcgtcgtccactccgccgacgccgccggtgtctacgacgcccatttcttcgacaagatccgccagaccgagtcagtactccatccatccatcccatttggtttctcacttcctttttttttgcttgattattagtactgtttcatttaggttgcaaattggaatgtgctaatccgaatgcttctttcttcatgttgatttctaattaacctcagaggttgaacctctctcattttttgcttgattattaggagcactctttcgtttataggttgccaattggaatgtgctaatctgaatgcttcttgatcg

SEQ ID NO: 16711 - DNA, 2966 bp, Oryza sativa
  ref <308>: DATABASE ACCESSION NUMBER: AK067187
  ref <309>: DATABASE ENTRY DATE: 2001-12-06
gctgtgaattcgagagaaaggaagttactagcgatcgggatggccgagagacggaaagtagagtaggtgttggtcaattagagaggacaaatgatgtacatgatggtggcagaaaaaagaggtggttgatgtcagttctgaatcctccacccaaaagaagggcgatctcagccatacgcaaatttccacgtgactgtgggagggctgcttctactcttgcggaaagtggtgcctctatggaggagttgcctttagaagcaacacctattagtgtagctaccggtggtgcctctatggaggattccttggcgagaacccctatttcagtccagggtgcttctttggtgtgcggtctagaccattctagtgaggcaatagatggcaagacaattgaagatgatgaatctagcaaggtagaaaataggatccaagagttccaagttgccacaaatgttgccgaagatgattttgaaggagccaagaatggtagtacacacccaaatgattctattgccaaaccttctcctagccatggttttgttgagagggtgaatggaaagggatcacaacaagaaaagaagcttgtagcacgaagtgctggggatggcaagatggtaagcaaatatgaagagagattacaaaaaggtactcccgagactcgtatgagagatcttgtcgatgtaaaggcaaaaaagaagatattaaagagtgataagatgaatggggcattgcaaaatgacgctagatcctctggagatggtaagatgaaaacgaaggcttcaagcactcagagaggtgtggtgcgctcggatatgagcttgaagcaaggtgatattgctcgtaaggttgatgccacaggcaaatgcaagggcggcgtgaatagcctcataaaggaggctacatctgggaagcatgctacgactaatggaattgaagaaaatgatgatagagaccttgtcagtgacaggataattgtacaagcactaatggccccagacaaatgcccgtggacacgaagaaggaagtctattggtggttcctccgagtctcgtactcctaagcttaagaaaaagtttggtaggccaaggaaagaattgaaagatactactccaagggaagaagtttccccggaagttgcctcttgtaaagcgatcaagcatgaggccatagaggacaaggaggattcttactttgaggatgaaggcaactctaaggcttcttactcggatgttgaaggcaactctaaggagctagtgcgtggaggaaaggcactagttgtttgtggaggaaagaaggagttatgtgttacactccctccttcggctccttttggcacagatccccgaagcaaaataaggaatttactcataaaattccatgcggcatgccgaaagcttgtgcaagttgaggaacaacataaaggtaatattggaagaattgacatcgaggctggtaaagccctaaaacaaaacggttttattaagcccggacctattgttggcaatgttgcgggagttgaagttggagatgagtttaattttagaatcgaattgtcatttgttggactccatcgcccatatcaaggaggtattgacagtacaaaggtgaatggaatcctcgttgctataagtattgttgcttccggaggttatcatgatgaattgtctagctccgatgaactcatatatacgggttctggaggaaaggccatcgggaataaggcagctggagatcaaaagcttgagcgtggtaatctagctttgaagaattctattgaaactaagactccggtccgagtgattcatggattcaaaggtcatagtaaaggtgaagctagccattctaaatccaagcaaatctcaacatatatttatgatgggctgtacatggtggtggattattggaaagaaggcccagagggctcgatggtctacaagtacaagttgcaaaggatcccaggtcaacccgagttagcattacacataatcaaggcaacgaggaagtccaaagttcgcgaaggtgtttgtgtgcctgatatatctcaaggaagggagaggattcccatacctgcgatcaacacaattgacgatacgcagccaacagcatttaagtacactacggaagtcatatatccacattcctatgcaaaagaacctctgaaaggctgtgattgcacgaatggttgctcagactctaatagatgtgcctgtgcagtgaagaatggaggtgaaatccctttcaattccaatggtgctattgttgaggcaaaacctctcgtatatgagtgtggcccatcatgcaggtgccctccaacatgccacaacagggtgagtcagcatggtatcaaaattccgctggaaatattcaagacggggaacaaaggttggggtgtaagatctctgagctctatctcttcaggcagtttcgtatgtgagtatgcaggtgaggtgctgcaagaaaatggagatgaacatgtagagactgatgagtacctttttgatattggtcatcactatcatgatgaagtttgggaggatcctaaatttgaaggcattttgggtctagaatcttctacgtccaagacaacggaggatactgaaggcagtaaaacaacggaggatactgaaggcagtactatcgatgcatcaaagtgcagcaatgttggaagattcatcaaccacagctgctcgcctaatctgtatgctcaaaatgttctctgggatcatgatgacatgaagaaaccgcacatcatgttctttgccaccgagaacataccgccgctgcaagagcttacttacgattacaattacggtaaagtcgaggataagaatggcaaggagaaggttaaaccttgcttctgtggttcgcctgattgctctcgcaggctgtactgagatgctgttggttgatgatgatgatggcgacaatggtgcccatttttcagtggaacactgttctgtcgtgct

SEQ ID NO: 16712 - DNA, 1112 bp, Oryza sativa
  ref <308>: DATABASE ACCESSION NUMBER: AK067188
  ref <309>: DATABASE ENTRY DATE: 2001-12-06
ggggccctaaacccccaaacgccgcctcctcctcctcctccttcctcgattccatcgaatcgaaccacgaaaccaatccacgcgagggcaaaatgatccagctgctgttcctggtgctcgtggcggaggcggccgtggcggcggtgctcctcttcaagacgccgctgcggaagctcgccgtgatggggatcgaccgcctcaagcgcggccgccgcgcgcctcgtcgccgtcaagaccgtcgccggcgtcgtcctcgccctgctcgcctccacgctctacagcatggccgagatcagcggccgcgccggggagaccccgaatccggcggcggcggcggcggcgcctccctctcgcccaccgaccaggtcctcttctcgcggcacctcctcgaggcatccctcatgggtaggtgttggctactcgatcaaatcggttctcgtgtgcgccggcccgatgcgctttcgtcttgagttggggatacccttattgcttgtcctttcgtactaaacagtagtcgtatcgtttttcacaaatgtagaaatccatttcgcacaaaccttcagtccgatcgctactgaatgacgcgctttccttaggtgtctgaaaatgttagaaggaataaatgaataaaatgatggcttaggctatagagagtcgtagctggtcttggagctgattcccataatcatgcctcagggatgaatgcacaaacaggagtgaacaggtgaaataatcttatggtctaatttaggcattttcttgtactaacgatacatcaaaagttcaagaaaagtctcaagttgttcgactggagcaaactcagttccttgagaggaattaaactcagccagttgggcttcttgccgcctgaccatctgagctgtttcctgtttctgtgttttgatgtcatatttatctaaaaagtatacttttccaccactgaaaagattgttatgagctcatcccatggactgtagcagtcaacatctgatgagtgttctgagtaaggacaataaaaatgtgcagtgtgaacttgggggtggaaaatacaacaatgttgcttcttgcttgtctacactcatcttttagtctaaggaaaaaatgattatacc

SEQ ID NO: 16713 - DNA, 1991 bp, Oryza sativa
  ref <308>: DATABASE ACCESSION NUMBER: AK067189
  ref <309>: DATABASE ENTRY DATE: 2001-12-06
gcttcacacgttcatctgcttctctctctcatctctcttctgccattgttcttgcatttcatccggttctgagagcgtctcatcgactctcttaccccggtttcttccgcggtttttcctcgtcctgtgcacgccaagatttcccaagaaacccgctcgctcgctgcccttcagagagcgaagggcggtgcggaattggagagggagagggatggggaggaggacatggcagtggcacgccattgcggcgctcggcgtcgcgtgcgcggccgccgccgccgtggccgccgataggagagccttctcggtgacctcggccgccggcggcggcgccgcggcggcggcggcggtggtggcggcgacgccggaggaagtgggcatccttcggaaggtggccaatttcttgtggcagactgatggcaactcgtaccaccacgtttggccggaaatggaattaggatggcaaatagtgctgggatcactgatcggattcttcggcgcggcattcgggagtgtgggcggcgttggaggtggtgggatctttgtgccaatgctgactttgatcattgggtttgatccaaagtcatctactgcaatatcaaaatgtatgatcatgggtgcagctgtctcaactgtctactacaatctcaagcttaaacatcctacgttggacatgccagtgattgactatgacctagccctgctgatccagcctatgctaatgcttgggatcagcattggtgttattttcaatgttttattccctgactggctggtcacagttctccttattatccttttcctaggcacatcaactaaagcttttctgaagggtgttgagacatggaagaaagagacaataatcaaaagggaggctgcaaaacgattggagcaaaccagtgaagaaccagaatatgcaccacttcctactggaccaggcgctgtagctgatgcaaaaaggccatcagatgaagcggcatcacttatgaagaacatttactggaaggagtttggccttcttgcatttgtgtggatggcattccttgttcttcaggtcacaaagaactacacagctacttgctccagttggtactggatcttaaaccttctccagatcccagtatcagttggagtgactatgtatgaagcgctgggcctgatgagcgggaggagagttctatcgtcaaagggaaatgaacagactacactgaaatttcaccagctctgcatatactgcttcttcggtatcactgcgggggtcgttggtggtctgctaggtctcggaggtggctttatcatgggtccactgttcttggaacttggcatcccaccccaggtttcaagtgcaacagccacctttgcaatgatgttctcatcttcaatgtctgttgttgagtactacctgttgaaccggttcccagtgccctatgctttgtactttgtcattgtggcattcatcgctgccattattggccagcatgtggtcaggaggttgatcaattggttaggacgggcatcgctcatcatcttcattttggctttcatgatctttgtcagcgcaatttctctaggtggagttggcatctcaaacatgattcataggatcaaccaacatgagtacatggggtttgagaacctttgcaaatatgatgcgtaggaagccatgcgtaaaaagcaagcaggcttagaagaagttaataataccataatccatttctctatcagcatcagaaccatgtggaaggagcatttcaagatttggttttccaatcatgtgaccagagagaatttggtcgtgcaacagcttggaggggaaaactgcatggattagaattcagatcaattttggagcacaaatatactgttttctagtctttagtttaagccagtacagcatgtatcacatattcacattgtatgaatcttcctgactcaggtagagttctgccagagattgcatcatcctagtctcctagatgggcattttgctg

SEQ ID NO: 16714 - DNA, 2799 bp, Oryza sativa
  ref <308>: DATABASE ACCESSION NUMBER: AK067190
  ref <309>: DATABASE ENTRY DATE: 2001-12-06
gagttgcttttgctgatgattggtttcttggccaatggtttggttgttgttttttttaaaaaaaactttcagggggctctgatttcttgtttcagttaaccgcccatacgaaggagtctactggcaaaattttgctctctattttttttttctgcggaatgatttcattttgatgtatgatagcacttcatagtatgataagtctggattttgattcactgcataatcttctgaatcataaagttggtgttttcctcggtgtcgatagtgctcgatcttaattgggcatgctttggttttaattagttgatcgcctagcaaaagttgctacaaattataatgattaatcatttggactttattatttttccaggtaccacaattctagcagagattataaatattcagaaatgggtgccaaagataatggggaagtaagagacgagaagggggttggatcagattatgaaccggccagagtttcaggagtttccaagaaactcatgagaaaggatacaagagaaaatagccctcgcatggcaaaaagcagtggcagccgtcaagttcagaacaagctgcaacataaagcttcaaacaacattcagagtagatctccaaaacccaggaaagttgttaacgctgcgaaatctgctgaagttagaaggtcagatactgtaagagttccttctcgtgctccatcagagctttctgaggaagcagacgatatagttagcgaggctggaaccgttgatgatagtaaaggcaatgaagaggccaaggagattgatgtgctagatgaagctccacattgtgatcagagcactggtactgacgatgaaattcctgaaattgaagaaaagatagttgatgatgagaaaccagttgtgtatcaaaggaatgaggagttacaatcaaagattgacaagttggaacaagaacttcgtgaagttgctgcgctcgaagtttccctctactctgtattgcctgagcacggaagttcggcacataagctgcataccccagctcggcgtctttctaggatgtacattcatgcatcaaagttttggtcctcagataagatagcttcggtggcaaaaagcactgtgtctggcctagtgcttgttgcgaaatcatgcagtaacgatgcatcaagattgacattctggctgtccaatacagttgtgctaagggagataattgcacaaactattggtatctcatgccaatcgtcttcaaccattacagccatcaacatgaatggtagtgcaaaaagtcttgatgggagatcgatgccaatgctatggacaaatagctccagtggcaaacaaaccaaatttactggcatgcaggtaccggatgattggcatgaaacaagtacacttttggctgcattggagaagattgaatcatggatattttctcggatagtagaaacagtgtggtggcaggcactaactcctcacatgcaaactccggtggaaggatcgtcaaccccaaagactgggagagtgttaggtccttctttgggtgatcagcagcaaggcaccttttctgttaacctgtggaaggctgcatttcacgatgcattcaacagaatatgccccctccgtgctggtggacatgaatgtggctgtttaccagtattggcaaaattggtgatggagcaatgtgtaggccgtttagatgttgcaatgtttaatgcaatccttcgtgaatcggctagtgagatacccactgatcctatatctgacccaattgttgacccaaaagtcctgccgattccagctggtgatctaagctttgggtcaggcgctcagctgaagaattctatcggaaattggtcgagatggttaacagataactttggaatcgacgctgatgactcagaggaggatggtaccgacacaggaagtgaaagaagtgcagctgaatcaaagtcttttcaactgcttaatgaattgagtgatctccttatgctcccaaaggacatgcttatagaaaaatctatcaggaaagagatctgcccttcgattggcctcccgttagtaacaagaatcctatgcaacttcactcctgatgagttctgtcctgatcctgttcctagcatagtcctagaggagctgaattctgagagtttgctggagcgatgcaccgacaaaagtgcaaccagcgcatttccatgtatcgctgctcctgttgtgtaccgccctccatccctactggatgtggcagagaaagtggcggacactggtggcaatgcaaagctagacaggagagcgtcaatggtccagaggagaggatacaccagtgatgatgatctggatgacctggattctcccctcgcatcccttatcgacaaaagcgctccgcctttgctgtctaaaggtagcgcgcattttactgctcaaagaggagtttccatggagaatgccagatacacattcctgagagaggtatggttggagaggcagtgattggtgaacctgtacaaatccagaatctcttctttagctaccttaaaaagggttgggaaggaaaacctgctgaggtgaaacctttgagagaagttgctcacttgcagagctagttaactaaacaagaatggctactgtcaaaatgcaaacaatttcgtgtacattcatatacatatgttgttcgtttgtagtataatagaagcaagccagaaatgaactttctctgttgtctgttggaactaaagaatgtgatgtcccatgggaaacgaaaagatgttctacctggacaacattatgtaggccagattctgatgcatgatttgtc

SEQ ID NO: 16715 - DNA, 1200 bp, Oryza sativa
  ref <308>: DATABASE ACCESSION NUMBER: AK067191
  ref <309>: DATABASE ENTRY DATE: 2001-12-06
gctcccccaaaaaattatcatcccgccgcgacgccatggccgctaccgtcctcctcctctcgccgcgcctcgccgtcgcgcctctacggccgcaccccaggctggggctgacccccaccgcagtcggacggcctcttcccctcgcctacctcggccgccgcgccgccgccgcgaggcagctcgccgccgtcgccgaccggaacgtctacaacggcgtctacggcccatggaccgtcgaggactccgacgtgcgcgaggtcttgctgtatcggtccgggctggtcaccgccgccgcgtccttcgtggccgccgcctcggccgcgttcctccccgaggggaacgccgccggcgacgccatcaggcaaggcgccgacctcctctacgccaccggagcggcggggctggggctttcgctcgtgctgattcacatctacgtcactccgatcaagcggttcctccaggcgctgtgggtggtcggagtcgtcgggtccatcgggacgtacgtcgccggcgcgcagccgctcgacgagagcctcgtcggctacgttctcgaccacccggctgcgctgtggttcgtcggccctacgtttgcggcgctcacaggcctcgtcttcaaggaaggtctctgctatggaaaactggaagctggtattttaacttttgttatccctggccttcttcttggacacctgtctggtctaatggacaacggaacaaaagccggccttttaggagtttggatggttctcttcactgtattcgcagcaagaaaattccagcagcccatcaaggatgacattggtgacaaatcagtttttatgttcaacgccctccctgaagaagaaaagaaggccttgatacagaagctcgagatgcaaactgagaccgatggctgaaaccagcacagcagctttagtacgtgtacgtccaaggaagtatatgcaattgatgtacatgtatggtagtttcacagataccggcacatgtcagtaagagtagtaactcagtttatacataggaatgagaatgtactagctagagtaattgcgatgtgtagttgcaaatcagatataaatatatatacatgttgatggatctcctctgggtatctgatcagagaggggtcttaccctgtacaactgtctgttctcatgtgattatcttctctgtgccttacggtgtatatacgtgaatttggct

SEQ ID NO: 16716 - DNA, 1774 bp, Oryza sativa
  ref <308>: DATABASE ACCESSION NUMBER: AK067192
  ref <309>: DATABASE ENTRY DATE: 2001-12-06
ggtctactattctttctctcctctcgctgttcccgacggaggaagggtggcagtggcacgcacgcacgccggcctcgcctcagcctcgcctcctcgcgcgcgcgcggccggacgggaggcacacggtgcgcggccggccggcctcattcgctcacctcgtcattgaactatataaaaaggttgtttgtcatgggtatttcatcgaagtggtttaaatcactggttggtataagaaagcaagaaaaggcccggaatgcagaaaaacaagaaaaggcacaaaatgcagagagctgcgaaacaagcacccctgctgctcagttgcttcacaaacggaaacattctttggatactgaacgtgcaatcttagtagaagaacttgcagtgcaaagtgaaccattgactgatgacaccaacacgcagacagtttcagattccatttcttcagacagtacattgcttggagtacatatttctcaaaccgaagagcataaaactaaagaggatgtggctgcaacactcattcagtctgcgtttcgagcattcctggctagacgggctttacgggcattgaaaggaatagttatactgcaggcccttgtaaggggtcatatcataagaaagcagacatcagaaacacttcagtgtatgcaagctctagtaagagctcaagctcgtgtcagagcaagacaagttcgtgtttctttagagaaccaagttgcacggaagaaggtccctgaacaagatgatcatgagaatcatgttcgagaaattgaggaacgctggtgtggcagtattggttctgttgaagaactgcaagctaaagtattgaaaaggcaggaagctgctgctaagcgtgagagagcaatggcatatgctttgactcatcagcgacaagcaggttccaggcaacagaaacctacaactccgcaaggacttgaacttgatgacagccactggggatcaaactggttagagaggtggatggctgtacgtccatgggagaacaggttgcttgacagtaacaccaaagaaactatgccactgtgtgatgataagcaggatatggaaacaaagtctcagatcacaccaaaggggaaagttcaagtttcaagtgccctttctaatggttctaacaagaagaaaggcataaaccataaaaaatcatattctgatgtaacttgtgcttcatttggacggtcgccaaatataccttcaacatctttgggatcatgcaaacaaaagtcaaagctttcagatgaagctttggaagaagtcagctcccagccaacagatcttgcgtctttgtccacatgccaaccaaaagccaagcttgtgcaagcgaatactccagtcaagaagtggttatctctgccaactaatgttggtgggggagcagcaaagggcgcgaccaacagcaactcgatttgcagatccaccagtgccaagtctgatccaaaaccacgggcaaatgcttctaaccaatccaggaagcaagttgagttgcaggcctgattgcacattcccctttccctctgacttcggtaagtcatttcttatttgctgtcctccagctgtgcatgctacttctatgtacataatttttttccaagaaaagaatactgtatcttagatcttggttggtggtgtgtttcgtatttttcttgtgcacggttgtgggtatgtcgtgccatatttttcttttgcatttccatcagtttttttaccctcttgtatgttgttgtgagttttgaaagaaggaactatgttatgtctg

SEQ ID NO: 16717 - DNA, 1588 bp, Oryza sativa
  ref <308>: DATABASE ACCESSION NUMBER: AK067193
  ref <309>: DATABASE ENTRY DATE: 2001-12-06
gagtcatccactccacaccaccacacactccccttcccttccttctccggtctcctccctctctcgtcgtcgtcgtcgtcgccgtcgccggctcgccgcgttctcctccgccgccgctgctgagccgggatggccgcgcgtagcccctacttcgtccccgagagcgaggggatccgggccggggagtcgccggccgcggcgctccgcaggatcctcgcgtcgccgggggcgcaccaggccccctgctgcttcgacgcgctcggcgcccgcctcatccagcgcgcggggttcccgatctgcttcatgggcggtttctgtgtttctgccgcacgacttggattgccagatgctggtctcatctcatatggagaaatggtagatcaagggcgtctgatcactgaagctgtatcactcccagttatcggcgatggtgataatggctatggaaatgctatgagcattaagagaaccgtaaaagggtatattaatgctggttttgctggaatcatgctcgaagatcaggtggcaccaaaagcatgtggacatactgaaggaaggaaagttatctcaagggaggatgctatcatgcacataaaagctgccgtagatgctaggaaagagagtggttctgacattgttatcattgcaaggtcagactctcgtcaagctatctctattgatgaagcgctatggagggtacaggcttttgccgatgctggagcagatgttctattcattgatgctcttgcttcaatagaagagatgaaagcattttgtgcggtttcacctaaagttccaaagatggcaaacatgctagaaggtggtggtaaaactcccatattgagccctgctgaacttcaggagattggttttagcctcgtagtctacccattgtccctgattggggtatcaatgctcgcaatggaggatgctctgattgcgataaaaagtactggtgcaccccgacctggtagcttgccatcttttcaggagatcaaggatactctagggtttaaccgatattacaaagaagaaaagcaatatgcaacagtccagcaagcccagccattatccacaaatattgtacttcgattaaagatcacagaaaaaagtggaacgcagaagataaatgaagggatacctgctggaatcctagagaagatatcaaaagctattccaggcttggctggtgtcaatttgacggaaatacttcagggtgcagatcagtcccagaaaggaaaattgctgcttgatcgtgaggatgcaactggcgacaggatccaggtgtccatcgagtgatcaatgcctacatacattgcctagaagcatggatggccagtaatgtagggcaaatcgccttcaatattgaagcaaacgattttccaagttgtaatggtagccgtttagcgtagtaccttgaagtgttacttctgcgagttgggttttcctctttgcgttgccttgtggtgttaataatcctggattcctgtgttgattcaaataaaagaaacctatcatcaggggctttagaatgttcttttctgcagacctacggcaacaaatgccagggatcatgacagcaatcttc

SEQ ID NO: 16718 - DNA, 2848 bp, Oryza sativa
  ref <308>: DATABASE ACCESSION NUMBER: AK067194
  ref <309>: DATABASE ENTRY DATE: 2001-12-06
gattttccattttcctcgggcaagaactgctttgtccactccgctgccatttgtgctgctccctcctcctctcctcctcgctggattcgtggcgaccaggccgagaaaaagaagcagagatagagagagatagaagagagagagagaatcaaagcaaagcagccatagtgagagagagaagaggagaaaagagagggataaaaggagcttgagctcacaaacaacaagcctctctccttctcctccttcttcttcttctcaacgatgtcctagctaggaatagcttctcttgtttgtagcagtaggctgctacgcgagccaatcgcccaatctgagctccctaaggttggcagtgggctgcattggcggcagagagagagagagagagagatcccttggttggactcccaccgtcgaaaacccaatcttgggtggcaactgatttggctggttctttttgttccaagatttgtggtcagcggatcaaaaaaatccttccactttttttgaggcgatttggttccggatttgaaggtttcttgccgcgaagatcgcgggttggtactgttttgcctggtagatccctttcgtttggctgcagaggaggagctatgagacaatgagagaagagagcgccaagaagagcaagctttcatggtccaaatcgctcgtgaggaagtggttcaacatcaggaccaaggcacaggacttccatgctgattctgaaaccacaacccaaggtagggatggtggtggtggagcaggggggagggccagcttctcagcgagctctgcaagcacaagttcagccaagaaaagcagaacagaccggtcgtcgtcgaagcggagcgctgatcgcgtccgccgagggaggaatgatttcgatctagcacgcctgacagaggttcaagattacagaatctttgccgcaacatggaatgtcggaggcaagtccccaccaagggggctaaatttagatgagtggcttcactcttctcctcctgctgatatctacgtgttaggatttcaggagattgtccctttgaatgctggaaatgttcttggcactgaagataatattccagcaaagaagtgggtatctcttattaggaggaccctgaacaagaatcctggggccagtggttctggtgtctatcatacgccgtcaccagtccttaatccagtcgtagaactagaagctgattttgaggcatctgcaagaaggcaggagaactactctttctttcaccgtcgatcattccataatctcagccgcagtttaagaatggatgcagactacatgttcccacaaccaaagttggacagaagatttagcgtttgtgacccagtcagcttaggaggtagaccaagtgactttgatggtaatttgcggtggcttgggtcaccagatgaggagaacatcgatgaggaactctctaacgctgcacaatgttctccacttccttatagctgcaatacaacggcacctactgaagctaacgacgagcaacccaatggatcaaggtattgtttggttgccagcaaacaaatggttggcatatttctcactgtctgggtgcgcaatgaaataagagatgatgtgagaaacttgaaagtttcttgtgtgggtagaggattgatgggttatcttggaaataagggttctatatcaataagcatgtctttgcaccagacaagcttctgcttcatttgttgccatttgacctcaggggaaaaggaaggggatgaattgcgcaggaattctgatgttatggaaatattaagaaagacaaggtttccacgggttcgtggtgctaatgatgtcaaatcacctgaaacgattcttgagcatgaccgtataatatggcttggggatttgaactatcgtattgccctctcctattgttcagcaagagctcttgtcgaaatgcataactggaaacaattattagaaaaagatcagcttcgaatacaacaaagatacgggagagtttttcagggctggaaagaaggaaggatttattttcctcccacgtacaagtattcgttcaattcagatcgttatgccggagagggcatgcatcccaaagaaaaaagaagaacgcctgcatggtgtgatcgcattctctggtatggtaatggcctcaaccagctgtgctatgttcgtggggagtctcgcttctccgatcacaggccagtgtacagcattttcatggcagaagttgagattgtacaccataggaggaaaaacatgggatatttcagctctagaattgaggtggaagagctactaccccattctcagagctacagagaaataaacttttactgattttgagttaccaacatgttgtaagattagggtactggccaaaaatacaaacatgcagggttcaagagtcagctcattaggtgatcagatatactcaagcaagatgtgcaaatactaacttaaaggatattgggcaattttgcaggcaaccattatgtcaaatggagatgtatcagcccatgccactaactatacactcactccaactttagcttcttagtttctctgagcaagctaatgcttcctttttttttctttttctttttatctgcttagagtattaataaacaccaatatattattttccccttccctttggaagctttgtaaaaccagctagtgtatcccatgcaagttgtggaattattgtaaaacattatacttagctttaggacaaactgttcctaggctgagggaggaatgatgagacatgtgagaagcttgcacagttacaatcatgtgtataacctttttattttggtgcctgaacagtcaagtaaggcatgcattagtact

SEQ ID NO: 16719 - DNA, 1101 bp, Oryza sativa
  ref <308>: DATABASE ACCESSION NUMBER: AK067195
  ref <309>: DATABASE ENTRY DATE: 2001-12-06
gaacgacctcaagcacactactagctccggctcacttagctccctactgatcactggaacactcatgaccaagaaggtgataccggccatggcggcggcgaggcaggattcttgcaagaccaagcttgatgagcgtgggggtagtcatcaggctccgagctccgcgcggtggatctcgtccgagcaggagcacagcatcatcgtcgcggctctgcggtacgtggtgtccgggtgcaccacgccgccgccggagatcgtcacggtggcgtgcggggaggcgtgtgctctgtgcggcatcgacggctgtctcgggtgcgacttctttggggccgaggcggcggggaacgaggaggcggtaatggcgacggattatgctgctgctgctgctgcggccgcggtggcaggaggatcaggcgggaagagggttaggcggaggaggaagaagaacgtgtaccgcggcgtgcggcatcggccgtgggggaagtgggcagcggagatacgcgacccgcgccgcgcggtgcgcaagtggctcgggacgttcgacaccgccgaggaggccgccagggcgtacgaccgcgccgccctcgagttccgcggcgcgcgcgcgaagctcaacttcccgtgctccgagcctttgcccatgcccagccaaagaaacggcaatggcggcgatgctgtcacggcggcgacgacaacggcagagcagatgactccgactctgtcgccgtgcagcgcggatgccgaggagacgacgacgccggtggattggcagatgggcgcggacgaagccggcagcaaccagctctgggatggcttgcaggacctgatgaagctggatgaagcggacacctggttcccgccattttccggtgcagcgtctagtttttgagctagtgttattagatctcaaccgttggattagattactggaaggccattcatttattcgtttcattgtatagctaattagctatacttcattgtttgtgcagagcacgttttttaggagtaccgtcttatacatatttttttgtacagagtagaaagtaacaagaattttgtatattgatggaatagattatttccaattaatatttgcgc

SEQ ID NO: 16720 - DNA, 663 bp, Oryza sativa
  ref <308>: DATABASE ACCESSION NUMBER: AK067196
  ref <309>: DATABASE ENTRY DATE: 2001-12-06
ttgggactgaggatgagcagcacgagctagatagcatagcaagaagggccaaggagaaagcggtggttgattcgccatgagcagcgggcgcgagagcaggtgggagctcccggcgacgctgcgtgcgctggcgcgcgacgccggccagcagctgcgggtaccccgcgcggccgcggccgcggccacgccggcggcaacggcggggcggcgcgcggcggacggcggcggcaaggcggacaaggtgatgcacctgctgctttgggggcccaagtgatcgatcgatgggcctccgccgcgccggccggccgccgccggcgggtcatcgtctcatctccgaccagatcacggctgtacaatatatatgtactagtactagctggctgattgctcgcttgctccgttctctttaatttcttatggtgtttttggtccagtatccatgcactgatgatgcttgtttgccgggtcagtctacaggggtttccaccgtttttctgtacatacgaatcaagtggttttcctcgtgaaaatcacatgcgttctaatcggtcctttttttatggagcaaaacttatgtatcatcaatcatgtactactaccttgtaaacttttgccttgagtttggggcaagtaatgatcagatcgtgtaagactgccactttt

SEQ ID NO: 16721 - DNA, 1156 bp, Oryza sativa
  ref <308>: DATABASE ACCESSION NUMBER: AK098992
  ref <309>: DATABASE ENTRY DATE: 2002-08-28
gacccacacattctcgaagaaggagaagaaggagaggagcagccatggcgtcgtcggtggcagcggcggcgagcacgttcctggggacgaggctggcggacccggcgccgcagagcgggaggatcgtggcgaggttcgggttcggcggcgggaagaaggcggcggcgaagaaggcggcgaggccgtcggcgccgacgacggacaggccgctgtggttccccggcgcggtggcgccggactacctggacgggtcgctcgtcggcgactacggcttcgacccgttcggcctcgggaagccggcggagtacctgcagttcgagctggactcgctggaccagaacctggccaagaacaacgccggcgagatcatcggcacccggttcgagaccggcgaggtgaagtccaccccgttccagccctacaccgaggtgttcggcctccagcgcttccgcgagtgcgagctcatccacggccgctgggccatgctcgccaccctcggcgccctctccgtcgagtggctcaccggcgtcacctggcaagacgccggcaaggtggagctggtggatgggtcgtcgtacctggggcagccgctgccgttctcgatctcgacgctgatctggatcgaggtgctcgtcatcggctacatcgagttccagcgcaacgcggagctggacccggagaagaggctgtacccgggggggtcctacttcgacccgctcgggttggcgtcggacccggagaagaaggagcggctgcagctggcggagatcaagcacgcccgcctcgccatggtcgccttcctcggcttcgccgtgcaggccgccgccaccggcaaggggcccctcaacaactgggccacccacctcagcgacccgctccacaccaccatcttcgacaccttctcctcatcctcttaatttaagctctttcgcgcgcaattcaaacgggatcgatgcgttggtgtgcgttcgcgcgcgctgtttagttttgtgatgacgagcgagctgggagggtatggagagaggagaggtcatccttttgttgattactacttaaattaggaaagctgggttggtggttaatggcgacttgcatggtggtgatttgtaatataagaacacccaagatgatgaattaatgcatccacttgtacacc

SEQ ID NO: 16722 - DNA, 2004 bp, Oryza sativa
  ref <308>: DATABASE ACCESSION NUMBER: AK098993
  ref <309>: DATABASE ENTRY DATE: 2002-08-28
gtggcgaaaaactggatcaacgcgagctagcgctcacctcaccacctcaccctgcagcgacagatagagtctgtagtagcgtacgatcgcggctagctatcgagctccagcgagaggcgtacgtgagtgcgtgcgtacgtgcgggagggaggaggaggggagatggcagggggaggaggggggagggcgttgccggagacgccgacgtgggcggtggccgtggtctgcgccgtcatcgtgctcgtctccgtcgccatggagcacggcctccacaagctcggccattggttccataagcgggagaagaaggccatgggcgaacgctcgagaagatcaaagcagagttgatgctgctgggcttcatatcgctgctcctcactgtggcacaaacgcccatctccaagatatgcatcccggagtcagctgccaacatcatgctgccgtgcaaggcagggcaagatatcgtcaagggcctgaagggaaaaaaggaccatcgccggaggcttctctggtacaccggagaagaagagagccatcgccggtcactggccggcgccgccggcgaggattactgcgcgcaatcgggcaaggtggcgctgatgtcatcgggcggcatgcaccagctgcacatattcattttcgtgctcgcggtgttccacgtcacctactgcgtcatcaccatggctctagggcgtctcaaaatgaagaaatggaagaaatgggaattagagaccaactcgttggagtatcagttcgcaaacgatccttcacgattccggttcacgcatcagacatcgttcgtgaaacggcatctgggactgtcaagcacacctgggctcagatggattgtggcgttcttcaggcagttcttcgggtctgtcaccaaggtggactacctgaccatgcggcaaggcttcatcaatgcgcatttgtcgcagaatagcaagttcgacttccacaaatacatcaagaggtcattagaggacgatttcaaagttgtcgttggcatcagcctcccattgtggtttgtcgcgatccttgtgctcttccttgatatccaagggttcggcacgcttatctggatctcttttgttccactcgtcatcctcatgttggttgggacaaagctggagatggttatcatggagatggcacaggagatacaggacagggcaactgtgatcaagggagcaccggtcgttgaaccaagcaacaagtacttctggtttaaccggcctgattgggtcttgttcttcatacacttgatactgttccagaacgcatttcagatggcacatttcgtgtggactctggcaacccctggcctgaagaaatgcttccatgaaaacatgggcttgagtatcatgaaagttgtagtggggatattcattcagttcctatgcagctacagcaccttccctctctacgcactcgtcacacagatgggatcaaacatgaagaagaccatcttcgaggagcagacgatgaaggccctgatgaactggaggaagacggcgagggagaagaagaagctccgggacgccgacgagttcctagcacagatgagcggcgacacgacgccgagccgcggctcgtcgccggtgcacctgctgcacaagcaaagggtgaggtcggaagatccgccgagcgcaccggcatcgccggggttcgccggagaggccagggacatgtacccggtgcccgtggcgccggtggtgcggccgcatgggtttaaccggatggacccggataagaggagggcggcgtcctcgtcggccatccaagttgacatcgccgattctgatttctccttcagtgtacaacggtgatggccgaaaggtttctctgtacttaagttgtatagcagcaaatataggagtacaatgtatagttggtacactacatatagagattagaaaagtacagtcgatttttttaagaaacaataaaagcataactttgtataacatattctttcggaagaaagatgcggcagcattgggg

SEQ ID NO: 16723 - DNA, 3943 bp, Oryza sativa
  ref <308>: DATABASE ACCESSION NUMBER: AK067197
  ref <309>: DATABASE ENTRY DATE: 2001-12-06
gggctcagatcacacccggtggcgagctgctgcgatcaccgacgcggcgcacccacgccaccaccaccacccgcggccgaacgcactaagcctctctctctctctctctctctcgccgccgccacgacccgacgcgacgcgacggggcccagcccacgcccaactccccctacatctccccccgccgcggcggcgggggcgcggtgaagcttcctccccgctccgctccgccgcgctgctctgctctgcctctgcagccgccgccgccgttcccggcccttcgatcggggcggggggccagatccccccgcgcgtcggccgagtgggagtggggcgcgcgggacggaggtgcggatctgattggtctacgcgcgagatctagccgggtgctgctgttcctgctggtggttgcggggatcggagcggaggcgggggaggaggagggatggcgtggtggtcggggaaggtgtcgctcggtggcctgcaggatatcgcaggggccgtgaataagatcagcgagagcgtgaagaacatcgagaagaacttcgacagcgcgctcgggctcgaggagaagcgcgacgatgaggaaggatcaggatcacatgcatctaactctgatagaatagggttctttaatcctgtcatggcattcatgggaaataatggcgaggaggattctgctgaagcatcagaaaagcagcaacctccaaaaagtacaaccgcagaacagagccaaagtgcctccacagaggcgcctacatccaaggtagatgcttctgaagaatcggaatcaacacaatctccaaagccttctgaacaaggagagactcttatcagctcaactgagccacctgtatccaaggctgaggtttctgagcaactagcaacaccaaaaactccaaaatcactttcagcaacagaagaaaagcctagtcattctactgaatcacccacatataaaggggattcagaagcaccacaatctcccacagatccatcaacagcagaagaaaacagtggatccactgagacgggtaatacaattgagacgggaaaccaggatcatcaagagacaaaatattctggtcctaatgatgaagcgccacaaagtcagattggagaatctgacagaggcatacctgatggtacaaagccttcttcacctactgaattagatcaatcaggtaacacgggaacaactgaataccttcatgctggaacggaaaacatagatgataaaaatgccatacaatcacaaccactagattccattctagccagttcagatgatgtaaatgaagctgtgaaaattgttaaaggagctgatgatcgaaatgaaataagcagttcacatgagaatactgacaccgttgaccaagctagtcatgtggaagtcatagaacatgatgagcatactaatgctgctgaaaatgatgaagaagctaatcgaacagaagcacaggtagcaactgttgttgaaagggaggagaatacaatggtgcagcttgaagaccttagctcaatgtccataattgtgagcaatgattcaaactcgcaaaatgagtcggtgcccacttctgcagatgtgcctgttggactggtagaggttggttccaattcaaatgatttgagaaaagaagaaaatatccagggctctgttacaactagcaatcatctggaatctgtcggtgctgtcgctgaacttgagaaattaagacgtgaaatgaagatgatggaagctgcattgcaaggtgctgcaagacaatcccagtccaaagctgatgaaattgcaagactgatgaatgagaatgaacaactgaaatcaacaattgatgatcttaagagcaagtcagctgaagccgaaatggatgcacttaaagatgaatatcaccagagagtagcaactcttgaaaggaaggtgtatgccttgaccaaagaacgggatacattaaggagagagcaaaataaaaaaagtgatgcagctgctcttttgaaagaaaaggatgaaattatcagtcaggtcatggcggaaggtgaagagctatcaaaaaaacaagctgctcaagaagctactatgcggaaacttagggcacaggttcgtgaacttgaagaagaaaaacaacggctgaactcaaagatccaggttgaggagacaaaggttgagagtattaaaagagataaggctgcaacggagaaattgctacaggaaacaatagaaagaaatcaaactgaacttgcagctcagaaggagttctacaccaatgctcttaacgcagctaaagaggctgaggcattagccgaagcaagagtcaacactgaagccaaagttgaacttgagagtcgtttaagagaagcttgtgaaaaagaaaatatcttaattaagacgattgaggagttgaggcatgctctcacaaggcaagaacaggaggctgcattcagggaagaaaggctgaaaagggattatgatgatcttcaaaggcggtatcaatccagtgaacttcgttacaatgaactggtcacacaagttcctgaatccaccagaccacttctaaggcaaattgaagccatgcaggaaacagctgctcgaagggcagaggcttgggctggtgtagagagaaccttaaactctcgacttcaggaagcagaagcaaaagctgctgctgcagaagaaaaggaacggtctgtaaatgaacgtttgtctcaaagctcatcccggataactgttctagagacccagattacaattcttagaacagagcagacacagctgagtcgatctcttgaaaaagagaggcagagagcatccgaaagtagacaggagtacctggcaattaaggaggaggcggcaatgcaagaaggacgggcgaaacagcttgaagaagaaataaaggagcttcgtactaggcacaaaaaggagctgcaagatgcagcagaacacagggagctgcttgagaaggaccttgaaagagaaaaggctgccagggcagagcttgagaaaacatcttcccgtgatgcaccaaaaattccgcttccagatcagacaagaaatgctcctctcagaaagctctctagttctggcagtatcaatagtctggaagaaagccatttccttcaagcatcattagatttgtcagacaacgcttcattagagaggagaatgtctgctgaaagtaatatgtcgtattatcttcggagcatgactccaagtgcttttgaatcagcactccgtcagaaagatggagagctagcttcttacacatcgcgtttggcctcattagaatctattcggaattctctggcagaggagttggtgaaaatgactgaacagtgtgagaagttgcgtaccgaggcttctgctctgcctggtttaagggctgagctggaagctttgaaacaaagacactttcaagctctagaactaatgggggaacgtgatgaagagttggaagagctaagaaatgacattgttgacctaaaagagatgtacagagaacaagtggatcttcttgttagccagctccaatctttgggtgctcgtgtatagtgctgctgtatgtcagtatgtagcttcggctgccatccatttttttttcgcatcgcgctaatctactaagccccatacagcagatctgaagcttggcgtgtttcttcgaaattcaagccgtgacaaataccgaaagttcatagccataccagtgtgaaaatattcttttttgtacatcttgaagcacaagtctttttggacagttgagcacccttgtttaatttagtaggttactctgttgtatactagtttggatagctttacggtttttaagcctattgtttgcaattctttccagtgaagtgtatcaaatttgtaattcgattaaaagtgtatcacagcggaatgcgaccccaataatatgagagctcgtttttgtcattttcctcaggttcgacc

SEQ ID NO: 16724 - DNA, 2678 bp, Oryza sativa
  ref <308>: DATABASE ACCESSION NUMBER: AK067198
  ref <309>: DATABASE ENTRY DATE: 2001-12-06
ccccccttcgtcctcgtcgtcttcctcccatttttttttcctcctcctcctcctctcatccctcgccgcgagccaaagcccctggtttcctcgcaactgcctccccgcgattccgtttgacccccactgttcttctcccctaccaccaccaggtcgcagtcgcttccaatttccaaataattccctccactccggccgctcgcgaggaaagaaaaggatttctttttctctctctctctctctccctctctccgagatccgtttcccaaacaggcggggggtcgaaagtgtttggtactttggtttggggagcttgtttgccgacgcggatctgcgtggagacgagcagaggggggagcgccggaattgggtggtttggcccgggaggcgccggaaagtgggggagcctttggattccccgaacccgccatggtgatccggcacgagtagtagtggtggtggtggtattagtagcagtgagatgccggcgcgtagcgcggtggtggtaatagccatggagccctcgtcgtccatcaccatcgcgtcgtcgtcctcgtacctctcgaacgggtctagcccgtgctcggtctctcttgcgccgccgggggcaggggcggtggcggcgcaggcggcgccggttgccgccggggagggcggcggcggcggaggaggaggaggaggaggagggagtagtagcgtggaggtggtgagcctgaatcggcttagcgctaacctcgagcggctcctcctcgattccgacctcgactgcagcgacgccgacgtcgacgtggccgacggtggcccgcccgtgccagtccaccgctgcatcctcgccgcccgcagcaccttcttctacaacctcttcgcggcgcgcggccgcggcggcgatggggctgccggcggcggcggcggcggcggtggtgggggaggggagaggactggggggaggccgcggtacaagatggaggagctcgtgccgggaggccgcgtggggcgcgatgccttcctgtcgctgctgggttacctgtacacgggcaagctccggccggcgccggatgacgtggtgtcctgcgccgaccccatgtgcccgcacgactcgtgcccgccggcgatcaggttcaacgtcgagcaaatgtacgcggcgtgggcgttcaagatcaccgagctcatctcgctgttccagcgacggcttcttaacttcgtcgataagactctagtagaagatgttcttccaattctgcaagttgcttttcattcagagctgactccagtgcttgaaaaatgtattcggagaattgcaagatcaaatcttgataatgtatcgttggataaggaacttcctccagaagttgctgttcagataaaagagattcgccaaaaatctcagccaaatgagggtgacaccgtcatttcagaccctgtacatgagaaaagggtcagaagaatccacagggcactggattctgatgatgttgagcttgtgaagttgcttcttaacgaatctgagatcaccttggatgatgccaatgcattgcactatgctgctgcttactgtgattcgaaagttgtttcggagttgttagacttgagacttgccaacttgaatttgaagaattcgcgtggatacacggcactccatctggctgctatgaggagagagccagctattatcatgtgtctcctaaacaaaggagcagctgtatcacaattgactgctgatggccagagtgcaatgagtatctgccggaggttaacaaggatgaaagactacaatacaaagatggagcaaggccaagagtcaaacaaagacagattatgtattgatatattagatagggagatgataaggaaacctatggcagtggaagattctgtcacctcgcctttgttggctgacgatcttcacatgaagcttctctaccttgaaaacagagttgcatttgcaagattattttttcctgcagaagcaaaggttgcaatgcaaattgcacaagcagacaccacaccagaatttggcattgttcctgcagctagcacttctggaaaattgaaggaagtcgatctgaacgagacaccagtaacacaaaacaaaaggctccgttcaagggtggatgcactcatgaaaacagttgagctgggacgtcgctacttccctaactgctcgcaggtgctcgacaaatttctggaggatgatttgcccgatagtcctgatgcactcgacctccaaaatggcacttctgatgagcaaaatgttaaaaggatgcggttctgtgagttaaaggaggatgtgcgcaaggcattcagcaaagacagagctgataatagcatgttttctatcttgtcatcttcatcgtcatcttcgccacctcccaaggttgcaaagaaatgacagaagttttgtaacaaatttccgctcgtgatgttactgggacaagagatatcgatcaatagacctgtatagtcttacagtggtataacaattagatatcgaagcttcttcgaatattagaaagtgctgttctgggctgcactcagctggtttatgggacccatgcggtgaaactggcaaaagaaaaccagctgattagaggctccaaagcagtgtctctcgtgaatatgtttgtagcattctgttttgttcaggatggctataatgataaaatcttttcaatagatat

SEQ ID NO: 16725 - DNA, 2727 bp, Oryza sativa
  ref <308>: DATABASE ACCESSION NUMBER: AK067199
  ref <309>: DATABASE ENTRY DATE: 2001-12-06
gagtctttctcctctttctctctctctcgcaagtctcgattactaccgggaaggccattcccagtgctccgaccgccgcgccaatcaaccgccgtcagccaccggacagccggccgccgccgccgcgcgtcccacttggcccgcatcgcaacgccaccaggggacgcgaccgccgcctccccacccctccggcaacgcccgcccggggccgcggccgcatcagccgcccgccgccggggacgcccatggcgacgacgccggagacgctgcccaactcggaggccgtctcccacgcctacaagttcgcctccacctgggagaagaacgcgccgctcacggagcagcagaatgccgcgatcgccgcgctctcccgcgccgtgtccgagcggccgttcccggccaacctggagaaaagtttagtgaaggatgggggtgtggttgtgccagaaaaagaggctgcattagaggagggtgcaatggatgcagtcttggtgaatacgcatcagttctacaaatggttttctgaactggaatcagctatgaaatctgagacggaagaaaagtatcgtctctacgagagtacattagaggaacgtgttaaaacatgtgatggtattcttcaacaagtggatgacacactgaacttatttgaagaactgcaatcgttgcatttgagtgttgccacaaagacaaaaactttgcacgatgcttgcgaccaacttttgttggagaaacaaaggctgattgagtttgcagaagcacttcgaagtaggttgaactactttgatgaattggaaaatgtctctactagcttttattctcaaactatgaacatcggaaatgaacaatttcttccacttttgaaacggctcgatgattgtatttcgtatgttgaaaataatccacaatatgctgaatctgcggtgtacttggttaagtttcgccaacttcagtctcgtgcattaggtatgattcggtcacatgtcctgtcaatacttaaagccgcttcatcccaggttcaagcggcgattcgaggtaatggttcagcaaaaaatgttgttacagagggtgtggaagcatcccttatctatgttcgcttcaaggcagctgctagtgagcttaaaccaatcttaggtgagattgaaagtagatcttctaggaaagaatacacgcagattctttcagaatgtcacagcttgttctgcgaacagaggttatacttgatacgaggcatggtgcagcaacgaatttctgaatttgctagaaaagaagctttgccttctctaacaagatctggatgtgcctatctgatggaggcatgccaatttgagcaccagctttttgctcactttttcccggcatctgcatcagatgtttcaagtattgctcctttaatggacccactgtgcacgtacttgtatgatactctgaggcctagactgatttatgagggaagcattgattctctgtgtgaactcgttgacattctgaaggtcgaagtgctaggggaacaactaagtagacgaggagaatcagtagctgggcttcgacccatattgcaaaggatacttgcagacgttcatgagcggttggccttttgtgctcggactcatattcgtgaggagattgcaaacttccgcccttctgatgaagatctggattatcctggaaagcttgagagatccgtagatgcaactacaagttctaatgttagtggcaactcggacatatatgtgacatggtatagaccactggagaaaacagtgtcttgtctgtcaaagctatatcaccgcttagaacctacagtttttactggattagcccaggaagctgtagaagtttgctccacatctcttcagaatgcaagcaaggtcattgcaaaaaaagcaactgcaatggatggacagcttttcctaattaagcaccttcttattttaagagaacagattgctccatttgatattgagttttctgtcacgcataaggagctggatttctcccatttgctggatcacttaagaaggatcctcagggggcaggtctcgttatttgattggtcaaggtcaacatcacttgctaggacgttttctccccgtgttctggagaaccaaattgatgccagaaaagaattggaaaaaagcctcaaatctacctgtgaagagtttataatgtccattacaaaattagtagtggatccaatgctttcttttgttactaaggtaacggctgtcaaagttgtactgtcctcgggtagccagggtcagaaattggattctgttctggctaaaccccttaagactcaagcatttgcttctcctgataaggttgcggagctggttcaaaaggttgggactgctattcagcaagatttacccaaagtaatgaccatgatgaggttgtatttgcaaaatccatctacgcggttgattttattcaaaccaatcaagacaaatatagttgaggctcatatacagctacactcccttctgaagtcagaatacacagctgacgaaatccaatcaattggtatgttgcctatacccgacctccagtctcagctcgaggctcttttgtaaccgttatcaagatgcaaatgcgaccctacgttttgttcgttgagacggtaaatggtatcctgaagtacagtaaccccgttgtaccagagtgatcagtgatgttgtaaaaatgtactatgttactgtggaatggagcatcattcttgtgtgg

SEQ ID NO: 16726 - DNA, 2152 bp, Oryza sativa
  ref <308>: DATABASE ACCESSION NUMBER: AK067200
  ref <309>: DATABASE ENTRY DATE: 2001-12-06
gagtcagctatagtggcttctaacgcaaacaagcgaagcgtccgaagagacgcgacgcgtggcacagtactctagctagctaccgcctcccaaggaagaggagaaatcgaaggcatccaaccattcgtcatgcatctagcttccacaaactttcgatcgatttcactacaagaagaaccctagttagttagcaagtataattagctcactagctagtactagcagccatggttgttcaattgatgctcttcttccatgacaaattcatggctccaatggcagaggagccactgcccttcgtcctcatcatgatcatcatcttgctgctgctggtgcttcttcactactacctgtctgcatcaaccagaagatcatcggcggcgagcaagagcaacgatgatgtcctgccaccgtcgcctccgaggctgccggtgataggccacatgcacctcgtcggctccaaccctcacgtctccctccgcgacctcgccgagaagcacgccgccgacggcttcatgctcctccagctcggccaggtgcgcaacctcgtcgtctcgtccccgcgcgccgccgaggccgtcctccgggctcacgaccacgtgttcgcgtcgcggccgcgctccgccatcgccgacatcctcgcctatggctcctccaacatctccttctccccctacggcgactactggcgcaaggcgaggaagctcgtcgccgcccacttgctcagccccaagaaggtccagtcgctccgccgtggccgcgaggaggaggtgggcatcgccgtcgccaagctccacgaggcggcggccgcgggcgccgccgtcgacatgagggagctgctcggctccttcaccaacgacgtcctgtgccgcgccgtgtgcgggaagtcgtcgttccggcgagaaggccggaacaagctgttcatggagctcgccgccggcaacgctgatcagtacgctgggcttcaacctggaagactacttcccgagcttggcgaaggtggatctgctgaggcgagtggtgagcgccgacaccaagaagctcaaagagaagtgggacagtgttcttggtgacatcgtaagcgagcatgaaaagaaatcgtcgctgcgtcgtgacgatcaagtacagatggatgatgaccgtgatgatgatcaggaggagcaagagtcagatttcgttgatattctgctcgatcgtcaacaggagtacaatctaaccaggcacaatatccatgccatattgatggacatgtttgcagcggggacggacacttcatatatagcccttgaatttgctatgtccgagctcataagaaaaccacatctcatgaccaaactacaagatgaagttaggaagaacacaactacccaaatggtaagtgaagatgacttgaacaatatgccctacctaaaagccgtcgtaaaggagacacttcggttgcatccaccagttccgctcctcctcccgcgcctctccatggctcagtgcaatgccaatggttatacaatcccagccaacacacgtgtcatcatcaatgtttgggctcttggcagagatgctaaatgttgggagaattcagaagagttcatgccagagaggtttatggatagtggagacactatagataatgttgatttcaagggaaccgactttcagtttctcccatttggagctggacgaaggatttgtcctgggatgaattttgggatggcctctgttgagctcatgctatcaaaccttatgtattgctttgactgggagctcccggttggaatggacaaagatgatgtcgatatgacagatcagttcgcacttacaatggcgcgaaaagagaaactctacctcatcccgagatcacacgttatcaagatcacataacacaacatatggccaacatttcaatagccatgagttctgtatggtagccatagataccaagcaatagcgtagttatctgctataagatatatataatagtaccaaataaaatagagagtccattcgtctcttgagggggacaaatagaagtaaataacaagaagaaagtcaatatgttttaaataaagatgttgaatatatgctataatatagcagatgtcaatatgtacgtttgttaagaaatttatgttgaattaagtacaggtacatactc

SEQ ID NO: 16727 - DNA, 1156 bp, Oryza sativa
  ref <308>: DATABASE ACCESSION NUMBER: AK067201
  ref <309>: DATABASE ENTRY DATE: 2001-12-06
tcaagtttcgttggtttggaattcaagggatgagcgatccaaaaatgcagagaagttgagcttgttgtcagaattcttatggagaaatgggggaccaagaagtaatgttcatctgattcactctatatgggctaattttcagacatcaaccagcaatataatttttgggcataaatggagacatctcattggggagaacgacttatgggagcgttatggtggagttgatatttctctggatccttatagctttgggcaggctaatactttgtcttttaatgcgttactgcatacgttgcacaaatatgtaccacgtgggtcaacagttgttgacctgtattctggtgctggtgttattggattatctcttgctgcttcgaagaaatgtaggtctgtgaaatgtgttgagattaacaaattgtcaaaaatgtcttttgaaaaatcagcaagccgacttcccccaaacctgggttgtaccataacttggcacaacactgatgcttcagttgaacctgttcattggctcgaagggtcaagtgttgttattgtggatccacccaggaaaggattgcacccctctgttatctgtgctttacagaaagttgctttgtccgaacgcaaggcatataaggcgaaaagtacacttacaaaggtcaaagatgagaagaggccatggatcctaagagcaagagaggcagctgttcaggttgatagtacaccattggaaggaagtagtgaaacgtggccagaaactcttatatacattagctgcggatgggacagttttaagaaggactgcaaaagcttgatgtccagtaaggcttggcatttgcagaatgctcatgcttttaatttcttccctggcactgatagcatcgaagtgctggcaatcttcaaacgagaatcggaagcagttcaaaagaaaaagaagaaagctaagaagaagaaagccaagtagacacccgaaaagctaaccttacagaaacaattttgctagatctggaaggctggaagtgacaagatctggtatacgtttacctgtgtaattaacgtgggtcctgaagaatttaacaccctccaaccaggcatcaatttaatacccggaagattcatgtaattcaaagaacttgcccaattatctggtttagtttgtccc

SEQ ID NO: 16728 - DNA, 2800 bp, Oryza sativa
  ref <308>: DATABASE ACCESSION NUMBER: AK067202
  ref <309>: DATABASE ENTRY DATE: 2001-12-06
ggtcttcctccgcttccgaagagacaaggtgagagaggagggtttaagccgagagagagaggacgcgaaggcgacgatggcgtggagggggctagcgagggatgcggcggcggcgtatctccggcggggcggcgctcccgcgcacgtcttctccgcggcctcccgcgctccgggccccgttgtcgccaaccctggcggtgagctccgcgcgttcgggttgttccggtcgccgatggccaggcgcgccgatgccttcgaggtcccttcggctgctgggaggcacggggcgcagggcgtgtggtcgcgcagctcggttccggcgttggttcgggctggtgcccccaactccagagctctccctttcctcgtggggagagtggttcgtggattctatccgcagctgtcaggtcacaagctggtaaagggacttgggatgggctccacccttgctgcgacgttttgttcacagaaggttgcatatgctgaagaagttgctgaacagccatcagaaggcctcatcggcccctcaacaaaacatcagattagcaaattatggactataatcaggaaatatcagctgcctgttggtttgattgctttgatcgcacttggttggcagaatccattgggtcttttcatcaacgttttgcttattctctacagttctaggcctagcccatattcaatatacttgtttcttcaggaggttcgtcatggagagatgcatcaaaatcgtgcattttggaaggaggaggctgtgcttacaaggaaagttgatactaaagattacaagctcttttccattggaacagttgaatcagcagacagagaagtactgcacgtcattgggattctgggcaactggtggatctatcgtgcatcgtatgggaagtgagaggggttggtatagcatctcatattctgaggagcgtttaaccaactagtgtgcaaacatcagaatgttgacagtagataactagaatataggcagtttcattaggcaactatggcactagatattttaaaagcgatggtgttcaatgtaattctaaaataccatcagggttgaaaacaggtcattctcaagggggttgtactggaaggagtttccacatctgactttgtaagttcatttgaaatatcttattctcttggtccaagaagactgtttcttggatgcatgagttaagctgagagtgaagaaccgtaggtcgttgctcttgaaaaaatgaattaagctgagaatgctgcagttcattgccgatggtgaactgaaactacaatcatgttgcatttcagttctctgcagttgcttctctaatttcactggctcttctatatcatgttgttatgatggacagggtgtgcttccatcacccagcttattttgtttgtcctgtttgtgcataattctaacatgctgccaatttatgccaagaatattagagtaaccaaatattgaattcattatatttctcttttcatatgtacaggaagcatttcattctgtcttgtctctggttacatggcttttgagatgctcctccttttggtcaaaatcagtatccatcacgaatgttctcttgcccattaactatgggctgtggcatgcagaagatggttctttttcttcagtatcctgagggactagaatctgcgactacagtgtcagtggatgaaagaatggaataaatttcttttttactcttcacaccttttgcttggcatcatgatcttgatctcgtgtgtgctttggtactcatcagctcatggcagcttcaggtttcctgggagataaagtgatgctacggaatcaggtgaagcaacagggaaggatggtcattggttcaaccgtgggaatggaattttagaaaaaaataaggtccaaggtatttcggtatctatttaaggacctgaccaatagctccataccatagctgaaacttcattgctgttcctaatactggttagggaacagaacctgtttgtgatgggtgggaggaagattggagttgctgtggacttctcgtcatgcagcaaagcagctctgcgatgggcatcaaccaatcttaccaggagcggtgatcagcttgtacttatccatgtcaatagttcctatcataatgagcaaggtgcagttcaactgtgggaacagagtggttcaccgctcatccctctggcagagttctcagatccccatgtcgccaagacatatgctgtgtcacccgacaaggaaacactagaaatcctgaatcaaatgtcgaatcagagaggggttgaagtccttgcaaagatactctacggtgaccctgcaaagaagctgtatgaagcagttgacctggttcccctcaactgcttggtggttggaaacagagggctaagcacactcaagagggctctgatgggaagcgtcagctcctacatcgtgaataacgcgacctgcccagttacggtcgtcaaggagaacatatagctcctcagtagttaactgctctgataggaagcagtaaactgcaagaacagacagcatcagtatctaagtatctaacatatacaacagtatagcagattgaataaattgtgcttgacatgcactggcagtcactcagctcagctgcccttgcctctttacctggaaagatctttcttgatgtaaaccgttcagtatttattatgcatgtaataatataagcgggaaccatacgtgtgtttcagtatatcgtattctttgtcaagggctgtatcctgtatgctatccgttctctttttagttaatgaaatgctccacgacattcacact

SEQ ID NO: 16729 - DNA, 2308 bp, Oryza sativa
  ref <308>: DATABASE ACCESSION NUMBER: AK067203
  ref <309>: DATABASE ENTRY DATE: 2001-12-06
ggctgtcccctgcttatcccctcctcctcccgggttcgcattccgtcgaacaccatgacggcggcggcggcggcagcggcggtgaccctcctccgcctccctctcgcccgactctcctcccacctccgctccctccctccccgtcccataccgccccctcggctccgcgtctacacctcccaccgcctcctctcctccctcctagctcccagccacgtccccgccgtctcgtccctggccgaggcggtggctgcgccggatggtgagggggtcgaagtggaggaggaggaggacgaggaggaggaggcagaggcgcgccccaccaccttcgcgctgccgcggctgccgcggccgaagctgagcgtgaaggagcggaaggagctcgcgtcgtacgcgcacggcctcggcaagcggctcaagtcgcagcaggtcggcaagggcggcgtcacgccgtccgtcgtcgccgccttcaacgacaacctcgagtccaacgagctcctcaaggtgcctctcccgtttccccatcctctcgcattataaattcgtgacatgatacaacacatagtttacctacaaatacaatgagaacaaatacatcaatttcagtgtatgatataccaatggaaatgggatgcttcatcatgctgctgaatactgatatacaatgatgtcatgtgattttgtttaactgggaattaggatcactgtagggtatattcatcaatagttattaaagttaactaatgctttttatggttcgaatctgattgtaggagtagataggatgctgaattgctgataaccgcatgcttttggtttaggtagacatgcaatattcaatttaaccatgactaggttgaccttgagttttccttattattggcttgttctctttccacctcgttttgacggccctcatatttcttgttaggtaatgcaaagggtggtttacatgctagctaattctgtgaaaaaaatggtgattgcttttttccaaacaaacaaaccagcatgagctcattattacagtaccttatatgttatactagtcacagtacatgttacagatgtattttcctcctgtttgtattccttccacacaattgcgctggatacagtctttaaacttcttaattgggttgttgttttgaactttacccccatggcatatattagatatccttaacttcttttgttactataggtcatatgcacgcctcttcaaattgagaagttttctgacttctagggtcttaagtgagtaacagggatttcaggttaaacttgttctgattggtcttgtgttagtatttttggtttggctgagttgcataattgttgggcttttttctgtttgcatttggtggttttaacctatggtcagccctgccacaaatcatataggtaacacaaaaccattgttcattcggaagtcattacaacccacaggcctttttttattcaaaagtctctctttcaagaagcagcaaaatttgtgttatagtgcaagcaagcgatctgacttctaacctctgtgaatgcatatagttattaaaccaaaatactcaagtttttcataaatatggaattgacttatactgaataaactccacatctttattctggcctagccaagttgtgacagacaattgttcgaattgagaagctaagtgcctgtgtccaacacttaatttgcacacaaattttccaataaggctgtgttccatgtgtgcctgtgttccattctacgtatttcgtatgtaagagagccaataagcctgtaggatttagtgtcttgtgccttttcttgctttagtgagcccttttgttcggctttcctttctgtgatgttaagttgttcttcaacattcggcatatgttatgacagctaaaaattcatttgaactgccctggagagctgcctgacgtgatactacaacttgaggagtcaaccggatccattgctgttgaccaaattggtcgatctgtcattctatatcgtcctagcaccagtaagatgaaaaagagagaagaaagtgctaggaatagaacaagatttgtaagatctagagaaccatcagaagaacaacctagaagcagcacaagcaagagatttataaaatctggaggagcatttaggccacaacagaagagaagaccattagcatctaaggaatcgtcgtatgggcgaagatagatgccacattcaatccttcatcttgttttttttcattgtctagacttatggaaatcatgtaaactttagaccatctaatttgataatagatattagtgctgagtttttatc

SEQ ID NO: 16730 - DNA, 2307 bp, Oryza sativa
  ref <308>: DATABASE ACCESSION NUMBER: AK067204
  ref <309>: DATABASE ENTRY DATE: 2001-12-06
ggactcgattagaattgccagagtaatcggagctccggttccgatccctgtccatggcgcgctgcggcggcgaaaggatggtggacgagctgcgcgacgtgctggacgacttcgcgttccgggccaagcggctggccgcgccgctgctgcagccgttcggccgcgcctccgaggcggtggcgcttgacggcgcggagatcgacgggctcaggcgcatccgcgcggcgctccgggccgccgaggagcgcgtggtcaccgatgacttcgtcaggctgtggctgcgggagctggaggacctggagcgcatggccgaggacgtgctcgaggagctcgagttcgaggcgctccgcgcgtcccgcctcgagcggttcaagctccagctcctccggtccagcgccggcaagcggaagcgcgagctcagctcgctcttctcctcctccccggatcgcctcaaccgcaagattgggaagatcatggagcgctacaacgatctcgccagggaccgggacgcgctgcggctgcgaagcagtgatgaggagaggcgacgtgagccgagcccactgacgccgaccagctgtttgacgaaatgctcccttcatggaagagagcgggacaagaagcaggtcattaagctgctcctatctgatgaatataactgccagggtgtctactctgttgtgcctatagttggcgctgctggtgttgggaagactagtctggttcaacacatctacaatgatggggccttgagatccaagtttgacatgaaaatgtgggtctgggtgtgccaagagtttgatgtattgaagctcacaaggaagctcgctgaagaagcaacggagtccccttgcggcttcgctgagatgaatcaactacatcgaatcattgctaaacggctggagggaaagcgattcttgcttgttcttgatgatgtatgggatgagagtctactccgctggacaagcttgctggttcctctaaaatctgctgcacctggtagtagaattgtagtgacgactagaagtgctaaagttgctcgaatgatggcattcaagatacaccaactggggtacctcactgatactacctgctggtctgtgtgccgaaatgctgccttgcaagaccgtgatcctagtattattgatgacggcttgatttctataggtaaatctgttgcagccaagtgcaaaggcttgccattggctgcaaatgcagcaggaagtgttctatccattgcaattgataggaagcactgggagactgttgagcaaagtgacttgtgggctaacaatgaagtgattgatcatacccttcctgctcttctagtgagctacaatagcttacagaagcctttgaaacattgtttctcgtattgctcgctgtttccgaaggagtatgtgtttagaaaagacaagctggtcaggctatggttggcacaaggctttgctgcagcagatggagaaagcgatgctgaagatattgcttgcaggtactttcataacctcgtggagaggttctttcttcagcaatctccatcttatgaccataacgagcaaaggtatgtcatgcatgatctctaccatgagcttgctgagtacgtagcagccgatgagtactctagaatagagagatttacattgagcaacgtaaatggagaagctcgccatctatccttgactccaagcgagactcattctcatgaaataggagaatttcatgcatccaataacaaatatatgaatgaatcccaataccctggcctgcgaactttgctggttgtccagagaaccaaacatgacgatggaagaaaaacttcgagcatacaaaaaccaagtgttctgttcaaagcttttgtatgtttaagggctctggatttgagtaatactgacatggagggcctgccaaactctattggggaactgatacaccttaggtacctcagtcttgagaacaccaaaatcaagtgcctgccagagtcaataagttctctattcaagttgcacacgatgaacctcaagtgttgcaactatcttagtgagctgccacaagggataaaattccttgctaacttaaggcatcttgaactaccacgcatagataactggaatgtgtacatgccatgtggaatttctgaattaactaatctccaaacaatgcacacgatcaagttcacaagtgattcaggaagttgtgggattgctgacttggttaacttggacaatcttagaggtgagctgtgcatatcaggcatagagaacgtaagcaaagaacaaattgctacagaagctatcatgaagaacaaaggtg

SEQ ID NO: 16731 - DNA, 1846 bp, Oryza sativa
  ref <308>: DATABASE ACCESSION NUMBER: AK067205
  ref <309>: DATABASE ENTRY DATE: 2001-12-06
ggttggcgttgcttgctgctgaccaagctctcttcttctcctcctcctccttttcgtcctgacatcctcatcacccccctttgcaatttgcatcatcatcctcacctcctctttggtttaaataccctgtcttagcagcagccacagcacagcttccttcctgcactctctgctctccttggagcttttctttctcaagagacaagaaagatttcagaatctttggatggggatctgtgcatcttcagagcagctggagcatgttcatgagacagatgagagcattgtgtatgtgaaggatgagcaaggaagggggggtaggggggtggagagtgggggggctaggaaggtggcctccctcttctcccagaggggcaagaaaggccccaaccaggactctgtcatcctctgccagggattcggcatggaggacggcgtgttctgcggcgtgttcgacggccatggccggtgcgggcaattcatcagcaagctggtgcgggactacctcccgttcatgatcctgagccaccggaacgcgctgctcctggccgacgccgccgccgacgacgacgacgacgccgcgttcagcgacgacgcggcggcgtcgtcgtccgcggacagcagcggcaactcgtcgccgcagccgtcggcgtcggcgtcggcgcagatgctggaggagtggaggcaggcgtgcgccagcgcgttcgccgccatggacggcgagctcaagctccagccgaacctcgactgcgcgttcagcggcacgacggcggtgtgcgccatcaagcagggcagggacctcatcatcgccaacctcggcgactcgagggcggtgctcgccaccatgtcggacaccggctacctccaggcggtgcagctgacggtggaccacaagccgagcgtgccggaggaggcggcgaggatcaagcggagcggggggagggtgttcgggctgaaggacgagccgggggtgatgcgggtgtggctccccggcgagaactcgccggggctcgccatggcgaggtcgctgggcgacatgaggctgaagcggcacggcgtgatcccggcgccggaggtgacgtcgcggcgcgtgacgggcgccgacctgttcatggtgctcgccacggacggggtgtgggacgtgctgagcaacgaggaggtggtgtccatcgtgtgcgcgacgccgcggaagcagcacgcgtcgaaggcggtggtggaggccgccgtgcagcggtggcgggccaagttcccgacgtccagggtggacgactgctccgccgtctgcctcttcctccacgaccacaccctcggcacggccgccgccgcctccgccgcagccgccgcggccgccagaaaggcgcgcagggcctccaccgccacgccgccggcgagctgaggacacaaagaagctctcgctccggcgagctcgatattgtccgtgtttttgcagtttttgttgatcttgatgtgctgcaaatacctacaacctccgtcccataaaaaaccaaatcctagcaatggacctggatatatgtgtgtccagattcatcgctggaatttgactctttttttttttggacagagagagtatgaattagtagataaatatagtctattgtaacatagtttagagaagatgggaaaaaaagagaggcaattgcgaaaatgcaaatgttgccaagaaaagagagggaaaaaagaagctgtttttacttttgatgatcatagtgagggggagatattgtaatggctgaagaatggcaatcagccaatctgatgttgtttgtgagataccaattgcttgttggcaatttggaactttggaatgacattgtaaatacctcgc

SEQ ID NO: 16732 - DNA, 1479 bp, Oryza sativa
  ref <308>: DATABASE ACCESSION NUMBER: AK067206
  ref <309>: DATABASE ENTRY DATE: 2001-12-06
tgcatgagctcgagagaaagagaggcggagaagtggtgaggtgaggagaggagaggagggcgagtagtaggcgtctaggtcccatctctagggtagtagtagtagtaggcttgtctcctcttcgtcatctctcctctcctctcctctcttctcttctcttctctccgccacggcgccacccacctacccccgaggtcgctgctgctgctgctgctgcggttttcgttagaagatactctcggtagcatcagacctgcatcttggaagttcagtatgggttcaggaatggtgaagaagaaggtggtgaaggccggttctttcgatttggatgccaaacttgataaaagttggatggaggatatcacttgtccaatctgtctggattttcctcataatgctgtcctattgaggtgcacctcatatgagaagggttgtaggccgttcatatgcgacactgaccaatcccgttcgaactgtcttgagcggttcaaaggtgctcatggactgccgaccaatatgaaagtcccatcttttaatggagcccctcttgatagcattcatatcatttcgtcaaatacaactgaccgcccagcttgcccgttgtgtagaggcgatgttattgggtgggttgttattgacgaggcccgtctgcatcttaaccaaaagaaaagatgctgcgaagaaagctgttgttcatatgtgggcaactttcatgagcttcagaagcacacccagcagaagcatccaaattcacgcccgtcagaaattgatcctgctcggagagttgattgggagaatttccaacagtcttcagatatcatagatgtcttgagcacgatacatgcacaggtgcctaatggtatagttttgggagactatgtcatcgagtacggtgatgatgatgccggagatgactatgaagtttaccacagggttagggggaactggtggacatcctgtattttctgtaagtcattctgcagatcttcaggaggcagaagtagagcaagagcaagggaaaggagaagtagtggaaggaggagcagcaataggtctagccaagaaagctttactattgaggtgccctcgggatctgttgacataagggaaatcagatttgatgaaatagatgatgaatatatagttacaggagcaatgcccggcattgcagcatccaggaggatcgccagtcattacagggatcctagatatggacgcagacgttcatactactaggatgaaccagccagctgaaatgtaatgcagtgcagccacaaccagaatattgtgcctctacccgcctctttttcttgttctctcaaaaatctggaagatgctatcccagcccaaatttggtgtgcatataagatagcagcaaacccttcattgttgttcatttacagcaggtttcaacatcttaggttcctatgtaaatatgtaaccactaccctatagcaatgttgatccaaggtttctctc

SEQ ID NO: 16733 - DNA, 1228 bp, Oryza sativa
  ref <308>: DATABASE ACCESSION NUMBER: AK067207
  ref <309>: DATABASE ENTRY DATE: 2001-12-06
ggattgcttttctgcagttcgactgttctactcctcatcgactgggtggtggtgcgcgatgcgctttaaaaggcgtcgcctttgcctccctccgccttcccctcgctgcaatctcatcgtccactcccccgtttccatccccccgaatcttcttcttctcttcttgcggtgactgagaagaagaaaaaaaaaaagaaagaggagaaaaattgctacgagattccttcttcgtcgccgccgctgctgctgcgttatccccaagatttttgggatagtgttttctgttctctctcataactcataagggtaaatgggttcagaaggaccttcagttgttactgtccatgttaccggatttaagaagttccatggggttgctgagaacccaactgagaaaattgagggcaatcttaaatcattcgtagaaaagaaaggattgccgaaaaaccttgtacttggaagctgcacagtgcttgaaactgcagggcagggggcacttggcacattatataaggttttggaatctgccattgcagaaagagagaatgggtcatcggctcaggggcaagtaatttggatccattttggagttaatagtggtgcaacaaggtttgctcttgagaatcaggctgttaacgaagccaccttccgttgtccagatgagctagggtggaaacctcagagggttcctattgtaccatcggatggagccatctcacggacaagagagactacgcttccggtaaatgagttgaccaagtcactccggaagacaggctacgatgtaatgccatcagacgatgctggtcggtttgtatgcaactatgtgtattatcattctcttcggttcgcagagcaacacggcatcaaatctctgtttgtacatgtgcccctgttcttgacgatcgatgaggaggtccagatgcattttgttgcttcccttcttgaagctcttgctgtcttgaactagggaaaaagaaataacaattcaatattggaagcaggctgaataaaactgtattgtcatcgatgatattggtcttgctccaaagggtgtatttatgaggaaattggctgcttagagtgtgttcttggtcagatgccacttgtattccactacatcacttgttctaaacatgcctgaaaacaaacttggttttcaataaaaatcgacagatcgtcgaaatggatgcattgcatccagtacggttgttgatgttgcttttgc

SEQ ID NO: 16734 - DNA, 2516 bp, Oryza sativa
  ref <308>: DATABASE ACCESSION NUMBER: AK067208
  ref <309>: DATABASE ENTRY DATE: 2001-12-06
gactgtgctcctcgtgtccgccgttctgatctccattataccacctcggaatcccacggacaccgcgcgccccacataaccccatgacccggatccctccccgccacccatggacgctcctcccctccgcctccgcctcgccgtcgccttcttgtcgctccttctaacggtttctgcgtcggcggcggcggcgagcggtggtggtggtggtttcaatgttagctttgattcggcggcgctggccttctccgacctgacgctgctgggggactcgttcctgcggaatggctccgtcggcctgacgcgcgacaccgccgtgccgtcgtcctccgccggcagcgtgctctgcagccgcgccgtcgcgttcggcggtggcggaggatcggcggcgtcgttcgcggcgaggttctccttcgtcatcgccgagcagaacgccggatccaccggcggcgacggcatcgccttcttcatctcccccgaccacgccacgctcggcgccaccggcggctacctcggcctcttcaactcctcctcctcggccgccaagaccaacgcctctattgtcgccgttgagtttgatacggtgttgaacgacgagttcggcgacccgagcgacaaccacgtcgggcttgacctcggcttgccggtgtcggtcaacgccgtcgacctcgccgcgttcggcgtcgtcctcaacagcggcaacctcaccacggcgtggatcgactaccacggcgccgaccacctcctccaggtgtccctcagctactccgccgccaagccggcgaagcccgtcctctccgtggccgtcgacctctcgccgtatctcagggacgccatgtacgtcggcttctcggcctccacggaggggagcacgcagcagcacaccatcaaggaatggaccttccagacgttcggcttcccgtcggcgaccaactcctcttccttttcgaacaccaccggcaacgcgtcggcgcagactgtccccggcgaggcggccgcgggcggcgccgcctctcgcaagaagaggttcgggctcgccctcggcatcctcggccccgtcgcgcttgccgtctccttcgtcttcttcgcctgggtgtccatcaggaagctgatagagctcacctcccggaagaacgccggcttcttgcccgagctggtgaaggggccgaggaagttcagctacaaggagctcagcgccgccaccaggggattccacgcgagcagggtcatcggcaaaggcgcgttcgggacggtgtacaaggcggctatgccggggacggccaccgcatccgccgtctcctacgccgtcaagcgatccacgcaggcgcaccagagccggaacgagttcgtcgcagagctctccgttatcgcctgcctccgccacaagaacctggtccagctcgagggatggtgcgacgacaagggcgagctgctgctggtgtacgagtacatgcccaacggcagcctggacaaggcgctctacggcgagccctgcacgctgtcgtggccggagcggtacacggtggcgtccggcatcgcgtcggtgctgtcctacctccaccaggagtgcgagcagcgggtgatccaccgggacatcaagaccagcaacatcctgctcgacggcaacctcagcccgcgcctcggcgacttcggcctcgcccgcctcatggaccacaacaagagccccgtctccaccctcaccgccggcaccatgggctacctcgcgccggagtacctccagtcgggcaaggccaccgagcagaccgacgtgttcagctacggcgtcgtggtgctcgaggtgtgctgcggccgccgccccatcgacaaggacgacggcgggggaaagaacgtcaacctcgtcgactgggtgtggcgcctgcacggcgaagaccgcctcatcgacgccgccgacccgcgcctcgccggcgggttctaccgcgacgagatgctccggctgctgctcgtcgggctgagctgcgcgaaccccaactgcgacgagcgcccggcgatgcgtcgcgtggtgcagatcctgaaccgcgaggcagagccggtgcccgtgccgcggaagaagccgctgctcgtgttcagttccagcgcgtcgatcaagctgcaggagatcgcctttgcctgcggcgacgacgtccgcggcggccttccggcggcggccacgtcgccgaggtctgagggcggcgacattgaacgctagctgctgacactgatcactgaagcagagtaaaggataatactgagtatgaattactaatactagtgtgattcttatacacgattgatggattgtatttgtgatgtgctcctaaggggaatataagtaataatccccgctgttgtacgagttttgaaatacttatacatctaccactaccaaggtgtgtttcagcacgttgttcagacatcttgtgtgaaatatattgttagagacccacttcacttacttgaaacaatagcagtttcaaaagtaataccaatccagtacaaggagcaattgattctattgc

SEQ ID NO: 16735 - DNA, 2726 bp, Oryza sativa
  ref <308>: DATABASE ACCESSION NUMBER: AK067209
  ref <309>: DATABASE ENTRY DATE: 2001-12-06
gcataaggaggaagcccgacgcccacggtcgtccacgcgcgggcgaccgggcgcgaaccctattccccggccgccgtcaccctcccctcctctcccccacctcgccgccgccgaagcgcgccgccggaaaccgcgtggcccgccgggatggtggcggcggggctaaaatccggcggtggcccgtctccagcgcgaggagatggcgcggcgcgccgggaaaccgcgcggtggcgccgcgcgtggctgggagccggtgccgccgccgccggtcccgactccacgcgtctggatccggcccaccgccgctggatctggcggccggcgaggatggcggcgcgggtgttggcagtggccggccgtcgggagacgcgaggaggcggcacggcgtgcagggcgacacggaatgatggcggctggtcggcgcgggcacgcgcttgcggaggctggggagtcggcggcggcggcaacttccccgaccagatccgggctggctccggccggatcttgcggggcggctggagaccggcggcaggcaagggtggcatcgcggtaggcaggcgtcggtttcgcggctggcagcggcggctcgctcacgccgaggtcgcgtcgtcggcgtcggcgtccgtccgcggcggcgcgtgacgacggatgctgccgcggcgcggacgtcaccggcttgcgaggggcattgtcgtggtgcgggtgatagagccagggcagccggttgcgcggggtggctgcgtgtggtggcgttgcacggctcgggtgggctccggcgagctcggcggctgcgcgacgtcgcctacgcgagcctccggcggggttgcttgctggcggcgacctcctgctcggcagggggtttcttctgccggtggcgggtctcgtgctcatgtgcggcgatgtgcggatgtggagttggtatggctgcttgtgagacgtcttggactaatctatggtcatcgatgtgggggtgcttgtgtgggtgatgtgaagatgctggtgaaagccttgccgtgcctttggccggttcgacgacgacgacacccgctggcgccgtttcccttcttggaggcgttgtcatggcgttctttcatatccccgcaatctccaggtgaaaatctagttccgaattcggacaagcggcggcggcgctacgtgtcgtgtcctccttgggggcgtcgcttcggagaagttccaacacatcgacaactgttgatggtctttttcggttcaaaagctttcataccttagttcggcgaggctttcgtcttcttgggtccgtttctttcttgtggtcggcgacaagctcttcggttgtttctgctgatgaagtcgaagctgcttgctgatggggtgcggcgacgtttggcaacgatgacatgttgcagtctcttccaaggagttctggtgttggctgtgtgaagaaagtggctcctcggtggcttggctgatgtccattgttggaggtcggaattgcttttcgctttggcgaccttcatgccttcaatgtcgttgcggttgtgaagttggcgctgctggtcgcttgggcggctagctcggcaacgataacacctcttctgcgatttgggagctgttgtgtcgcttttgtgtttagcctagcggcgacgtcctgtgtttgggctccgctgtcattgttagatctatagcggtgggttttagccggttttcctgtaattaaccgtgcaattgtttagttttcgggcccgattttccttataaactgggtcaattctcttcttctaattataaaaatggaacaaagttccgcattaggttttaaaaaaaaaaggttgcataattcatgtggctataaaatccaaagtgtcatcatttttattttgccaaaagacatactgttgtttttcgaaaaacactaacctagttgttacacatgttatgctcatctgatcttatctacatcccacccatgtgccaaatttttctactacgagggcaatttatttctttttactcctctccatgcaaagatgtcaccaatttactcatcttttctcgtttccatgtgaagatgtcatcatgtgctaacatgttgctctagtcgagacctctttataacatacttacactgtaaaaaaaacttctagctacgaagctagacacacatatgtccagattcatagttaggattggattttttttttatggagggagtcaatactagagaaggatatcacattagaggcacgggatagtttaggactttaggtgccaatgtcatgctagtgttagcatgcatgatgtaagcattaaaccaaggtactgagaccttgtactcgtaggtgtcatggtggcaatggtagtagacgtagtatggtaccagatgtggtactagtagcccctctttttctctgttaatattagtacactatgcagaaaatccttgttgcagtaaacaagattgttttagatcactgaaagaatatttactgatgttccgaaggcaagcttctcctgccgcccgttgattaaaatcaatccagttttactcatgcctggccctaaccttcctgtagatgaatggcagtaattaaatccagtgcactagatgatttgctcagcagtaaaatgctgaataataaaatattttgcatattgtttgtcaaccatgcatgttgcaactagtgtgaagcttcgacgttgatagaaagatatggcaggcagtcaataaaagggaaaattaaagg

SEQ ID NO: 16736 - DNA, 2549 bp, Oryza sativa
  ref <308>: DATABASE ACCESSION NUMBER: AK067210
  ref <309>: DATABASE ENTRY DATE: 2001-12-06
gaccgttgagagagtctcgcctccgccgcgtgctctccgcctacggcctcttgtatcccgcaaccaaaaactactcccaaaaaaaaaaaaatttctagtatcacaccaaaagaaaaaagagaaaaaaaatttcccccaaaactccgcgagatctgcccgtgccgagctatataccaatccatcagctagggtttagagcagatttttttttttttgtttcgcggaaaaaaattgaaaaagagagaagggtgagggagcgaggtcgagggatcggtgggcgatggcggcgcaaatggcggcggtggcggtgaacgggggctctccgggggctgtcaccgcggcggcggcggcgggaggggtcggcgtcgccgtgggcctcgggggcggcggggcgcagtcgctgtacgtgggcgacctggaggcgtcggtcacggactcgcagctgtacgagctcttcagccaggcggggcaggtgatgtcggtgcgcgtctgcagggacatcagctcgcgccgctcgctcggctacgcctacgtcaacttcaacaaccccgtggatgctgcaagagcactggagctgctcaactttgctcctctgaatggcaaacccattcgggtaatgtactcaaaccgtgacccaagcagtcgcagaagtggatctgctaacattttcatcaagaaccttgacaaagcaatagaccacaaaactctccatgataccttttctgcatttggtaacattctctcctgtaaggttgccacagatgaaatgggccaatccaaaggctttggttttgttcagtatgacaagggagaggctgcccaatctgcaataaaaagtctaaatgggatgctgatcaatgataagcctgtttatgttggaccttttctccgcaagcaagagagagagaattctgttgacaagacaaagtttaacaatgtttttgtgaaaaatttgtctgagtccaccacaaaggaggatctagtcaaaatttttggtgcctatgggaacatcacaagtgctgttatcatggttggcatggatggtaaatcaaggtgctttggtttcatcaattttaagagcccagatgatgctgctcgtgctgttgaggaacttaatggaaagaaaattaatgacaaagaatggtatgttggaagagctcagaagaagtcagaaagagagattgaattgaagagaagatttgagcaaagcatgaaagatgctgctgacaaatatcaaggactgaacttatacatgaagaatttggatgatagcattggggatgaccagctttgtgaattgttctctaactatggcaaaattacttcatgcaagataatgcgtgatgcaaatggtgttagcaaagggtctggatttgttgcattttcaactcgtgaggaagcatctcaagctttaactgaaatgaatggcaaaatgatatctggaaagccattgtatgtcgcatttgcacaacgtaaagaagacaggaaggcgatgttgcaggcacaattttctcaggtgcgccctgtaccgatgacaccttccatggctccacgtcttcccatgtaccctcctatggctcctcttgggcagcaactcttctacggacaagctccacctgctatcatgcccccacagcctggatttggtttccagcaacagcttgttccaggcatgaggcctgggggtgcccatatgccaaattactttgttccagttgtccaacaaggtcaacagggtccacgtccaggtatccggcgttctggtgctggttctgcccagggacagcaatctgctcagccatttcagcaacagatgcttccaagaggacgtgtgtaccgttacccacctgcgcataacatgcctgatgttccaccaatgccgggggttgctggtggtatgattcaatcgtatgatatgggaggcttcccagtacgagatgctggtttgtcacctgctccaattggaacgctgacttctgcccttgcaaatgctaatccagaacagcaaagaacgatacttggtgaaagcctgtatccactggttgagcttctggaacagaaccatgcggccaaggtcaccggaatgcttctggagatggatcagacggaggtcctgcatctgctcgagtctccagaggctctgaagtccaaggttgctgaggcgatggatgtcctccgcaatgtggcccagcagcacaatgcgaacaccccgaccagtcaacttgctgcgctgtcactgggcgacgccattatctcctaatttacagtcgtagctatctttttagcttgcagttgtgtgtgatcttgcatgaggttatcggcaacatggcactttttccctcgtatggtttgacttgagtggttcgagttcccgggttggatgttaggcgttatacttctcggcctggtatccttgccattaaggccaggtacttgtttccaagtttgagtattatccggaccatccgtcacatacctcttatgcttgatcacaatttttgctgttaatgattggtgagagaaatggttggatgttaacgattgctgtt

SEQ ID NO: 16737 - DNA, 5192 bp, Oryza sativa
  ref <308>: DATABASE ACCESSION NUMBER: AK067211
  ref <309>: DATABASE ENTRY DATE: 2001-12-06
gggggaaagttgttgcgcacagcacacattctctttctgaaacgctcgaaatcccccaaaaattggcccccctcgctcgtagtccggcgtccggcgatggctctcccctcgcgtcggtgggcaggggcggtggaatccggcgtggatccggtggcggaggcttgggcgaagctgctgcggtcgctttcccaggccatggcgcggctgagggtgcagatggagtcgttcgacgatgcccagatgaggtgggcgctggccgccggtgtccgagccaaggcgcagctgctggctagccgcctggctcagatcctcgccctcttctgggacgaggggcagcgcgcggcgctcccggcctgcgtgcgggatgccctgtacggcatggaagacatggtcgacgatttggagtaccacatgctcaagttccagcctcatcaacaagaggtcagatgcaatctgctcatctctcttgtcaatctccgctaccggctcatcatcagccacgcgtctcgctcccgcttcctcaaggatttggatttcgttgcgagcgaggcaggcagcctcctctccgcgatgcataagctcgagcccaccgctccgtcgctccctgccctgctgcttgctgacgacgatcatcaggttgtgtttgggcgccacaaggaggtcactgacattgttcgaatactcattgatccgccggcaagccaccaccaccaccctacttacgacatcctcccaatcgttggcatggggggcgtggggaagaccacactcgccaagttagtctatgatgatgccaaggttaagcagcatttcgagctcaggctctgggcgagtgtctctactagtggagggtttcacaaaattgacatcaccgaacaaatcttgcgttcagccaacccaacataccctgcttctattcacagtgaacctacgcttgacatgcttcagttccatctcagccaactggtagcgtccaagagattcttgcttgttctcgatgacatcagggaggagtccttcaccagcatggcctgccaagagatcctcagtcctctatcatcggcagaaaaggggagcagaattctggtgactactacaacagcctcagtgcctgccatgctgggggcatcttgtacataccacctgaatgtattggacatcgaggatttgtggtccttgctcaagaaatatgctttccatggaggcccaactcatgattccacccaggagcttgaagaaattgggaggaacatcgcatccaagctcaaaggattgccattggctgccaagatgcttggggggctgcttggagctacaaagagcacaaagacctggatgaatgtcttggacaaagaactttatggcgatagtattcttcccgtactagaattgagttacagttacctgcctcgacgactcaagcagtgcttttcgttctgcagtttgtttccgaggaactataaatttaacaaaagagtgttgatccaactttggatggcccaaggttttgttcagtcacagaacagtgctgacaaaaatatggaggacctggcagaagattattttgaggaacttctttcgcgatccttctttgatgtacgcagggaagcgtgtgaaacacactacgtgatgcatgaccttgtccatgacctcgcgcagtctgtttcggcagatcaatgccttcgtgttgagcatggcatgatttctgagaagccatcaactgctcgctatgtatctgtcacccaagatggactacaaggccttgggagcttctgcaaacctgaaaatttgcgtaccttgatagttctaagatcatttatattctcctcaagttgcttccaagatgaattcttcaggaagataaggaacttgcgtgtcttagaccttagttgctctaactttgtacagttgcctaactcgattggtgaactagtgcacctgcgttacctatctctccctcgcaccctcaatatgcttcctgagtcagtcagcaagctactgcacctcgaatcattgtgctttcacaagtgttcccttgaaaagcttcccgcaggcataactatgctggtcaacttgcggcaccttaacattgccacaaggttcattgcacaggtgtccggcattgggcggcttgtaaaccttcagggatcagttgaattccatgttaaaaagggggtaggatgtaccttggaagagctgaagggcttaaaagatctccgtgggaaactaaaaataaagggccttgataatgttttaagcaaagaagcagccagcaaagccgagttgtacaagaaacgacatcttagggagctcagtctggaatggaactctgcaagtagaaatctagtccttgatgcagatgctataatattagaaaacctacagccaccctctagcttagaagtactcaatatcaataggtaccaaggtgccatatgccctagttggctgcagttatcatcacttaagcagcttcaatccttggaccttattaactgcaggaatttggagatcctacctccattgggactattaccgtcactcaaatatctatgtatgaaggaactgtgcactgttaatcaaattggacatgagttctacggcgatgatgatgtaccatttccatccctgataatgcttgttttcgatgattttccaagtttatttgattggtctggtgaagtgaaaggcaatccgtttccccatctccaaaagctaacacttatagactgtccaaatttggttcaggttcctccattgcccccttctgtcagtgatgttacaatggagcgtacagcattgatatcctatttgaggcttgccagattgtcttcgccaaggtcagatatgctcacgcttgatgttcgtaatattagtatactttgctggggactgttccatcagttacatttggaatctgtcatatctttaaaaatagaaggtcgtgagacaccttttgccaccaaaggattgtgttcgtttacttctcttcaaaggcttcagttatgtcaatttgacttaacagacaatacgttaagtggaactctctacgcgcttccttagctatgctccttggagatgatcgatctgcccaatataacatccctttcagttccatcagacattgatttcttcccgaaacttgctgaattgtacatatgcaactgtctgttgtttgcttcccttgattccttgcacattttcatttccctaaagcgattggtgatcgagagatgccccaaactgacagcaggatccttcccagcaaactttaagaacctcacgtctctcaaggtactaagcatatcacactgcaaggatttccaatcttttcctgtgggtagtgtaccaccgtcactggaagcacttcatctcgttggttgccaccaaagttaactgacaatgtggtgtcaagaaaaatgctccttaacacaccaaagctcactgatggaccatgaagaacataaacaaaaaaaaatcttgacaacggatagcaggttacacaaataatgttgcatggagaaatcaagtgacggctcgcaagtagtaggagaggacgagcggtagtgcatatgacgtcgaccttgccaagtaacttcaggctcatcccttggagacatgagagatgagcgaccatacaatacaaggccaatgtattctgatctgtttaggatctcttcatcacctcgtctctttatatttctttgttaagccagggttggacggccatctccttgctaggctgaagaaacaatggaacacatcctagtctctgtttttagccttcagaattgaaagttgatcctatagaggttaggcttctcttccatctccccaactcttgacacaaacaacttctccagttgctggtctagggctttgaagggcacaagaaagtaggataagaaaggatttaactcgcttaatttgttttggaaatctagaagcaatgggagcgattgcatgtttaatggtgcaaatcctagtgtgctggctgtaattcaaggcgccttatggtgcttggctggtgcttctgagctccgtgggggtgctcgaatctcgataggtcgttagcccgtatggtttaaggggtagtttatttttgaattttttttaaagggaagtctatatgggatttggatgatattttaggcttcaatcatgcagattttaaatccaattggatgctctttcaccaagtagatcgaaaatgtttcaccaagtagatcgaaaatgttttaatcttttaaaaaactgaaacacaatcaaatcatcttatgaaacattttgctataacatatgtaacaacggttctcaatatactaaaacatgaatgatttagctatcaaaaatcattcaaatcattcgacagctatttaaccttccataggatgggggattttctaattccccatccatttgtatctctctcttgcttaatgaaatatgtgtagatcacctgcgtgttcaagaaaatgatgcaaaggaaagggccgttagttcagatataggcaaattattatgcttgtgcttgattccaaatactctgtccgtttcaaaattatattcttgtcctttcttgtttttggtgccttaacttcatctttatttttattagaaaataacatcctctaagagcaaggataataatagagcccacttcctactattagctcattttaaagccaacatatataatagattagctataagattggctacaattttcttctcatctctctatctctcagttatacatttaatgcatttgtcttagagcttgtgataagctagctgagagccaacatccttaatttttcactacatctctccgccacctaaggttataataggcttatagctcactattatacttgctctaagtaggagataaagggcatcgatacggtgtcaaaaggtacgcatgtacatgcctttggaatttaggtgggcagcaccggacgcgattgcgtggaaatctaatagcctacgacggtggaccggtcggtttaaatgatagttgatggtcagattttttttttagaatttcgaggatttctctgattttaggaggtatcatgtgatggtgtacgagtgttttttaggaaatgtactgaacttttagtttataatagtattgtcgaaacgacaaccgcatacgtcgaaagacgtggttactcaacagtggttgg

SEQ ID NO: 16738 - DNA, 1080 bp, Oryza sativa
  ref <308>: DATABASE ACCESSION NUMBER: AK067212
  ref <309>: DATABASE ENTRY DATE: 2001-12-06
ggattgcgtgtgcctgccggtggtgggctcgcggcgcgcggcgagctttcgtgcggcgcggcggggcggcggcccgtgtgcggcgcggcggcctgcgggtggcgcggcgcacgggctcggccggagcggcggcgcggcggccttcggtggcgcggcgcggcgggctcggccggaggcagcggcgcggcggccttcggtggcgcgcgcggcgggctcggccgtaggcgttcggcgcggcggccttcggtggcgcggcgacgccatgcggggcgcgggcggcggtgcagggcggggtgcggccggcagcaacctgcgggcgcggccggcgagcagcgccttgcgggggcgcggccggcaatcggcgtaggagggcgcgaccgacgagcggcgccgtgcgggggcgcggctggtcgagcggcatgcgagggcgccgtgcggagcgttgtcggcagtagctcgcggtggcgtgcggtggcaccgtgcagtggtgcgcgcggcgtcgggtgcgccgtgcgggggcgcggccagcgacggcgcgcgacggccggcggctacgccgtgcggggcgcggccaacggcggcgagcacagcggcgtgtggtggcgcgcgcggccttcgggtgcgccgtgcggggaagcggccagcgacggcgcgcgacggccgaggtcgcgccgtgcgggggcgcggccagcggctgcggggccggcggtgtgcgccatggttcgatgccgtgcggcggcgtgtctctgatccgaggatgccgagaaaccccaatcggctagacgccggcgactccaagtcagcgatggcggttttcgtcgggagtcacaaaaacagaacgaggaagatgcaaggatttcatttttgcaattcaatctataagatgcaaagaggattcttgagttcttaccctcctgctacacgaagtaatccaagagggtcccgtaattatataaaagtagagacacaaagtttaggggtgagactctctttcactattcaatcatccaatcaactgtataatgagtagccccctcctctctttatatagtgcaatctaatatatggaaagtttggtgg

SEQ ID NO: 16739 - DNA, 1181 bp, Oryza sativa
  ref <308>: DATABASE ACCESSION NUMBER: AK067213
  ref <309>: DATABASE ENTRY DATE: 2001-12-06
gccacttccccttcgaatctagggttacgactccgaccaacctcgccgtcgccaagctcgccgactcaccggccttcctcgtcggccgcggcgcagagggagaaggtggggagcgaagatgccgcagcggcactcgaagaacaacaacgacctcgccttcttcacgtacgaggagaagcggaagctcgggtacggcacgcagcgggagcgcctcggcaaggactccatcaagcccttcgacgcctgctgcctctgcctcaagccgctcatccacccgctctgctgccccaagggccacaccttctgcaaggagtgcatcctcgagtgcctcctcgccagaagaaggacatcaagcgcaaacttgctgctcatgaggcccagaaaaagctggagaaggaagaggaggatgagaagcgtatgctgcaaaagtccaaggagttggacgcttttgatcagcagaatcatggagccgtcccccaataccacgatcgcagcggctctgaagacaagaatggttttcatggagcaaacagcgtgaaggttacttcctttgaggaggaagcccttcgcaacatgaaggcattctggcttccatcagctacacctgaagctactgccaaagtagaagctccctccactgacacaatctgccccgagggacaggagaagctcaagttgaaatcgctcttccctatctccttcactgaagaaaacaccgaccagaaaaacaagaagtcggtgtagaagagctacatgtgccccagttgcaagtctaccctaacaaacaccatgtccctggtgacgatcagcacgtgtggccatgtcttctgcaagaagtgctctgacaagttccttgtaactgataaggtctgcttggtgtgcaacaaaccgtgcaaggagaggaatttcgttcctttggaaaaaggaggaactggattcgctgcccatgatgagcgtctagaggcgagagatttcaagcatttggggagtggttctggactgggtttagtgaaacctgccccaaagaactactagcctcaaaatatcttagctgctgttgtatattatttatgttaacctgaaaattttgtatcaagcatcccctttcgctgtgaacagtctggagcaaattcagtcttgttatgctagtggcactatggttgctaattgcagctttgcct

SEQ ID NO: 16740 - DNA, 961 bp, Oryza sativa
  ref <308>: DATABASE ACCESSION NUMBER: AK067214
  ref <309>: DATABASE ENTRY DATE: 2001-12-06
ggtcgatccaccagatcgcaatccgaaattcagagatccaaattcgcccacaagaattcacctctgcttgttgatcggagaggaggaggtgttcgtcgagatgggcaaggtgagggcgttcttctcgcgcaagggcagggggaacagcagcggcaggtccaggtcgatgcgggaggcggcgatgaacgtggactggtcgccgaggccgtcggatctcgccgccgccgccgccgcgaagccccgcccgcccgcggcggaggacgagacggagcgggtgttcaggaagttcgacgcgaacggcgacgggcggatctcgcgggccgagctggcggcgctgttccgcagcgtgggccacgccgtcaccgacgacgaggtggcgcggatgatgcaggaggccgactccgacggcgacggctacatctcgctcggcgagttcgccgccatcagcgccccgccgcccggcgacgccgccgccgccgaggaggacctgcgccacgccttcggcgtgttcgacgccgacggcaacggcgtcatcacccccgccgagctggcccgcgtcctccgcggcatcggcgaggccgccaccgtcgcccagtgccgccgcatgatcgacggcgtcgaccgcaacggcgacggcctcatcaacttcgaggagttcaagctcatgatggccgccggcgccggcttcggcaggatcgcttcttgattccaaattcaatccctcctccgccatggatgatggacacctcaccgctcatgttctttcattctttaattattattaattgtaaatatagataaatcacgcggaatgactaattaccgcgtagtaatttctactaattagttgcagataccacacgaacataatcccgtttggttttgtacagagtgtacacactggaatcgtaataacgatcccccaaaaaaaatatatatcaaatttcagtcttattatggc

SEQ ID NO: 16741 - DNA, 1441 bp, Oryza sativa
  ref <308>: DATABASE ACCESSION NUMBER: AK067215
  ref <309>: DATABASE ENTRY DATE: 2001-12-06
ggaaagtagtctcgcctttttcacagcgaatttcccccacccgtccccatcgcagagaggcagagagaatccacactccaaaacccaccgttccccatggagaagggcgacgaaaccctcgcctaccccgccgccgccgccggcggccagaagaccgcgcccatcggatgcttcgccggcgacgacgttgccgccaccaccgacgggcaccccaccaagtcctacgccgccgtcgccgccgagaagaccttgcccaacggcagcgtcgaggaggacgaggtcaccgtcaccgccgccgagaaccccgccaagtcctacgccgccgtcgtcgctgagaagaccagccccaacggcagcgtcgcggaggacgaggtcaccgtcaccgccgccgagaaccgcgccaagtcctacgccgacgtcgccgccgagaagacctaccccaacggcaacgtcgaggaggacgaggtctccgtcgccgcggccgtgaaccccgccaagtcctacgccaccgtcgccgccgagaagaccgtgccggacggcagcgttgcggaggatgaggtcaccgtcaccgccccggtgaaccccgccaagtcctacgccgccgtcgccgccaacgccgagatcgaggacctccgcaccaccaatcacgacctggaggagaagctcgccgctgccgaccgtgagaagaaggggcgtgccacggagatcgacggcctgaaggacacctccgataaggccaagcagaactcggtcgtcttccagtacatcgcctcttcttccgacgcgaaggtgcttgcgctccgcgaggagctcgaggatctgcagaaactcctccaagcagagaaagatgaattcaaggcggacaagcgcgactccaatcagctcgccggcaaggtggggtccgaacgcgcggtgaagatgaggctcgaggaggaggtgattgccatgaaggagagggccagggccagggccgccgctgccgctgccgctgccgctgcggaggacgagagggtggctgctccgacacctgggaccctgcagggagcgcgggtcgcgtggccggtgatggctggagctgcggccgtcggcgccgccgcggcagctgttgccgtggtgatcttcctccgcctcaagaggtaaactggtgatctgatgcacaggaagttttgctctgctgcgacagcctatggaagatttgatgagtttttttgtggtgatgaactgatgatggtagagtgctggatgagaatagtatgacttctatgagctagttgcttaatagcctacagaaacatagggatctgaacacttgttatgttccattcctgtttttccttttatcattctaccttcttcagtggtgacgctaaatgtctgaaacaatttgtgatgcgtaactgaggaacgccgaatggttgctgtgcggttatgctttttctcc

SEQ ID NO: 16742 - DNA, 1933 bp, Oryza sativa
  ref <308>: DATABASE ACCESSION NUMBER: AK067216
  ref <309>: DATABASE ENTRY DATE: 2001-12-06
gtcgctcacagtagccgctttcattcaccatcgattcctctctcggctgcttgccttctctctctctcttcttcgcgtcgatttcgtgcacttcagtttcttgcgtgcgagcatcgatttcttcctcgccggctcgcgcggattcgatgggttgttgattggaggagagcctcgggagggcctggagtccgctgcccatggcgcagccgcagccgcagtcgcagcggctgcgcgtctacgaagcctggaaggggaataataggttcttctttggtggtcggctaatatttggacctgatgctaaatccctgcttttttctgttgcactgatttttgtcccggttgcggtcttctgtgcgtttgtagcacggaatcttcgtcatcaatttcctgcatacaatgcagggtacgcaattcttgccgtagcaatagtgttggcaatctatgtgctttcgttacttttcatcaccgcagctcaggatcctggtattgtacctcgtgcatctcatccaccagaagaagagtttcactatgacaatttatctcttgcggacacacctggcagactagtcttccctcgtgtaaaagatgttatggtaaatggggtgcctgtgaaggtcaagtactgtgaaacttgcatggtttttcggcctcctcggtgttcgcactgttccatttgcaacaattgcgtggaacggtttgaccatcattgcccctgggtagggcaatgcattggaaagcgcaattaccgatactttttcctatttgtttcttcggcgagtatcctatgcatttatgtatttgctatgtcagcattgtacataaagattctcatggatggagactatcccacagtgtggaaggctttgaaacactcccctgcttctcttgcattactaatatattgtttcatctgtctttggtttgttggtggactcacaggatttcatacatatctcatcagcacaaaccagaccacatatgaaaatttccggtacagagcagatggcagaccaaatgcctatgatcgaggatgtatgaataactttctagaagtcttctatactaaggttccaccttccaaacacaagttcagggaacctatacaagaggaagcgcgagctccaccagctaaccgtgctgtggagagagaagaagagccggttggtgctcggacaaaagtggaagatgaccttgacataggtggtgatctcttgaagatctcacaacgacataattatgatggcattgatattgaaatgggaggtggagacagaaatagtaggaatgaggctgtctcaaactccaaattgatatcaaagacggatgcacaagcccctacagtggaagatgaggtacagcacccgagtcggggtgaaagaagtcgaagttcggacctcgcatcagaaggcatcacaacaagtgctccagtctcccaacctgcattcccatttcggagagaagctctttaggcagtttctatgaagtctgaatagatgccagtggcatggatcattaagctgatgaactgattcattcaagtcacatctgcacagacaggaacaaatgcccttcatgaacttcaacggcattcatcagtgctttccaccatttttcatgtatgtacctctgttttcaaagaagtgggcgattacttcgctgtgggtcttttttctgctagtctcatctgatagtgccaggatgattctttttgtaaaaaaaaactgatccatgatacttaggatgctacctgtaattctattgctctgaatttctcctgtgcgcgtatcagttgtcgttcctcatgcacactcttaccctcatatcgtctggaggatgtcgatttcatctagaatgcaaccccattttgtacccttacaaacaatacaattttcttgatagggcaatcatcacttcgttccattttgagacc

SEQ ID NO: 16743 - DNA, 882 bp, Oryza sativa
  ref <308>: DATABASE ACCESSION NUMBER: AK067217
  ref <309>: DATABASE ENTRY DATE: 2001-12-06
ggatgagagaggccacgcgcgcgcacgagatcgatctccagcaaggtcttgcacaactgcggcaagatgggcctcactttcacgaagcttttcagccgcctcttctccaagaaggagatgaggatcctcatggtcggtctcgacgcagctggtaaaaccacaattctctacaagctcaagcttggagagattgtcaccaccattccaacaatagggtttaatgtggagactgttgaatacaagaacattagcttcactgtctgggatgtcgggggtcaagacaagatcagacctttgtggaggcactatttccagaacactcaaggtctcatctttgttgttgatagcaacgacagagatcgtgtggttgaggcaagggatgaactccacaggatgcttaatgaggatgagttgagggatgcggtgttgctggtttttgctaacaagcaagatcttcctaatgcaatgaatgctgctgagatcacagataagcttggtctccattccctgcgccaacgccactggtatatccagagtacatgcgccacaacaggagagggtttatatgagggccttgactggctctcgagcaacattgcaaacaaggcctgattggatgaccagaataccacattacatagcagttgcattttctggagaacggaggagatggtcattttgatactgagatttggattattatttcactggagtgttcgttgaatatattgtatttcttcgttaggcttttcagatctggtttgttatgttacctagctactctctacaacccctcccggtattattaagagactaattgtcagcttgaactatatcatatattcatatacgatatacccgagtaatgcagttcttttcctc

SEQ ID NO: 16744 - DNA, 2420 bp, Oryza sativa
  ref <308>: DATABASE ACCESSION NUMBER: AK067218
  ref <309>: DATABASE ENTRY DATE: 2001-12-06
gcctctccctctcctccgccgcttcgccgccggcgtccgtcgccgccgagctcaccgcccttcgccgcctccacggcggggcgccgccgtagaatctccacaccgaggctcacattctacatctttggaaatgcatccccctctaaccttacacaggcatcctatgtgtgccgagattattgaagcattccagaagtgccatgtggaccatcccgtcaagaagttttttggcgaatgcacagatcttaagattaagctagatcagtgcttccggcaagagaaagctttgaagagaaaggcaaactttgaagagagcaagaagttcaaagaacagttgctggcctataaaaaggaaatggctgaacaagacaaggaatcataacgtgagacagaggacaagaacctgaatcaaatgttttcccctacaatgcaatgactccaactttgtgaagaagttgcaaattgtctttacttggcatgcgcttttactatctttactgtttaaaaggttgccattgatgaactatagccagataataaattgcagtttagaacttcttattctctcatgtgtctacgttacttatgtttggtcattttcttcagtactgttggaagccctatagcagatatagactgcaagtcttgctctaggtgtgatataacatttttttaaaataaatgagatccttcagcttctagcattatttgtagaaaaaaccttttagggtaagggttgccacttgccagagaattatcatgcttacatgtcactttaacaatgttgaagactcgattttatcataatatcatctgtgacttccactagctgttaacatgttgacattattgaggaggttatgtggtcaatatctgaggtgatatttggcattgacgcataaactattgccttttctggtgatggctatattaactatcattgataaatacattcacttgcattaataatctctcatattttgaaagcaatctacaggaacaaggacaactatgttatttgccctttcaagtttcaagttaatcaagacactcggacaagcagaggagcaggtgagagggaaaagatggatcctgttcctcttttcaatccttgtgaaatgggaagattcactttctcacacagaattgtgttggcaccattaacaagagcaagatcatatggcaatctcccacaatcacatgccatactgtactactcgcaacgggctacaaaagggggacttctgatttcagaagccacaggggtgtcgtctgatgctccatgcacaaacacccctgggatatggaccaaggaacaagtagaggcctggaaacctgtcgtggatgctgtgcatgcaaagggcgggatattcttctgccagatttggcatgtaggaagagcatctgacttagagcaagaacccatctcaagcacggacaagccagtggaaaagaatgaagacatggatttccctgtcccaagacgcttagctgttgaagaaattcctgatgtcatcaatcatttcagaatagctgcaagaaatgctatagatgctgggtttgacggggtcgaagttcacggcgcgcatggcttcctcctcgagcagttcatgaaagacggcgtcaacgaccgcgccgacgagtacgggggcagcctgcagaaccgctgccgcttcgccctcgaggtcatcgatgccgtgtccaccgaggtcggtcccgaccgcgtcgggttccgcatctccccttacatcagctactacggctgccatgactccgacccggacgcgctgggcgtgtacatggcccgggagctggacaggcgcggcgtcctgtactgcagcgcggtggagcccgagatggtcgctgcgacaacagtggtggacggcgagacgacgacgacgacgatgagtaggaggatgatgatcccgcataggctgcacggcatgagggaggccttcaggagggggatgttcatggtcggaggagggtacgacagggatgctgggaacatggccgtggcgtctgggtacgccgacatggtggtgttcggtcgcctgttcctggcaaatcctgacctgccgaggaggtttcagctggacgcgcctctgaacaagtatgacccggcaacgttctatacccatgaccctgtggtagggtacacggactacccgtttcttgatgatgatcgtgaggcgatgagtgatcacacaggctgagtgatgatacggtgaaatttttactctgataataatactgtgatctttgtgtgtttgggtgatgggcattgcgacgtcagatcgtggccagatttcagctgtggaaagtaggtgattgtggacttctggcgtcatgtgcaatgtaaaaggagagctccctttaaactttacaataccgttcatataacttctaaatgatttcgc

SEQ ID NO: 16745 - DNA, 4307 bp, Oryza sativa
  ref <308>: DATABASE ACCESSION NUMBER: AK067219
  ref <309>: DATABASE ENTRY DATE: 2001-12-06
gagacgacgagccggagcgctcgggggagcggcggcggcatccggtgcgctcggagatctgaggaagcgccggccgcgggcggcggcggcggcaggtggcgtgttttggtccagcgagcgcgatgtgccgcgggcgagcgaggagcagcggcgccatggtttgggtcctcacgcctgcgaccgcagaggagcggcgccccggcgagtgggcgcgagccccagggtagtccggtgagcagcggcgacctcaccctcacccatggatggtggaacggatggggatggcggttttttgagatccgcgtcatcagctagataggtggcgacatcacaggttagtcaaaaaaaaaaaaaaaactgcatctgacaacgttatttaggctgtgttcgtttgtgtgagatagggtgagaaaacacgttttccgcgcacactccccaaactactaaacgatgcgtttttttaaaaattttctatagtaaaatatatgcgctaatggcttatctcattttgcgtatcttcccaatcttctcaatcccctatctctcaaactcacccttagttcctgctattaaggagtcaagatctgccgcggagagaggcacggctaactcactatttttgtattccatttcatgcatgcagagcgagagagagagagagagagagccacagccaatttcataggatagctctctgttcttgcattggttttgcttccctctgcgccttgggtgataacaaggatctctttctattgccctgtgattctttctttcatcgtcgtttgatattccccacaccactcttttctctctgttcttttctgtttgggtttgatcgcttgctcgttgagaacctctgcacgattcccgtgtcacaagcaggtaatttgtaatccctcctgtcttctcttgttaattcgaacctatataatctgaataaatcaagttacgttcaatttcgaagatgatacttcatggttactttgatatgcggtgtcatttcaattgattggtggtgttgagtgtatggtattttcttaattggtatggggattgaccattgatgatagtgacaatgatttacatgctgtcatgttacagtaatagcaataatggtttaaattagccatgcataatcacattgagtttagttttagtcccacccctctccagattctctattcatctccctgtatattctgtttgtacgatgtcctctcttccatacttttgggaagtgattttttaaattcaattcttgcgtttctctatgaaattctcctgttgcatccattttcgttgccaattagttgcagcgccatgatggagatctttccaaaatttcctggggcaatgttaaggtgccaagctccttactgccaaatgccaaggaagggaggatgcacgaaattagtgctgatccgtatctatttctgtaatgtggactgtacatattatgtactcatatttaggatttcatatgacaagaatatcaccatctgtaggacgacctccatactagtttagtgactgtatagtgatcttcatgcttgtttagttcaaagtaatgctgaactcaacatgatctgtctgcgtgatgagcatgacaatgttaaccttaaaaaaaaaagcatgacaatgttgttaaaagaaggaagtaacaaataggctcttctgctggcctgaccgttgctttattttgtctgaacatgctacacattataattgatagtacttatcatatgacctttaatttccaacctctactgaactttattacctatgttgctttcattttacagttgaatcatgactgctcagccaaagaagaggagtgtaatagaaagtggagatggaggtcttggtcttggccttgctttatttatctcaaatggtgaagatttgggccctatcattcggcatggatttgattctggtaaacctgaagctctcatgcaaaacctcaggagtattgtaaagaaaaaggaagttgagatcgaagagctttgtagacttcattacgaggatttcatcctggccgtcgatgaactacgtggtgtgttggttgatgctgatgagctaaagggcatgctaactggtgagaacatacacctgcaaaaggtttctagtgccacattgttgaatcttgatgagctttttgagttatattcgattaagaaaaacataggagaagccataacaacgttgaagatatgtgtgaaagtcatcagtttatgcatggcatgcaatggttatattgcagaagctaagtttcatcctgcgcttaagactctcgacacgatcgagaagggctacttgaaaaatattcctttgaaacttctgaagaaggtagttgcaaaacatataccattgataaagatgcacattgagaagaaagtttgcagtgagtttaatgattggcttgttcatatcagaaggatggctaagcagattggacaggtctcaataagtcaggcctctatggctcgacaaaaagatgaggaaatgcgtgcccggaagagagaggctgaagcacatagtgatgctagatctgatgagcatgtgtacaccttggatgtggagaatacagatgaggaatcaacactaaattttgatctcacgccagtgtaccgggcacatcacatgcacatatgccttggtattggggagaagtttcgagattattactacaagaataggctaatgcagctcaacttggacatgcaaatctccacctctcaacccttccttgagtcccatcaacccttacttgctcaggtagctggatttttcattgtagaacaacgtgtacttcgaagtgctgatggtttgttgtctgaaagccaagttgaatcaacatgggagactgctattgctaagatcacatctatactggaggatcaatttgctcgcatgagtatagccagccacctcctcctcgttaaagattatgtcactttgttaggcacaactgttagtaagtatggctatcaaatcgcacaattgattcaagtcattgcgaaatacaaagacaaataccaccagttgcttcttattgagagtcgaaagcagatagatgatatccttgctaatgactcatatgagcagatgattataaagaaggaatatgagtataacatgaatgtcacggcattccattttgaacctgatgatgtagtcccggagtttccatatgtggctccattttcctctggtgttccagatatttgtcgtatcgtccggtccttcattggggattctgtcagctatttttcttacagtgctcgcacaaacatctatgaaattgtgaagggttacctagacaggctattgattgaggtgttaaatgatagtcttctgaacatggtttatgctcgctcgttagccatgtcacagatgatgcaacttgcaggaaatatttctgttcttgagcaatcctgcgatatgttcctcttgtattctgctcagctgtgtggcattccgaagcgtattgcgcagagatctcattccggtttgactgcaaaagctgtcttaaaagcctcccagaatgcagcatataactctttgataaatttggccaatttcaagattgatgaatttatggtgctcttggacgatgtcaactggatagtggaggaagccccagataatccaaatgaatatatgaatgaggtccttatctatcttgaaacgctagtatcaacagcgcaggagattttaccgctagaagctctatacaagatggtttctggtgcaatgagccacatctcggactctatcatgacaacacttcttaacgaaggcgtgaaaaggttcactgtcaatgcagttatgggccttgacattgacttgaaattactggaggcattcgcggaagagaaattttataggaccggtttggtggatttgggtaaggaaacaacattcgccgattgtttggttgaaataaggcagctagtcaatctcctccttagcagccagccagagaatttcatgaatccagtgataagggggaggaactatgggtcattagactacaagaaggttgccatcgtttgtgacaagtacaaggattttgcagatgggttgtttggaagcctttcaaaccgcaacaagcaggatgctcgcaagaggtccatggatgttctgaagagaaggctgaaggattttagctgattaaggttaggaatgtttgcctttgtaaataaattgtcattgcgctgctgaaaatgtcctttggaaactgccagtgtcagaccttccacctcaatttctaaacagacatatgaataggtcaagttttt

SEQ ID NO: 16746 - DNA, 1360 bp, Oryza sativa
  ref <308>: DATABASE ACCESSION NUMBER: AK067220
  ref <309>: DATABASE ENTRY DATE: 2001-12-06
gagtggagctcaaaattcgttccgattctaggggggatcgagcagcgagcggactcccctcgcttaccgccgcgcttggccgccgccgagggacggtggatcgcggtgtcgggggactcggcgtgaggggaagcgggaggcgtggtccacctcgttaggccggtgcctactcccagcgacggcaccgccaggacgacgcgccgccgtgatctcggcggctccggacctccggttgtcttctcgaacggatattggtcatgtaatattgtccatatcatgtatgcccgccgtcctcctcgtcatcgtcgtcgttgctgtcctcgtcctcgtccttgtcgtggggggtagtgggctaggggtggctgggtccaccagctcccttcaccatcgacgcgagggagggggagttgaatccgctgcccccatgcttcttcattaccggatccgttgctgccgcgcatccccactaccggatccgctcgatttatgattataagaaagatattgataccaccttgaaataaaattgttttttattgactcctatatttatggctacaataagttatttatttttttaggtcatgtaatattgtccatatcacggatgcccgccgtcctcctcgtcatcatcgtcgttgtaaccgtcgtcgttgctgtcctcatcctcatcctcgtccttgtcgtggggcgtagggggctaggggtggccgggtccgcccgctcccatcactgtcgacgcgcgggagggagagttgaatccgttgcccccgtgcctcttcaccatcggatccgctgttgccgcgcatccccaccaccggatccgccgcagtcggatccgcgcgggtgatggccgccgcacctccccaccgtcggatccgccgccggacgcctcaccaccgccagatctgtcgccgctgtcgcatccctcctccgccctctcccactgcccgagccctccaccgcgtcgggaggggggagaggggagagaaggagtgggggagaagaggaggaagccatcgtcgtcgcccttgcctaccgctgggagggaggagatgaatgggggtgatgggaaagagagaggactggagaataaaaaaagtgagaatctacgggggggtatttttgcatgccggtgagttaaacaccacattttcacgtccatatattttaaatggtccgtttggaaaaaatgattcttgcatacaagtttcttaagaagccgtatgggaaaatgggataaatttttgtaggcacaaacacttatggcctgtctgcaatctattcgggtggtcatccagaaaaatattttttaagtagtgaatggaaagatgacatgatggatccaacctcatttttt

SEQ ID NO: 16747 - DNA, 1475 bp, Oryza sativa
  ref <308>: DATABASE ACCESSION NUMBER: AK067221
  ref <309>: DATABASE ENTRY DATE: 2001-12-06
gtattcccctcctccgcctcccctagtttcctctcctccccgaaacccccaattcgaatccggcggcgaattcgattggggatttcggcgtcctcgcctccgtgggattcctcggatcccgcctcggcttcccgtctcgatctgcgtctggagttttggagcagacgatttgagtttctggttcgatttggtttggtttggtttgggggcgatttggttcaaggcgcggatggcgtcttctccggtgtcgtactggtgctaccactgcagccgcttcgtgagggtgtcgccgtccacggtcgtctgcccggagtgcgacggcggcttcctggagcagttcccgcagccgccgccgcgcggcggcggcgggagcggccggcgcggggcgatgaacccggtgatcgtgctccggggagggtccctgtccgggttcgagctctactacgacgacggctccggcgacgggctgcggccgctgcccggcgacgtgtcgcacctcctcatggggtcgggcttccaccgcctgctcgaccagttctcccggctcgaggcggcggcgccgcggccgccggcgtcgaaggcggcggtggagtcgatgccgtcggtgacggttgccgggagcggggcgcactgcgcggtgtgccaggaggcgttcgagccgggcgcctccgcgcgggagatgccgtgcaagcacgtctaccaccaggactgcatcctgccctggctctccctccgcaactcatgccccgtctgccgccgcgagctaccggcggccgcggcccccgagtcggaggcagatgcgggactaaccatctggcgactcccacgcggtggattcgccgtcgggaggttcgccggtgggccaagggagcagcttccggttgtctacactgaactggatgggggcttcagtaacggcgtcgggccgaggcgggtaacgtggccggagggcgacggccatgtcgatggcggcgaaggtcggattcgccgtgtatttaggaatctgtttggttgttttggtcggagcagtcggccggagagttcatcatcgcagtcccgtagtggctgaacgcagttttctcggtaactcgatctcctattgatagtggtgaataagtaggatttagtataagaagggaacccagattataagttcttgggacttttgatgtaaatgaaaaccttgcgatttttttccactttgtcccgttttaagagtttatttagagatggccacgagcaaaatagcaaacaactggaagttagtttggaaagcaaattaggaggaagaagcacaggacttcatgaaaggaatgacagtgaatttattgggtaaatcaattgttgcaatgttgtagtcagagagaacaaagtgttgttcttacctctgtactgtttgtgtatatactggattgggccaagaagatttctgatttgcaatatcttgttttaataaaatttcagccttttttatt

SEQ ID NO: 16748 - DNA, 1135 bp, Oryza sativa
  ref <308>: DATABASE ACCESSION NUMBER: AK067222
  ref <309>: DATABASE ENTRY DATE: 2001-12-06
gggaggagaggcctcggctaatcggcttatagccagccgcagccgagcgaacagctttgctcggaatcgccatggctatggggctccccggcctccgctgctgccgcggcctcgacgccgcggccgcgcgccctcttctcggccccgcccgcgcccgcgcctccccgcgcgcctccgctctccgctactcctccctccaagctggggacagcctcggggaggaggtcctgcggatgttcctcgcggagaggcaggcgcacggcgacttcgtcaccaagatctccgacatggtctggaggaggaacggcggcgacctcggcgtgctagaggcggcggcggaacaagaaaattcagcggatgtcgcaccaccgcaacctgaagaagctgatgtcatgggcgagggaatgttgaggattgcggcgacgagagattgggtctccggtgagagcagccttcctgtcagcaagaggctttctgccaaggatcggcaggatgagagggaaagaaggaaggaactcaaccttctaagatatgaagcacttaaggatgaactattgctcctgaccacaggaattggagctgcgtgcagtttatactgtctcctagtcttttctctggaggctgctgtcagttatgcttttggagttgctttcagttgcttgtatcttcaacttctctatcggcacacagataatttgtcaaagaaagatgttccagaaatttttatgaagaagaaagtgaaaagaatcggcataagaagcgaggatttgaagaatacaatagagaaggtgttgggtggtatttcagtagctctttcgtctccaaggcttgtgatacccgctatattttttggattgtcaaccttgtcagatcactttcaaaatagcattttaaattttgagcttgttccaggaatgatgggtttctttgcatacaaggctgccgctttggtacaagtctacagggacaatgaggaccttagattgatactgcctgaagaagatgctgacagcagttgatgtatcagtagtgaagacttatgttaatccagttcctttataaatcaagataagaatgatgtatagatcatatctcagctttgaattgaataaagtttctgttatttttcttcagc

SEQ ID NO: 16749 - DNA, 1596 bp, Oryza sativa
  ref <308>: DATABASE ACCESSION NUMBER: AK067223
  ref <309>: DATABASE ENTRY DATE: 2001-12-06
gagaagaagaagaaagtagcaagccggagtcgagagcctctcaacccatcggccatcgcccaccaccgccattcgccaccacctcgcctccgattcagatctccctcccccccttccattccacgcccatcggattccctcccgattccgctccattcctccccgcctccgcccccatctccgccgacctcgtcgtcgtcggcgtcctcatccaggcagtctcggcggcgattcgatcgccgccacggtcgccgatggaggccatccggaagcaggcgtccaagctccgggagcaggtcgcccggcagcagcaggccgtgatgaagcagttcgggggcgggtacggcgcggacggcgcgttcgccgacgaggccgaggcgcagcagcactccaagctcgagaagctctacatctccacgcgcgccgctaagcacttccaaagggacatagttcgcggggtggagggatacattgtcacagggtcgaagcaggtcgaaatcggtaataagttatgcgaggatggcaagaagtatggagcggagaacacttgcaccagcggaagcacgctgtcgaaggcggcgttgtgtttcgccaaagcacgctcactgatggagaaggagagagggaacctgctggaagcactgggtactcaggtggcagaaccgttgagggctatggtgatgggagctcctttggaagatgctcgccatcttgcccaaagatacgacaggatgcgtcaggaagccgaagcacaggctattgaagtctcgaagcgccaaatgaaattaagagaaacatctgggaatggtgatatgatttcaagattagaggctgctgaatcaaagttgcaagagttaaagtcaaacatgggggttctaggcaaggaagccgttgcatcaatgactgctgttgaagctcaacagcaaagactgaccttgcaacgactaattgcaatggtcgaatctgagagaagttatcaccagagggttctgcagattcttgatcaacttgaaagagagatggtatctgagcgccaaagaattgaaggagcacctcctccagctgttgagagttctatgccaccaccaccttcatatgaagaaattaacggtgttttcatgaggaatccaacagtcgctgaattggtggaaactgtggaattcttcttggctgaggccatccagtcttatcgtgctgagagtgaaactgagctcaacctggcagctggtgactatatagttgtccggaaggtgtcaaacaatggatgggcagaaggtgaatgcagagggaaagctggctggttcccttacgactacatcgagaaaagggaccgtgtgcttgcaagtaaagtcgcccaggtcttctaggcgttcaatgagccatacatacataaccctggtgttgtacactgtattatgatcgttcgtgatcttcaaagaccctctgatcagagaaatcacaaatattcttttgttctattattgtcattatcactaccccttttgtcaaaaccagtgcagccttttgtatgacatcttgttgcatggctagctttctgaatatttcaaaatatacagcggagaggacactgttcat

SEQ ID NO: 16750 - DNA, 2758 bp, Oryza sativa
  ref <308>: DATABASE ACCESSION NUMBER: AK067224
  ref <309>: DATABASE ENTRY DATE: 2001-12-06
ggatttcgcgaggtcttcgcttcgtctccgccccacacccccaaacccacagccacgacgcggccgcaatggcggagcccgagtcctccacggccgcggccggcggcagccgcctccgcaacgcctgcgggggcgtgctgtgcgccttcaccctcctcctcatcggcgtcctcgcgttctcgatccgcctcttctccgtgattaagtacgagagcgtgatccacgagttcgacccctacttcaacttccgcgtcactcagtttttgtcgaagaatgggatctacgagttctggaactggtttgatgacaggacatggtatccccttggccgtgtgattggcggcactgtgtatcctggtttgacattgacagctggaaccatttggtggttgctaaattctctaaacattccgttgtcagtggagactgtttgtgtgttcactgctccaatattctcagcaaacgcttcctgggctacttaccttttaacaaaggaagccaaaggcactggggctggattgatggcagcagctattttggcaatggttccctcatacatctcaagatccgttgcaggaagctatgataatgaagccgtagcaatatttgctttgatattcacattttatctatatgtaaagacactgaacacaggatcactcttttatgcaacgctcaatgctctctcatatttctacatggtctgttcttggggaggttacacattcatcatcaaccttattccaattcatgtactgttgtgcattgtcactggtcgttattcttcacggctttacattgcttatgctccccttgttatactgggaacacttctggcagccttagtacccgtggttggttttaatgcagtgatgacgtctgagcactttgcatcatttctggtgttcataatccttcatgtggttgctcttgtgtattacataaaaggacttctaactcccaggctgttcaaagtagctatgactcttgtcataacagttggcttggctgtttgttttgcagtaatagctatactcatcgctttggtggcatctagccccacaaaaggatggagtgggcgcagtttgagtctacttgatccaacctatgcaagcaagtacatccctattattgctagtgtcagcgaacatcaaccccctacctggccctcctatttcatggatatcaacgtgttggccttcttgattcctgctgggatcatttcatgcttcttgcctttatctgatgcaagctccttcgtggtcttgtacttggtcaccgcagtatatttttctggagtaatggtgcggcttatgcttgtccttgctcctgctgcgtgcattttatctggaatcgctctttctgaggctttcgacgtcctcacaagatccgttaaatatcagctatcaaaattatttgatgacagccctgctgcttcaggggatagtagtgcagagagttctagcgctagtactgtctccacaaattcagcaaaaaatgagactagacctgaaaaaactgaaacagccccaaaggaaaaaccatcaaagaaaaaccggaagaaggaaaaggaagtggctgaaagtgttcctgtaaagcctaaaaaggaaaagaagcttttggtacttcctatggaggcatctgttttgggcattttgttgctgatcgtgttaggtggtttctatgtggtccattgtgtgtgggcagcagctgaggcgtactcagctccttcaattgtgttgacttctcgttcgcgtgatggattgcatgtttttgatgatttccgtgaagcctatgcatggctcagccataacacagatgttgatgacaaggttgcgtcctggtgggattatggttatcaaacaactgcaatggccaacaggactgtaattgtagacaataatacttggaataatacccacatagcaacagttggaacagcgatgtcatctccagaaaaagcagcttgggagatcttcaattctttagatgtcaaatatgtccttgttgtatttggaggtcttgttggctaccctagcgatgatattaacaagttcctttggatggttcgcataggaggtggtgtattccctcacatcaaggaacctgattatcttagggatggtaactatcgtgttgatgctcaaggcaccccaactatgctgaattgcctcatgtacaagctttgctattacaggttcgttgagaccgatggcaaaggttttgatagagtaagaggatatgaaataggaaagaagcatttcaaactaacacattttgaggaggttttcacaacccaccactggatggtccgtatatataaactgaaacctcaaaagaatagggttcggggcaagttgaagaagttgaaatctggctccaaagctagctcaacgaatgcggcgggccgaaagaagaacccatggcaataaaaatgagtaaatgcgaaaagcgacgtggctgcttggaatttgcttttgctagctcaactgcaactaagctcaaaagaactagaaaaccacaggcctaggattagagattgctgcgttattgcactcagtatttgacacccctaatatgtttttgggaccagcaggagtgctgaagaaatttttgatagactgctctaagctttttggccccattgtttgcaacacgcggtttagtgtcttttatactccttttgcactgaagatgtttaggcggacgtacaatggaagtttatttagaaaaatgagaacgtggctatttattgttt

SEQ ID NO: 16751 - DNA, 2445 bp, Oryza sativa
  ref <308>: DATABASE ACCESSION NUMBER: AK067225
  ref <309>: DATABASE ENTRY DATE: 2001-12-06
gccgccgggaacggagtggtcatcgatgcaggcgacgctttctgtatgctacagcctataggtggaaaacgaaggtcatctgaaaggatcaaaggaagcaacaccaagtccttttctttactctgactccctcactctcgtcatttattttctttcttaaaagtagttgctttagcttcagccacgcaaattctcgataattcttttttattttaaaacttgttgcttttgatgctttagcaacagaacaatggaggcaacaacgctgagtgtgggcaaatccgtgctgaatggagcgcttggctacgcaaaatctgcatttgccgaggaggtggccttgcagcttggtatccaaaaagaccacacctttgttgcagatgagcttgagatgatgaggtctttcatgatggaggcgcacgaggagcaagataacagcaaagtggtcaagacttgggtgaagcaagtccgtgacactgcctatgacgttgaggacagcctccaggattttgctgttcatctgaagaagccatcctggtggcgattccctcgcacgctgctcgagcggcgccgtgtggccaagcagatgaaggagctcaggaacaaggtcgaggatgtcagccagagaaatgcgcggtaccacctcatcaagggctccggctccaaggccaccatcacctcagctgagcaatctagcgttattgctgcagccatattcggcattgatgatgcaaggcgtgccgcaaaacaggacaatcagagagtggatctcgtccagctaatcaacaaggaggatcatgaccttaaagtgatagcggtctggggaacaagtggtgatatgggccaaacaacaataatcaggacagcttacgagaacccagctgttcaaatcagattcccatgccatgcatgggtaagggtgatgcatcctttcagtcacgagagccaaaaaggtgaagccagaaaggtgaatccaccgagacagtcgcacaaccatgagaggaaagagtgttcattgagcggtaagcactccgaatgcccgatagctctgagcacaacccaccacagttgccacgactccgggcatgcgaccaagagatgatcaatcgtctcttcgcattgatcacacagaacacatcgatccaggtgtgacaaaccacgactccggagacggtctgctgtccagcaacggttaagagctaccaaccaaaggaagtagcgacagcgagggggcgccaaagattgccaaattggcttgtgctggagacgagttcttccaaaaaagagaacacgataagccgagcgggaagagtattctcctgaggtctcccaccgccaagatagagagtccggctcttcggaaagctgcactgaccgaaggcaatcccaaagcttgaaatactctaggatcgcttgaatacccaacgcggaactgatgtcctggatccatcttctgtcagtcattgcctcggccaccgtgcgacgattccggagacgagcagggactgcagcatagacagccggcgctagcgaccgaatggaggaaccctgcagctagcaatcctcccagaacagcactgaattcccatcccctaccaagcataccatggaaatcgatactagattgcgctccttctgcgagaccggaatactaagcccttgccagggcttttccggtgaagttctttgctgctagagccatcgtgacctcagggcgattcccaacctctctagatcaggaatccccaaaccaccatactccttgggcgagcaaactcgagcccatgcgacccaacagacgccgccgtttgcagaagcttttccagcccaaagaaagctgcgacggatcttgtcaatccctttgataacccacttcggtgcattgatggccatgagtaggtagatgggaattgagcttagtacagcgttcaccatggtagtccggccaataggcgtcatcaagtgagacatccaagaaggcaaacggcgcgcgattttgtcaaccagtggctgcaagtcttccttcttcaggcggaagatggacagaggcaatcctagatatgtgcaagggaaggaagcgacctgacatggcaattcatcatggagagtttggagatccgtctcattgcactggattggaagcgctgaacattttgcaaaatttgttcgaagaccagacgcttccccgaaaaaatttgcttgatatcatttttaattcagttatgtccttaggtaatttctaattcagttgtgtaggccagttgaagtgcgtgggaattaccattccattagaagcacagctaatgcaactaacaagtgccccctccagttctctctctcatttgcctttttgggaatgcatgtgctcagcattttaagactacaaccacaaatatatgtatttggatttgtcaaaacaaatatgtatgctagaaaaataaatggtct

SEQ ID NO: 16752 - DNA, 2202 bp, Oryza sativa
  ref <308>: DATABASE ACCESSION NUMBER: AK067226
  ref <309>: DATABASE ENTRY DATE: 2001-12-06
gatccattatccccgtgccccaccactggcgccgctcaccggtcacgaccaatgccgccgaccgccgccgtcgccgtcgccgtggccgcggccaccgcgctcccttctccctcctcctcctcctcccaccgccgcctccccgccaccgcaaaatccgtctgggtaaaccccagcctcccgagctcccagcccttccatcgccggaaacccgccgagccccagcaccagcgccaggaccacgtgcccgacctccccgcgctcctcgcggccctctccgccgcgcgcacggcctccgacctggccgccgcggtctccccgcaccgccccgtctccccgcgcctcctcggcacgctcctctcccgcctccccgacgcgcgccgcggcgtcgcgctcctcgacctcctcgcgccagacctccccgcctccgcgctcctcatcccgtacaacctcctgctccgctccgcgtgccgcgccgggatgctccgcctcgcctccggcctcctcctggagatgcgggacagaggggtcgcccccgacgcgttctcgtactccacgctcctcgcggcgctcacccgcgcgggccacctcgaccacgcgctcaccttcctgccgctcatggaggacgacgccgtagcgcccgacctcgtgctcttctccaacctcatccacctcgccctccgcgggggcgacgcgcccaaggcgctcgcgctcttctcccgccttcggggcgccgccgggatcaagcccgacctcaaggcctacaacgccgccatcgccgcgtactgcaagtccgacctgctccgggacgccaaccggctcctcctccacgacatgccctccgacggcgtcgcgcccgacgcggagtcgtactcccccatcctcgccgcgctggcgcgccgcgggcggcacctcgcggccgtgtcgctcttcacgcacatgcgcgccgtggctcgcgtcaagcccgacctgtccgtgttcaacatcgtgctcaacgcgtacgggcagctcgacctcgcgcgggaggcggaccggctgttctggtccatgcgccgtgctggtgtcgccccgagcgtggtcacctacaacaccatgctccgcgtgtacggcgacgccgggctgttcggggaggcggtccacctgttcggcctcatgcgtagcgccgcctccgatggcagcgaccgcggtggcagcgtcatcaagccgaacgtggtgacgtacaacaccatgatcgccatctacggcaagtcgctggaggacgagaaagccgggagcctggtgcaggacatgcaggccaatggcatccagcccaatgccatcacctactcaaccatcctgtccatatgggtgaaggccgggaagctcgaccgtgcgggaagctgttcgagaagctccgggaagccggcacggagatcgacccggtgctttaccagacgatggtcgtggcctacgagcgtgccgggcttgtttcacaatccaagcgcctgttgcatgacctcaaagactcagaggacgtccccaaggagacagccatcaaaatcttggcgaatgccggccgagtggaggaggccgcatggctgttccgccgtgcagccgacgccggcgacgtcagggacacatcggtgtaccgaatgatgattgacttgttcgcaaagagccggaggcaccggagtgtgatcgaggtgttcgacgaaatgaggaaggcggggtctttgccggactcggagacgatcgccatcacgatgaatgctcatggtaagctgaaggagttcgacaaggcggcggcgctgtaccgggcgatgagggaggaaggatgcgtcttctcagacagggtgcacttccagatggtcagcctgctcggcgcccagaaggacttcgacgcgctggaggcactgctcggtgagcttagcgatgacccgagcatcgacaagagggagctttaccttgtggctgccggcgtgtacgagagagcatgcaagtttgatgagtcgtcacagattatcagccagataagaagccccaacgccattggtgtccagaagttcagatgagaacctccagtttctctgacgacaaattcaggtgtattgccagacagcaatacacaccatagtgtcattgacaattcaaggttgtaacttgtaagtgcgcgtggccactgtggaagttctttttcaattaaattttagacaccaaagtgttatc

SEQ ID NO: 16753 - DNA, 1873 bp, Oryza sativa
  ref <308>: DATABASE ACCESSION NUMBER: AK067227
  ref <309>: DATABASE ENTRY DATE: 2001-12-06
gctctctctctctcttcctcctccgcgcgccgccttacccctctcctccttcctcgacgcggcggctgctccagatcttctcttcccctcgcggcggcgtctcccgtccaatccagtgaactatcggctcagtaaaaggggaaaaaggagggatcttttctggacatttgaagcttacggacgacaaggtaagaaagtgtatataattcacattatgcgcgtctttagttaacaacaactctgctaccaagctgtttctaccatccgtgttcgtgtaaggagttgtaccctatacatgtctctggaattcaaaattacatccatctttaaactggcgccatatccaattcttttttttttcttggatacatattaacaccatctgtgttgactgtctgtagtcttttctcatcattttggataaatattacaccaaagtctcttgtttatatagctatatgaactcagaaagctgagaagctgcaagtctgctgctactagcaacatgatttagatgcttagtggaagtttgctcaaatatttgaaccgcataagcttgctttgctttttacgtgaagcctaaacaagacattctattcttctatagttgtattttggggggatcgatttcatgtatgcctgatttccaatgtatttggatgtcagttttgcctaggtttattttattctatcttttgggttcagcttatatttttgctgtctgttatcatgctatattattctagatatttcaaaaactaacagtgattttgtctcttctatgagatgcacctccttgcatcatttcacggccctacaggttttaagtctgtagctgatctgtcgggatggactccaagaagttcctacagctgcttgaagagaaaaagaagagaatccttgagaagaaagaagccccactgaaatgggagcaaaagctcgaagcagcagcgaaggcaaaagctgatgctgaagcaaaggaaaagaagcttaagtcaagaaagcacagaaggaggggccattcttcctcagactctgaaagtgattccgacagtgatggtgatcggaagcacaggaagaggaaggaccgcaaaaggcacaggaaacacggtcactctgattccgatgaagccaagaggcacaagcgcagatcaaagaggagaagctcagactcaagcgatgatactgatagtgatgaatatgatagtgggtctgaagaagaaaatcgaaggaagaagcgctcacacaggagaaagcatcgccgacattcatcaaggtctgattctgatgcttcagactatagcagcgatgatgaagagaggagatcttccaagaaggaccattccagttccaggagtcacaggcaccaccaccaccgatcatctggtgatgactcagggtctgagtctgaggagaggggcaggtcaagacataagaaacatcatagatcaagcgatgaggatgcaacatcagattccaacaaccataagcaccgtaggagtcgctccctggaggagtcatccgatgatgcagctgccggtgaatatgaaaaggtgagaaatggtaaaaggcctcacaagaccggacaccatcgtcaccaccaccgccaccaccatcaccatcatgatcaccgtagctcttctgaacctaatgacaagaagcggcaagatggccagaaagcccttgaaggtggcaacgttgattaaactccagcggcactagttgaattggtttttggcgcgtgaaaagaattttagttgtcttaccttttatgttggtcactctttattccaacgttgtggattctgacgttgtactgatacaaagtcggttcggtgattgtgacttttatgtctcgtcgtttcttcgtttc

SEQ ID NO: 16754 - DNA, 2438 bp, Oryza sativa
  ref <308>: DATABASE ACCESSION NUMBER: AK067228
  ref <309>: DATABASE ENTRY DATE: 2001-12-06
gattacacatctcatccgcctcattaacgttctcatttccactctcctcctcctccacctcccccctcgcctcgatccccgcggccaccgcgcctctcctcccgctgccgccggcgggcgccgcggccctcgcccccgccggaatccgccggctcgcggcgagcattccgagctccgggtcgcccgaaacctcgccggatccggcggtgctcgacgcggctcccgcgagagcagctgcctgtttcgccgccgggacgccgcgggcgcggatctgagggtgtttggtggaaatttggtgggggggttgagttgatttggccttgggttggggttgggttgggttaggctggttggcgggggaagctgagggggataggaggaggttggggctttgtggctgcgcctggtacatgagcgccgcgagcatcctacgcggctgcgtcttcgtcggggagcttccggcggcgcgatgatcgagcagttcgtaaattttgtcatccgtccgccgcgtgcagagtacaatccagatcagtatctgtgggaaccggagtttactcttgcgggaagaaagtacaaacgaatagatttggagcttacgaacggaagagaccagaccttaaaatgcagccactatgttcctgctgtcatcccagacaatactgcccttccttgtgtgatctactgccatggaaatagtggatgcagagcggatgcaaatgaagcagctgtcatacttctcccttcaaatatcaccctctttacacttgactttgcagggtcagggctatcaggtggagagtatgtcagccttggttggcatgagaaacaggatctcaaatgcgcggtgtcctttttgcgaaacaataaggaagtttcttgcataggcctttgggggcgatcaatgggtgctgttacaagcctactgtatggagcagaagacccctcaattgccggtctggttttggacagtgctttctctaacctatatgacttaatgatggagcttgtagatgtttacaaaatccgagttcctaagttcacggttaagatggctgtgcagtacatgcgccgtgtaattcaaagaagagctaagtttgatataatggatcttgatgttgttcagtttgcccccaagacatttattcctgcattatttggacatgcatcaaatgacatgtttattcagccccatcacacggaccgtattcatcaggcatatgcgggggacaaaaacttaatcaaatttgatggcgatcacaattcccccaggcctcaattttattatgattctgtttcaatattcttctataatgttctacacccacctcagtttccttcagtatgctcaaataagttagataagtactacaaccttggtgcttttaaggttggagctggaacaaatgagagcttactgtatgaaatcatcaatggtctaagggctgctggtcctgatgcaggcagttcatcggcagctgcagctaacttcacaaatgctacaaaatcagtggttgaattgctgacagagagggtcaatcagttgtctattaaaacagataatgacttggattttcttttggatgaaaatcataacctcactgagatggacactcacactgctgagtctcatttagaggataaatctcacaggcaaaatgaggagtgctgctcatacacaagttcaaaccgagagagctggggaagatgttcttccttgggggcagcgagtgatggatcatccctaggcgagcgccctgaaattcctagtcataagcataagagcatgacgctacgggccttggcaacaccactgagacggatacgaaggaaaccgctcgctataccaaaggagaggaagaatcgatctctatggaagaggctcaaacaggagaggcaagagatgggggagagcctaacccagcgattcaggctgtgcctccaaggccaggctcaacacaagagaaccaagtcatcttaacaactgtgaatacacatcttaacacggaaatatccgctaggaacacggatgacacgaaggacaggaaatgcacccctgattctgactcttggcgccaactgtacacacattggttgaaaacatcacttactgctcaactaagcctatcaggcaatccttgtaattgccattttgtaccttatcattttccacgtttgattatgtaaatctgaaggcatgtactataattttagcgtgtgaccacccctggtctttggggtagtagttctagtagcctggtgcattgtttctaagatctgggtaggcttttgagttgaaactgtattgacaattgacatgagaacgttttttcgctgtggtgttggaacagtggaccgctctcattactgtgcccacagtgtaaaagtgtgaaatgagcatgtcagttgcatgaccatttgaagtagagaagtttcatctg

SEQ ID NO: 16755 - DNA, 2616 bp, Oryza sativa
  ref <308>: DATABASE ACCESSION NUMBER: AK067229
  ref <309>: DATABASE ENTRY DATE: 2001-12-06
gggcgagcgagcacgaggcactcaccgccggcggcgaccgaagcaaatccggcattcgcctgagccggcgagattcggagtcggagaggaggaggaagaagatgacggtgggagccggggtggcggtgcaggacggcggcctggtggcgctgggcgccacggtgctgacggaggtgcgcgacaatgtgctcctgacgccggccgccggcgccggcatgacgagcggcacgttcgtcggagtccgctccgccaccgccggcagccgcagcgtcttccccgtcgggaagctcaggggattgcggttcatctgcacgttccggtttaagatgtggtggatgacgcagaggatggggacgtcaggccgcgacatccccttcgagacgcagttcctcctcgtcgaggccgccgacgccgacggatcacacctcgccggcgacggcgccgccgcggtgtacaccgtgttcctcccgatcttggagggacagttccgagctgtgcttcaggggaactctgatgatgagctcgagatttgcctcgagagtggtgacccagctgtggaatcattcgaaggcacgcatctggttttcgtcggtgccggatcggatccattcgaagtcatcacaaattctgtcaaggctgttgagaggcacttgcagacgtttactcacagggaaaagaagaagatgccagacatgctaaactggtttggttggtgcacatgggatgcgttttatactgatgttacttcagaaggagtaatggaaggattacagagtctaggaaaaggtggaactggcccaaaatttgtgataattgatgatggatggcaatcagttagtatggatcctgcaggaattgcatcattagctgataactcagccaactttgcaaacaggttgactcacataaaggagaaccacaaatttcagctaaacgggaggaaaggtcacagggaagagaatccggcaaatggccttgcacacattgtcaatgaaattaagggcaaacatcagctgaagtatgtttatgtgtggcacgcgatcaccggatactggggtggagtaaggcctggtgctgatggaatggagcactacgaatcgaagatgcagtacccggtctcatcaccgggagttcagaagaacgagccatgtgatgctctgaacagcataaccaccaacggccttggccttgtgaaccctgacagagtgttcagcttctacaacgagctacacgcctaccttgcatctgctgggatcgatggagtgaaagtagatgtgcagaacattcttgagacactgggtgctggccatggtggaagagtgcttctggcaaggaagtatcaccaggctctagaagcttccatcgcccggaacttccgcgacaacggcatcatatgctgcatgagccacaacacggataacttgtacagttctaagaggagtgctgttgtgagagcttctgatgatttctggcctagagaccctgcttcccatactatacatattgcatctgttgcatataatactgtatttcttggagaattcatgcaaccagattgggacatgttccatagtgttcacccaatggctgaataccatgctgcagcaagagcagtcggtggctgtgccatatatgtcagtgacaagcctgggaaccatgacttcaatttgctgaagaagctggttcttcctgacggatcgatcctgagagccaaactccccggcaggccaaccagagactgtctgttttcagaccctgcaagggatggcaagagtatcctgaagatatggaatctgaacgagcactccggtgtgattggcgccttcaattgccagggtgctggatggtgcagagtagggaagaagaacctcgtccacgacgagcagccggcgacggtcaccggtgtcatccgtgcacaggacgtgcatcacctcgcaaccgttgctgccgatggctggaacggcgacgtgatagtctactcgcacatcggaggggaggtgacctgcctgcccaagaacgcgtcgttgccggtgacactgaagacgcgagagtacgaggtcttcaccgtcgtaccactgaagaagctcgacaatggcgtctccttcgccgcggtcgggctgatcgggatgttcaactccggcggggcggtgacggcggtgaggtacgtggaggacgccggcgttgaggtcagggtgcgtggctacggcacggtcggggcgtactcctcggcgaagccggcgagggtggtggtggattcggaggcggcggaattctcctacgatgatggatgcggcttggtcacgttcgagctcgccgtgccggagcaagaactctactcctggaccatctcgatcgagtactgacgtagtgacgttgcttaccatgaagtttctcaatgtttttcatgatgaaaaatggagtggatgagatttctgaaaatatattcaggttcttgctgaatcccgggttgggaattcagcatggtgctgaacattgtaagctaaggttgagatgttcgcaacattcttgctgcatatgttgcggctaattcgtgttattccgagcatacacatacagtatgcaaaaatccaaagggaaaaaaaaatggtttctgcc

SEQ ID NO: 16756 - DNA, 971 bp, Oryza sativa
  ref <308>: DATABASE ACCESSION NUMBER: AK067230
  ref <309>: DATABASE ENTRY DATE: 2001-12-06
gtacccatccccagcctcccccacgcacgcctccaatcgcgccgccgctgctcccctcctccagtcgcgccgctagtcccctcctcccgtcgcgccgccagccctccccatctcaccgctgctcccctcccatcgcgctgcgctccctgcctcccgtagcacctccgccagtccccatcgcgccgccgcatcgctccacccatcgcatcaaccctgcagctctccaggtcaggaggaatagatgtccccttcggccctgtcaattccaccaccactccgtgactcctagggctcgtagctccaggaaccagcgcccacgcaccctcccacgctcgcgtgtccactccgctgtcactcttcttgctatcccttgggcttgagtgctgttcgaatgaaccagttggtgtcgcggaagtacatgggctgaatttattaaccaaggtcatcaacaaggcaagcataagaggaccaaggggatctccatggtagaagtttgaactttacttgaggaaaacagccatatagctggcaacaagcaaacaccagaggtgcaccatggataaacagtggatggataagcctaggcactctagagaatattcagaagggctggacatattcctacaacatgaatttagttcagcagtaggcaacaaaatacaatgcccctgtaaaaaatgtgctggttcattctggagagatgaaagcgaagttcatgagcatttgatatgtgagggctttctacgagggtacaaaccattgatgtttcatggagaaggtagctcctttgtgaattctgctgagtatgatgaggttggggatgtggagtcaagtgaacatgatgacatctttgatttgcttcgagacttggcatgtggcttagatgataggggggaatttgaggatgagggtaattcagatgtaacaaatgaagatctgaatgctcttaaaatgctgtcagatgattatgg

SEQ ID NO: 16757 - DNA, 2148 bp, Oryza sativa
  ref <308>: DATABASE ACCESSION NUMBER: AK067231
  ref <309>: DATABASE ENTRY DATE: 2001-12-06
ctggggctacttaaacaagtagagacacttcttcatttgcagccaatttgattgcttgcaaaattgtgccaaattttcagtactagataagataggatcagagttcgaccagctgggatgcgttggcttctccttgccctgttcttggttgctctggtgagcaacggcgccgccgtccatggcgccttcaacaggttcagcttcccggaggacttcatcttcggcaccggctccgcggcttatcagtacgaaggcgctgtgaacgaaggcggcagagggccgagcatctgggacacgtacgctcacattccaggcaaagttgaagatggtagcaacggggatgtagcagtggacttttaccatcgctacaaggaggatctgaacttcgtgaccgacatgaacatggacgccttccgtttctccattgcttggagcaggatcctgccaaatggaaccatcagtggaggaatcaacaaagaggggattgctttctacaacagcctgattaacgaggtcatatctagagggttgaagccatttgtcaccatcttccatttcgacaccccacaggctctggaggacaaataccggagcttcctcagtgaaaacattgtgaaggatttcgtggactatgcggacgtgtgcttccgtgagttcggcgaccgggtgaagtcatggaacacgttcaacgagccgatgatcttctgcgccggcggctacggctccggcaccaaggcccccggccgctgctcgccgtacgtctccaagaaatgcgcccccggcgactccggcaacgagccgtacgtcgccggccacaacctgctgctcgcccacgccgaggccgtccgcctctaccgccaaaagtaccaggcgacgcagaaggggcagatcggcatcacgcaggtgtcgcactggttcgtgccctacagcgacgccgccgccgacaagcacgccgtcaggcgcagcctcgacttcatgtacggatggttcatggacccgatcgtgttcggcgactacccgggcaccatgaggaagttggtcggtgaccggctgcccaaattcacagccgagcagtcggagttggtgaagggatcctacgacttcatcggcctcaactactacaccaccaactacgctaagagcgttctacgacgcccgagcaagctcaaacccgcctacgctactgacaactgggtaaatcagacagcttaccgcaacggcgtcccgatcggtccgccggcttttaccaagatcttcttcacctacgcgccgggtctgcgtgagctgcttctgtataccaagaggaagtacaatgaccctgacatctacattgcagagaacggcaccgacgaggcgaacaacagcacgatccctatcgccgaggcgctcaaggatgacaaccgaatatccttccactaccagcatctccgcttcactcagctcgcaatcaagtagccacatcaaaatccaatcaaattcagttctgtttcttctggatataggtaggttggctgcaatgtgagtgtgaattgaaatttggacgaaatttgcagggaaggggtgaaggtgaaaggctacttcacgtggacgttcatggacgacttcgagtggggcgacggctacaccggccgcttcggcctcatctacgtcgaccgcgaaactctcaagaggtatcgcaagaagtccagctactggttcgctgacttcctcaagcgatgatgaaaaagaagaagaaatcaactagctcacttcactagcctgatctcctgaataaaatgatctcctgaataaaaaagttcctgaataatcttttggcctcaatgattcgactggctgcatgtggccattgtacttgttagctctgagaaataaaagtgcagtcttgactctcgacgaatataagcaatttaacttgtgtactactactgctgacaaatactggggaatataagcagtaattcagagtttcagagacatgaatgatcaattgtaagcagtatttcagcagtagtttagagacatgtaattcagagtttgcttgtacacaaactcagtaattcagagtttcagagacatgaatgatcaattgtaaggagaaatggggcttttgtcgtctcagacacaagaataagcccttgtttagttccc

SEQ ID NO: 16758 - DNA, 2600 bp, Oryza sativa
  ref <308>: DATABASE ACCESSION NUMBER: AK067232
  ref <309>: DATABASE ENTRY DATE: 2001-12-06
gacgagtgacgacgagtagtcctccacccctacgcctcgccttctcctctcttcttttcccacgcaaacgccggagacagaggaggagacaagagtccaagaccaatgcgaggcaacggcagggggcgggaggaggaggggaactccccaatgggccgccggttgcgggccgtctcggcccacctcctgccgccggcgtccaccaccaccaccaccggcggcgttgacctcgccgccaaccccaccgccggcgagtacgcgcacgtgcagggctacagtgctgtgctccctgagaagttgcagaccgggaagtggaatgtataccggaatgcgaagacacctcttaggttaatagatagattccctgatacccctgatattgcaacgcttcatgataatttcgtgtatgcagttgagacctttagggactgtagatacctgggcacaagaatctgcgctgatggaacagttggggactacaaatggatgacatatggagaagctagtacaaacaggactgcaataggttctggtcttatttatcatggaatacctgaaggtgcatgcattggtttgtattttataaacagacctgagtggatcatagttgatcatgcctgtgcagcatattcattcgtgtctgtgccactttatgacactattggtccagatgcagttcagttcattgtcaaccatgcgacagtagaagctattttctgtgtgcctcaaacactaagcactctgttaagctttataactcaaatgccatgtgttcgccttatagtggtaattggtggagacaatgcaaatatgccatctaccccaacatctactggagtggaaattataatttactccagactactcaaccaggggaagatgagttctagaccttttcgtcctccaaaacctgaagatgttgccactatttgttacactagtggcacaaccggcacaccaaagggagttgttctttctcataggaacttaatcgcaaatgtagcaggatcaagtgtggtcattaagttttacccatctgatgtgtacatctcatatctacctttagctcacatctatgagagagttaaccagattgcactgcttcactatggagttgccattggattctaccaaggggataatttgaagctgatggatgatctggctgcactgagaccaacagtattttctagcgtaccccggctatataacagaatttatgctgcaattacaaatgctgtgaaggagtctggagggttgaaagaaagattttttcatgctgcatacaatgctaagaggcaagccattatgaatggacgaaatctgtccccaatgtgggacaaattggtatttaacaaaataaaagctaggcttggtggacgtgtgaggcttatgtcttcaggtgcttctccattgtcagcagatgtcatggaattcctaagagtatgcttcggttgtctcgtaattgaaggatatggaatgacagagacatcctgtgtcatcgctacaatggattgtgatgataggttaattggtcatgttggacctccaaatccatcttgtgagattaagctagtggatgtcccagaaatgaattacacctctgaggatcaaccatatcctcgtggggaaatttgtgttaggggaactacgatattttttggttactataaggatgaaatccaaacgagagaggtcattgatgaggacggttggttgcacactggagacataggtttgtggctgcctggagggcgtttaaaaattatagataggaaaaagaacattttcaagttagctcaaggagaatacatagctcccgagaagattgagaatgtctatgctaagtgcaagtttattgcgcagtgctttatatatggtgatagtttaaactcttctttggttgccgtagtagcagttgaaccagaggtgttgaaggcttgggctgcatcggaaggaatccagtacgaggatttaagacagctatgcgctgatacaagggcaagagctgctgtcctggctgacatggactctattggaaaggaggcacagctaagaggttttgaatttgccaaagctgttacccttgttgctgagcctttcacactagaaaatggtctcctcaccccaacattcaagatcaaaagaccgcaagctaaggcatactttgcaaaagaaatcgcagatatgtacgcacaactgcgtgaagcagaatcaacaaagtccaagttgtaattacccgagtaacaaacagaataaaggttcaaccaacacaggagatttagttcgccaattgtatattcaacaggatgaaataagcgccttctatttactggccaagcaaacaatgacagcagtatttcacgagcccttccatctgacgacgaaatgaaacttcaccgatcaacagcagggaacagttggatgtagaggccggtttcttaatccattatctaaaaaacagcagggaacagtgcttgatgcataattcatatttgtttcttatttgagtggagtaatactactgtttagtgggatatggactactcatttgtttgggacagtatttggtgcggaattaatatttgtttgttgctagc

SEQ ID NO: 16759 - DNA, 2039 bp, Oryza sativa
  ref <308>: DATABASE ACCESSION NUMBER: AK067233
  ref <309>: DATABASE ENTRY DATE: 2001-12-06
gtgtttcgtctccccgatcgcctccggcctccgccgctcgccgctcgtttccgccgccgcgcgatccggcggccggaaggcgtcagccatgcacgaccaggcggagatctgcagcctccccatcgacatcgccttcggccgcctgcaggagtggctggtggaccgcaagcgggtgccgcaggactggaggaagcgcctcgccggcatccgcgcccgcctcgccgccgccttcgcctccctccctcgcgacctcgacccctccctcctcgccctcgagccggacgaaattgggtatcttgaagcaaagaaaatatacggcatcctcttggaatccaacccggagagtaggaacatatttggccgcctgactggctcagcgggtgaatgggaggccattgttaaagcttatgagaaggaccatgtttttctcggggaggcagctcagatcatggtccagaatgtgaactatgacattccttatcagaggaagcagatgcaaaagactcaacaacagctcgcagagctggatagaagggaggctgacattaagcgacttgcagctctgtccgcaaccagatatgcagaggcttgccaggagcttggtctgcagggaattaatgtgcggcaagaactgatagagtctgcaaaaacacttccttcaacgtttacaaaaatcttggaggttctgaacagtgatcctgtctcaatagctaccgagtactatacaactttcgtaagggaatgccatactgaggataaggaaaactgcaaatctgtgctacagaatctgaaacagttgcaggctaatcctccctcccttcatatctcagtatgcaatgaggttgaatcttctcttggagagacatcaaaagctctggagtctaatgtgactggggcagaaaacattgactcaaatatatctgcagatgacattgattgggacatctctttggatgataatggaattgattgggacattggtgctgttgaacaacctgtagaagaatctggcaatggttttggatcgtatgaaattattgatgccaatgtagagttggcaggttctgaaaattataattttggtatttcagatgatccatctgtgaacaagtctagttcatctgagcctggtatttgctgggacatcactgatgttaatcctgaagaaaatgctagtatacagaatgctcctgaatcaggacagtctcaaagtttagctgaagaaagaagccagttactagagaaggaatatagaaataatattcttgatgatttacttgaggtaagagcatttttgacccaacgcttaggggagatgaggaatgctgatacatcatctctacagcatcaagtgcaagctgtctcaccttttgttctgcagcagtatgctcctgaaaatttagagaatatgcttgcagaggtctcatcagctatatctttgctcagtaaccagaaaactcttgaccttataatgattctcaactcaaaaaggtttttagacagattagtatcaacattagaagacaagaagcatcatgaggtgaaactacgagaaggcttaggtgatttgtcagttaagcgaatggagctgcaaaatgcactttcgtcatcctggcctaagcaagaggcagcaattacaaaaaccagggaactcaagaagctctgcgagacaacgctatcaactgtatttgatggcaggccggtgcatataattggagagatcaatactttactaagttcgagtgttagtcaattagctggatgactgtactagccggatgactgtacctgaaataagatgagattgaaagctggttgattacatcaaggttcatactttaacaacttgtctgtttgtacttgggttatttttgctgcctgaatcaaatgttcttttgtgtatgattgctgccccggagtgggtgataaagactgaagatggcgaagttaaatatgttgtggagaaaaattccattgctaacaagcagatatcaatggtttgaatatcaaataatcgatatcttaatatcaatgatttg

SEQ ID NO: 16760 - DNA, 1904 bp, Oryza sativa
  ref <308>: DATABASE ACCESSION NUMBER: AK067234
  ref <309>: DATABASE ENTRY DATE: 2001-12-06
gacacgcagaaaaggacaggaggtctcgtcacgagcgcgaggaggaggaggaggaggacgacgatggcgatggcggcggcgaagggcagggtcctgccgctgctggcggtggcggcggcgctcgcggcggcgctcctctaccgcgcgcccttttccaagagcctgggcggtgaggggtgcagccttctcccccacgaccacttctggatcgccagcgagcgcgtcgtcacgctcggacgggtcggccccgccgcagtggaggtgaagggagggctgatcaacgcgatcgccgtcggggattaccggagcttcctgctccggcgaccggtggtggactacggtgacgcggttatcatgcccggactgatcgatgtgcacgcgcatcttgatgagccaggacgtgctgagtgggaggggttctccactggtacaagagcagcagctgcaggtggcattacaacattagtggacatgcctcttaatagctacctgtcaactgtttctgaagaaactctcaagctgaagttggatgcagctaaggataaactacatgttgatgtagggttctggggaggcctcgttccagagaatgccctcaatccaagtgcactagagagcctattaaatgcaggcgtcttagggctcaagtcatttatgtgcccctcaggtataaatgacttccccatgacaaattcaactcatattgaggagggcctggttacattggcaaagtacaaaaggccgttacttatccatgcagaacgcatacccgatgttcagaatgaagatgggatcgatggtgaactagatcctaaagcctatacgacatatcttaaatctagaccaccagcatgggaggaagcagcgatcaaagatctgcaacgtgagatgaaagacacggagatagggggtcggtcagaaggagctcatagtcacatagttcatctctcagatgcaaaaacttctcttgggcttcttaaggatgcaaaacaaaatggtgcaagggttagtgtagaaacctgtcctcattacctggcgttttcagctgaagaagttcctgatggagatactcgctttaaatgtgctcctcctatacgcgattcaaccaacagagataatctctgggaagctctgcttgatggacacatagacatgttgagctcagaccattcaccatcagctcctgatctcaaactcatggaggaaggtaacttcttaagggcatggggaggcatatcatctttgcagtttgttctccctgtaacatggtcgcatgggaaaaaatacggtatcagtttgaatcaactggcatcatggtggagcgaaaggcctgctatgcttgcagggttaaagaaaaagggtgctgttctgccgggataccgtgctgatattgtggtatggaaacctgaggctcaattccatcttgatgacagccatcctgtctaccataagcatcggaatatttcggcatatttgggaaagcagctttcagggaagatactgtccacctttgtgggtgggaatcttgtgttcgctgaagacaaacatgcaaaggctgcatgtggtgctccaatcctcgccaaataaaattcaggtggatccagtgcttacagttgttgatttgtagtgtatatgatcgtatgcgctacacattttgatttgcggcaaaactgcaaatggcaatgtccctgtgtgtataatttagcccggctcttccattgttatataccactctccattcgattgtgctacattgtacttcatgtggacagcgtatagtgattgtattttttatattattcagatactcctgtaatctagtttacgtggaagtgtaattcagttactttatcagctgtttatgtagatgaactggaataataaacgcgtgatgttagaaatgc

SEQ ID NO: 16761 - DNA, 2090 bp, Oryza sativa
  ref <308>: DATABASE ACCESSION NUMBER: AK067235
  ref <309>: DATABASE ENTRY DATE: 2001-12-06
gggcctggagctggaagccttgtaagtggaacagagacagtcagctccagccactgctcctcggcttcttcttcgtccgcctctggacggcggccatcgagagggtggggctcctccggcagccgttcacgcgccaggagaacaccgtcatccagacctgcgtcgtcgccggctacgacatcgccttcagcggcggctttggtaactacatattgtccatgagtgaaagaatcgctgggctgggaaccgaggcaaataatgctcaaaacataaaaaatccccatctaggatggataattggttttctgttcttggtcagcttcattgggctctttggtcttgtgcccttgagaaaggttatgatcattgactacaagctaacttatccaagcggcactgcaactgccttcctcataaacggctttcacacgccccatggagccaagattgcagcgaagcaagtaaagaaactcggtatattcttcatcctcagcttcttctggggtttctttcagtggttctacacagctaccgatgattgcggattccataaattcccatcactaggccttcaagctttccaacacaagttcttctttgacttctcacctacttatgtcggagtgggaatgatttgcccacacattgttaacgtatctgttctccttggagggatcctctcatggggcatcatgtggcctctcatagccaagaaaaggggagattggttttctgctgatctccctgacggtagtcttcatggaatgcaagggtaccgggtcttcatagccattgccttgattcttggggatggcctctacaactttctcaagatgattattctcacagccttctcgctaagatctcaaatcaagaagaaaaatgctagtacacttccagtctctgatgatggcatggttaccactactgcagctgtctcatacgacgaggagcggcgcaacgaactctttgtcaaagatcaaattccatggtacgttgcatatggaggctatgctgttgttgctgccatttctatcggtactgtcccgcagataatcccacagctgaagtggtaccaaatcttggtagcctatatcgtcgcgccaattcttgccttctgcaatgcctacggaactggcctcactgactggtctcttgttacaacctatggaaagcttgcaatctttgcatttggtgcatggaccggtgcttcacatggtggtgttcttgctggcctggctgcctgtggtgtgatgatgaacattgtgtctactgctgctgacctgatgcaggacttcaaaacagggtacctcacactggcctcacccaggtcaatgttcgtcaaccaagtcattggcactgcaatgggctgtgtcattgctccctgtgtgttctggcttttctacaaggcctttgataatattggcatcagtggcagcgattacccagcgccaaatgctgccgtcttccggagcatagcgatactaggtgttgatggcttctcctcgcttccaaagaactgcctcaatctctgttacgcgttctttgctgctgcaattgtcgtcaacctgataagagatcttgtgccaaaggtgtcaaggtttataccgatcccgatggctatggcgatacctttctacataggatcatatttcgcgattgatatgttcatcgggacagtcatattgtttgtctggcaacgagtggacagggcgaaagcagacacgtatggacctgcagtcgcttcaggcatgatatgtggtgatggaatttgggttttgcctcagtcggtgcttgctcttgccaaggtgaagcctccaatctgcatgaagtttctgtcgagaaggacgaatgacaaagtggatgcttttcttacaacattgggaaaataagttgcaacaacgattctgatgaagaaaagattcagttgaacattattacattagcccgtgtatatattggataattttctttttttttccagcagatccatgtcagtaagaatccaatgaagtgtggcatactatacgatagtagataaataagtgtgtacagagacaagaatgggaataaattatcttgtttacgtt

SEQ ID NO: 16762 - DNA, 2168 bp, Oryza sativa
  ref <308>: DATABASE ACCESSION NUMBER: AK067236
  ref <309>: DATABASE ENTRY DATE: 2001-12-06
gctctctctcccgtgtctctcgccgcggcgtcctccggccaccaccccgcgccgcgccgccgtctacggatccccgctcctcgctcgagcgagcacgaaagccctagcgcgccgccccctgcaccgggtgggttccccaggttgttgagctagaatgggagtggcagggcacaatgatcctttgataggtgaaacgacatgtggatctttgctgcagcaacttcagttgatatgggatgaggttggtgaaagcgatgaagaccgtgacaagatgttacttcagctagaacaagaatgcttggatgtttacaggagaaaggttgatcaggcatctaattccagggcacgcctccttcaacagcttgctaacgccaagtctgagctttctagactcctttgtgcactaggcgagctgtctatttctggcattcctgacaagacaaccggtactatcaaggagcaactagaagcaatatcacctttcttggagaaactctgcagggaaaaagataagagggttagagagtttgctggtgtacaacttcaaattcaaactatacgtggtgaaatcgctgggagtctgcaagttggtgaccacatggaaacaccccgtgttaatgaggatgatctttcaacgaagaaattaaatgaatttctttctgaattgcaagctctacaaaaggaaaagagcaatagactgcacaagattcttgacttcgtgagttcagtgcatgatctctgttctgtccttgggatggatttcctgagcactgttactgaagttcatcctagtctcaatgactcggttggtgccgagttcaagagcattagtgacgcaacattatccaagctgtctaagatggtaattcaacttaaagaagagaaatcaaagagacttgaaaggattcaagctctagcttcccagctaactgatctttggaacctaatggacacctctgctgatgagcgacaactttttgaccatgtcacatgcaacatttcctcaacattggatgaagtaacagcaccaggagctcttgatattgatttgatcgaacaggctgaacttgaagttgaaaggctggatcagctcaaagctagtaggatgaaggatattgcgttcaaaaggcagactgaacttgaagatatatatgcccaggctcacattacgatagataccagtgctgcaagagatagaatactgactgttattgattctagtatcttcgagccttcggaactactggctgatatggagaaccagatacttaaagcaaaagaagaggcactaagcagaaaggacattctggagaaggttgaaaggtggatgtcagcatgcgaagaagagagctggcttgaagactatagccaggacgacaacagatacagtgcaaccagaggtgcacatctgaacctcaagcgggcagaaaaggctcgtcttttggtcagtaaaattccagtcattgttgatacactgatggcaaagacccgggcatgggaacaagagcatggtatgccgttcagctatgacggtgttcatcttctcgcaatgctggatgagtacaaagtactaaggcagcagaaggaagaagagaagcgacgaatgagggaccagaagaagataaacgaccagctagctgcagagcaggagaagctcttcggctcgaaaccgagcccagcccggccccaatcctcaaggaaggcgcctggcccgcgggccaacggtggcgcagtcaatggcacaccgaaccggaggctctcggcccaccagaacggcggcggcaggtcggtgagccgggacgggcggagggacagtggccggccggctgctccggtgaactacgtcgccatctgcaaggaagagtccagcaacaacaacccggcggcgtcctccccctgacgatcatcctcgccatgattgaccgtacatttcttggtgccagtggtagagagatactccatatctgtgcagtagcaggaaaaaaagaaaaactatagcaagatactagtaggacaagtgattcgaatgatagtagcagtattttggctgtatttgaatcgatttgttgctgtccatttgctggtagtggatcgaatggatcgagtgggtgcagccgtgcaggtgcatccgccatggaagctgagctcatgtcgtcgtgtcccgttgg

SEQ ID NO: 16763 - DNA, 2930 bp, Oryza sativa
  ref <308>: DATABASE ACCESSION NUMBER: AK067237
  ref <309>: DATABASE ENTRY DATE: 2001-12-06
gggcagctcggcctgtactactgcctggtggtcgcgtgttcatgtgttgtagcaactcaggctcaggctcaccaggcaccgagaactgatcctgtcgaagggactacgtcgagaaatcagaaatgcagtacttcttcaacggccaaaggatttggaggcagcattggcaattgcttctttacaggaagaagtgattctagaatcagcttcaaatctgaagaagagtgacaatgggttgcaggttcggccacatccagctttcaagggtgctttacctctacctttgccaccaaaccgggtgttgaatagtggtagtttaactcgagcagatgaccgcaaggtagttgacaattccaagattggaaacagtactgacaaaatttcagctctgaaggctcagcgcagggctcaaggactctgttatatttgtgccgagaagtggtctccatcacacaaatgtgccagtactgtttagttaaatgctgtccaagaattgtttaccactttgggttttgatgaattttcttatcaggctagtatggaggagtctgataatcagggtctgatggcaatctcagttcaggcagtgcatggatctgaagctgtgggttatatgagaatgttaggattcattcaaggcaaagagttttgattttggtggattctagcagtacagctagcttcattagttgtcagattgcttagaagctttctggagttgtgccattattgaacaaatctcaggtgaaggtagccaatggaacagttctgtcatgtgttgcatcagtaccaaattgtgaatggatgactcaaggaagggttttctgtacagactttaagatcttgaatcttggaagttatgatatgattttaggaatggattggttaatgcagcatagtctaatgagagtggattggatcaagaaaacattgaccattacctggcaacaacaatctgtgactttacagggaattcaatctaaaatgagtcagtgtgcaaggatttctcctcaacagtttcaggaattcaaagatagacaggctatctcacatctgattcagttatgttccattacagattcttcttccaaagagactgtaccttctgaagttcagcaactgttgtctcaatttgcacaagtttttgaggagcctgatggattacccccttcagagtatttgatcactcaattcctctgattcctggggcaatgccagtaaatgtcagaccttatcgatatactccagctcagaaggatgaaatcgagtcacaggttcaggagatgttgaacaaaggcattattcagcctagttccagtcctttctcttctcctgttcttttggttaagaagaaggatggaacttggagattttgtgtggattatcgacatctcaatgctataacggtgaaaaacaagtacccattgccaattattgatgaattgcttgatgaattatcaggagcaaggtggttcactaaattggatttaagggttggctgtcatcaaattcggatgcaggctatggatgaacataaaacagcatttaagactcaccgtgggcattttgagtttagagtaatgccttttggccttacaagtgcaccagcaacttttcaaggctgcatgaatagtatactgtcgcccttattaaggaagtttgtgcttgtttttgtcaatgatatattgatctacaacagaaccttatctgaccacgttcagcatctgcaatctgtgtttcagatcttaacagaacatcacctgaaggttaagagaagtaaatgttcatttgcacaacaaaggttggcctatctaggtcatgttattagtccaaatggggtgtcaacagatgaagataagatattggtggtcaagaattggccaactcccaccaatgtgaaggaattgcgtggatttttgggattaactggttattaccgcaaatttgttcgatactatggtgtgttgagtaaacctttgacaaatctgttgaggaagggacaatcttacatttggactgcaactactgaacaagcttttcagtctcttaaacaagctttaatgacaaccccagtgctggcgatgccagattttaccgaaccatttgtggtggaaaccgatgcttcagataagggaattggtgccattttaatgcagaaacaacatcccattgcatttttgagtcgagccctaggtcctcgtcatcaaggattatcgacatatgaaaaggaaagtttggctattattctggcaattgatcattggcatccttaccttcaacactctgagtttttcattcatactgatcatcggagcttatgttttctggatgaccaacgtttgactactccttggcaacacaaggctttaacaaaactgcttggacttcgttacaagattatttataagaagggcagtgagaatggtgcaaccgatgctctatcacgatttccttctgtttcagagttaacagcgatatcttctatggttccagattggattcaggaaatcattgcaggatatgccaatgattctgatgctttgagtaaacttcaaaccttgtgcattagtgcaaatgttgtgcctgattttactctgaaggaatgtgttctttattttaagggcagaatgtggattggtactaattcttttgttcaacagaaaattttagcaaatcttcactcttcaccagttggggggcattctggcattactataacctatcagcgcgtaaaatccttatttgcttcgccccatttgcgcacaatagtggttcagtttgccaatgcctgttcaatctgtcagcgagctaagtctgaacatgtcaaatatccaggattattacagactttgccagttcctgagcatgcctggcaatttgtatcattgaatttcattgaagggttgcccaaatctgctactttcaattgt

SEQ ID NO: 16764 - DNA, 2946 bp, Oryza sativa
  ref <308>: DATABASE ACCESSION NUMBER: AK067238
  ref <309>: DATABASE ENTRY DATE: 2001-12-06
gggcgaaaatcctccggccacgctccgacgagacgagctcccgcttcccggcgccgccgccgccgctccggccgaattcggtggcgctctcttcatctctccccgccgctccggcgtgctgaaaggtcaatctcgtcgactgctgctgctcgtgcttgacctccgccgtgctcggcttgccccgtgacgacgaaggagagggagacggagacggagacggagacctgagtccaatggcggagtgagagctttggtggtggtggtggtggtgcgccgccgcgatgggctgcgtcgcgtcgaagaacgcggtgtcggtgacgccggcggccgactcgtcgggggcgctgcgggagaggagcctgccgcgggcgccggaggccgcggcgacggtggtgtccgtcaccgcgtcctccctgcgctgctcctcggctgcggcggcgggtaggaggtcggagaagaagagggacgaggcggcggtggcggcggcgggggaggagccgtcggagaaggccgtcatcgcggcggcgaccgcgtcccggagcttccggctgcggagcctccgccggagcctggagggggagcaggtggccgccgggtggccgccgtggctcagcgccgtcgccggggaggccatccaggggtggatccctctcaaggctgactccttcgagaagctggagaaggttgggcaaggcacctatagcagtgtatttagggcacgggaacttgatactggaaagattgtcgccttgaagaaggtgcggtttgacaattttgagccagaaagtgttagattcatggcaagggagatacaaatattgagaaggctcgatcatccaaatgttatgaagctagaaggtttgattacttctcggctatcatgcagtctctatctagtatttgaatacatggagcatgatcttgctggactttcttcctcccctgacatcaagtttagtgaagcacaggtcaagtgctacatgaaccagttactgtcaggactggagcattgccattcacgtcgtattgtacatcgcgacatcaagggtgccaatctccttgtgaataatgaaggggttctaaaaatagctgattttggccttgctaattactttgaccccaacaaaaaccatccgctgaccagccgtgtcgttactctgtggtatcgaccacctgaactgctactaggttcaactcactatgatgcagctgttgatttgtggagtgctgggtgtgtatttgctgaaatgttccgtgggaaacctatcctgcagggaagaactgaggtggagcaactgcataagatttttaagctatgtggttcccctgctgatgagtactggaagaagtcaaagttgcctcatgcgacaatattcaaaccacattgtccttatcaaagtacccttcaagatgtttttaaagaaatgccagcaaatgcattgagattactagaaactcttctatcagtggagccctacaaacgtggtactgcatctgctgctcttacatctgagtttttcaagacaaagccttacgcatgtgatccctcaagcctgccgaagtatgcacccaacaaggagatggatgcaaaattacgagaagattcacacagacgaaaggctagcagaggtcatgggccagaagcatcaaggaaatcaaggctcagcagagctgcaagagaaacaactacagttaataagcaaactgatggcaaagaggagtccaaaactaaagcaaatggaaccaaggacaactcaatattggatcgtacaaaggtaaatggtgatgctaggttattttcagacatacagccagtttcagtggcccaagtcaaagaaaggtctcgccatgttaagaatgattcacgagaagagatccctttctctggaccattgattgtttcatcatctagtggctttgcttgggctaaaaaaccaccagaagatcgttcattcgctagatctcggaccaaatctagttcagggggccaatttactgctgagttagatcaggacaataagatgccagctaaagagaaccagaacctcggcttgaaggaacaacctaacagagacatgcatatagcacgtgccaactccaaagttcgagagcctcatgatgcagcaaagcgtgccgttctgaagaaatggtcacagttaggacgtccagattcctttgattcttacgacacttaccactctcagaatttttctaatgcaatgtatcttggggataccctctcgtcaaaaaacagcatcaagggtgatcatgatcaaggagagagggttgaatattctggccctttgttatctcagtcacacaaggttgatgaactattagagaaacatgagcgccacatccggcaagtagttcggaaatcatggtccagtagaggaaaaaaataatacaagtgaggaaaagactggccatttttgcgttggagaagcggcatctaggtatatagcagtgaaggggatatgtcagtttctggtgtcttctgtcaaccggaaactcgcctttggtggtaacattgttgataagattaagacccaactgaaaacattatatgattctcatatcatagtaaaatcaaaactgtgcctcgctgcttctactagataataacttgtcgcttgttgtagattccccaaagactcctgtgtcacaccatagaatggaatggtgttttttttttttctcctctccaccttgtgcctaggaataacagctgacgagagtggttaattcgagtgatcattgtgttgaaccaatcagttattatttgtgtagctgaaccaataaccaccacagaatggtgcagttcttgtaaagctaacctctgtaaaaagtagaacagaaaacgtattatcccatcgatgtatcccttgctggtgatgaactaatgatccaaccagttaatggaaaagatacaaagaaaacgtattt

SEQ ID NO: 16765 - DNA, 1758 bp, Oryza sativa
  ref <308>: DATABASE ACCESSION NUMBER: AK098994
  ref <309>: DATABASE ENTRY DATE: 2002-08-28
gaattgcttccctcttatctctcgattgatccacgaacagtgacaccgccgcgcacagcgaatccgccatggccgccaagcagagcctctaccccgaggtgaaccagtcccaccccgacctcaacaccgccttcctcgccaaccccaaccgcgccgccactgccagccctggcggctcgctctacccctccgtcgacccgcagcagctcgccgagaacctcttccccgacgccgccgatgacgccgcgccgccgcctcccaccaccgaggaggccctcgtcgcggttccgggcgcgcagctccacctcgtcgaccccgaccgcagcatggacctcggtgccggcacgctctccgtcgtccgcctccgccagggggaccactccgtcgccgtcctcgcgaggctcgtcccggagaagcgcagccagcgccgcggcggcctcttcggcttcttgagcggcggcgggaaggccggcgacggcgccgcgcaggagcccgtccagtggccgctcacccgcgacgtcgccgccgtcaagctcgacaccgcgcactacttcttctcgctccacgtcccgcacacagatcacgaggatgacgacgccgagggggccgaggcggagaaggacgcggacggggaggcggcgctgagctacgggctcacggtcgccagcaaggggcaggaggcggtcttggcccagctggacaaggtactggaggagtacaccaccttctccgtgaagcaagtggagccggcggcgaaggagaagtcggaggtgatggacacgaaggcggtgacggagatcacgccggaggaggccgttggggacaagaaggaggtggtggaggagcaatcagcggcgttctggacgacgatcgcgccgaacgtggacgactacagctcgtcggtggcgaggctgatcgcgcggggctcggggcagctggtgaggggcatcatctggtgcggggacatcacagcggagggcctccggtgtggggaggcggtggtgaagaagagcgtggggccgagtgggaagccgtcacaggtgaagccgagcactatcaggaggatgaagagggctagaagggttacgaagatgtccaacagggtagcaaattcaatcctctctggtgttctaaaggtctctgggtttgttaccagcactgtgctgaactcgaaacctgcccagaaattctttaagttgatgctgggcgaagttattcttgcttcactcgatggatttgggaaagtatgggatgctgtagaggtgtctggaaagaacgtgatgcgaacgtcgtcggttgtgacaacttctgttgtaacacatagatacggagatcaagctggacaggtcacacaggattaccttcacgcctctggaaacgctcttggagtcgcatgggctgtcttcaaaattcggaaagctctcgacccaaagggcaatctgaagaagtcgtctctggcgagcgctgctgcccatgctgtagctaaagaatcgatatctcggcaaagaaggaagtgagacaacacggtcgatggtggaactcgctgttactctctaatacggtgtactagcttcaatagaaatgctcttttgtgaacttggcggctatagcagattttgttggatgtgtcgcttgtaacttgtaaggcgtgtgactgttgccgtgatggttttgatgtttgttttggtttttggatgtttgcgaattgcgatgatgtactgatttgtaacctgtcgaattactatatgtgtatacatg

SEQ ID NO: 16766 - DNA, 4941 bp, Oryza sativa
  ref <308>: DATABASE ACCESSION NUMBER: AK067239
  ref <309>: DATABASE ENTRY DATE: 2001-12-06
tgcggtaaaaaagggacgaaaaaataaaaaacaaatctgtctgattccaaaataaagaaattatatgtgacgcggaaaaaaatcgaatcctatcatattatatgtgacacgatactatatatctctatcttctctatctctatatctacttacttacaaaattgaaagcgtttcctctacttacttacaaaattgaaagcgtttcctctacttacaaaattgaaagcgtttccgttgtccgtaacaagtaataacgaaaaaaaggcgaaaaaacattaaaacaaaaaaaataatccgattcaatttacttccgtcgtccttgaaaattttatcttatcttaatcttaatctaaatctttccgaggggaccgagcggcgccttccgtccccacccgcacgatgaaacgcttgccaaagcaaaaaaaggaaaaaccaaaattgagcaaagggataaactagattgaagttcctaaaattaaaagaggataaacaatattaaaactcccctaactcgaaaagagggaataaaatagattgaaatttcccgacaaaattcccaaaattcgaagaaccctaatttcaggttagaaccctaagagttaaaatccaaatcaattaacctaaaggtttgggttacttaacggacttaaagcccctaagttcaccggagctttctgggaagcggcaccgccgcaccttcacctcctcgcagtcgccttgggttccccgtgcgcgcgctgacctggagcacccctccactgtccttggcgtcggccctcccgccgacgaggtctaggccgagctttgaaaggagacaccacgttcgctgtggggctagaaattcccacattaattggagaaaagaaaaggagagtccaagtagaaatacaattcaaaaatagctgaattcgggattaaaaaaagcaatatggaaagaagagtccatataataacccaatatgagattaatcaaaattaataataaaaataaaataaaattggaaatttgaaaataaaaggagagtccaaataggaatacaatttaaaaataactgaaattagtaattaaaaataaggaatattgagaggagagtccatataagaacccaatacgatattagttaatatttggaataaaataaatattaaatccaaaattagcaaaaaaagaaaataagagttcaagtaggattacaatttaaaattaactgaaattcagaattaaaaataagcaatattgaaacaagaatccatataaaaacccaatacgagattaattaaaattcagaataaaaaaataaaataatatccaaaattagaaaaactaaaagagagttcaagtaggaatacaattttgaaacaacttaaattcaaaaaaataaaaaataaaaatattaaaagaacactatatggtattaattaaaatttggaaaaaataaattctgaaattagaaaaagaaataaatcaattaggaatacaatttataaataacaaaaattgatgataaaaaataaagactattgaaaaaagaccatctaaaacacacgacgagataaattaattaacaggcctataaaagagtaaagtgtggcggttaatacgacatataaaatttttagtaaaacaccaaacagaatcctaatgatgattaaaaggagggacgacaggcaggccgtgaagcaaacgggtaaggcggttgccgggacttttagaatgtaaaagaaaaaaaccccattgataatcctattcgatttttaaaatctcaatgacaataaaaaggagaagtagcgtgcggggtgtataggaggagtacagttgcatagccgccgacggttggcgagacttctagaaaataaaaaaatgaattccaacaatagttatattcaatttttaaacacgaaccgccgcaggaggctcatcatcgaaactcttcaaggtttatcgtttatttcggcgacaatctctcctacttatctatctatctatatatctattatattattaaaacaaccttgaaaggaggcaccacgttcgctgcgggggttagaaattcccacattaatctaagaaaaagaaaaggagagtccaagtagaaatataatttaaaaatagctgaaattcggaattaaaaataagcactattgaaagaagagtccatataagaacccaatacgagattaattaaaattcagaataaaaataaaataaaatgtgaaaatagcaaagaaaaggaaaagaagagttcgagtagaaatataattttaaaataactaaaattcggaattaaaattaaacaatattgaaagaagagtccatataaaaacccaatacgagattattaaaattcggaataaaaaataaaaaaaattgaaatttgaaaaaaagaaaaggaatgaagagttcaggtaggaatacaatttaaaatcaactaaaagtcggaattaaatataagcaatattgaaataagagtacatataagaacccaatagtagattaattaaaattcggaataaaaaataaaataaattctgaaattggacaaattaaaaagagagttcaagtagtaatacaattttaaaacaactgatattgaaaataaaaaaatgaaaatattaaaagaacacaatacaatattatttgaaattcaaaaaaaatctgaaattagaacaagaaaaataagatttcaacttggaatacaatttataaataactaaaattagtgataaaaataaaaactattaaaagaaaagaccatctcaaacacattacgagattaattaagttacggacctataaaggagaaaagtggtggcagttgatgggacatgtaaaagctattaataaaacatcaaatagaatcctaatgatgattaaaaggaaggacgatgggcaagtcgtgaagcaatcagttaaggcgtttggcaggacttctagaaagtaaaaaagataaaccccaatgataattatatttgatttttaaaatttcaatgacaataaaaatgagaggcaacaggtgggtcgtacaagagtacaatggcaaagccaccgatggttggtgagatttctagaaagtaaaaaaaataaattccaattatagttatcttcgatttttataatcctaatgacaataaaaattaggtggcggacaggttgtaagggagaatagtggcagggtttgacgggatttctaaaaattataaaaaaataaaacccaatgagacaataaactcaaaaaatataaggtccaatttttaaaggttcgggcttctaaaaagtaaaataaataaaccccaatgataattatgtttgatcttaaaatctcaatgacaataaagaaaggcggtagctggcaagccgtagaggagtactgcaacaacgtcgccgacgttttgctggaacttatagaaagtaaaaataaatgaatcaaaacgataattatgttcgatttttaaaataacaatgacaataaaaagaagatgcagtggatggccgtagaggagtataatggcggcagcgttttacgggacttctagaaattataaaaataaaacccaacaggacaataaactctaaaaactataagatccaatttttaaaggttccaaagagattgaatagaaacagtggtagaccgagcaagcaaataaagaaggatataacagaagtaaggggtagcaactgatgtggcttttaaaaactataaaattagaaacacgatgatgataaggtttggtctttcaaagtcttaagacaacgagataactatttaataaactttgagtaaaggtattaaaaatataaattttatatgggtgctagccgcgcaattgcgcgggccactcagctagttatattattaaaacagctttgaaaggagtcaccacgttcgctgtgggggctagaaattcccacgttaatcagagaaaaaagaaaaatctagactgttagattatactgggactagactttgatggtgtagattaactttgataatagaagtctgaatagaaaacaactgctagatcaaacggacaacactgatcaagttctagaatacaagtccaaataggtggacgtactcctactttgattctttccttatcctagatggatactaaggatcaatcaacagatcaggtgattaggattcaaacacagtgcgtgcatatatattttggagccggtataattagaattaaaatgtgatatttttttttacctatggatgaaaaaaagagtaaatagaccagaaaacttatgcatcggtagagatacatctctccgtccaactcgctaaggcgtgttcaaatttagtacggtcttaaaaactaaactttaactttaaatttttcattgtagcaacaaaatcataatcatataaaattaaatttaaatgaatatccaatgatattatttttaacaactaaaatttaatttataataaaatacagctttgaaagaaggcaccacgttcgctgtgggggctagaaattcccacattaatcggagaaaaaaaaagaaaaggagagtccaagtagaaatacaatctaaaaatagctgaaattcgaaattaaaaataagcaatattgaaagaagtttccatataagaacccaatacgagattaatcaaaattcgaaataaaaataaaataaaatccaaaattagaaagaaaaaaagagacccaagtagaaatacaattttaaaatagctgaaattcggaattaaaaataagcaatattgaaagaagtttccatataagaacctaatactagattaatcaaaatttaaaataaaaataaaataaaataaaaattagaaaagaaaaggatagtccaattaggaatacaattataaaatagctgaaaatcggaattaaaataaggaatattaaaagaagagtccatataagaacccaattacgagattaattaaaattggg

SEQ ID NO: 16767 - DNA, 1451 bp, Oryza sativa
  ref <308>: DATABASE ACCESSION NUMBER: AK067240
  ref <309>: DATABASE ENTRY DATE: 2001-12-06
gtggaggggaggagaagcgaagcgaggaaggtcaagccggggagggcacgcacgcacagatccctcccctctcctcgctgcccatctctctctctctcttcccctcgacgcggcgagatcaggaggaggaggaggagaggggggaagggaggaagggaggctgagatcccgaggccccccaccggagacggcgaatcctggtccggcgcctggtttgcccccggattcgggaggagtttccgttcggggtcgagggatttcgggggcgcgcgcagccatgaacgagaaggcctccgtctccaaggagctcaacgccaagcacaagaagatattggaaggcctcctgcggctgcctgagaatagagaatgtgcagactgcaagtcaaagggtcctcgatgggcaagtgtaaatcttgggatctttatatgcatgcagtgttctggaattcatagaagcctcggggtacatatatctaaggtaagatcggctaccctggatacatggctgccagagcaagttgcatttattcaatcaatggggaatgaaaagtcaaatagctactgggaagcggagctgccccctaactatgatagggttgggatagagaacttcatccgtgcaaaatacgaggacaagagatggataccgaggaatgggtcatcaagaccatcatctggtgctagagatgagaagagctcagagtcacaaactagtgttaacaggggtggccataatcaaagatcttcatttgagcaacaccgcacttcaccagctgcagtgagcaaaattgctccagtggtttctaggacgcccacccaggcaccacatcagccaaaagcacaaccatcagttcccaaggtttcacctcctcaacccgagaaatcacctcctaatgcaacaccaccaaaggttgagaggccatcagttgcaccacctcctaaggttgactatgcaactgatctcttcaacatgttatcaatggatggaacaaccgagaaagaagcagagtcatcttctaatgatgatagtgcatgggagggcttccagtctgcagagccagtacctagctcagacaaaaaggattctgctaagccagtagaaagtaagccccagtctacatcaggcatagaggacttgtttaaagattcaccagctgtgacagtatcctcagctccagctgccccacaagtaaatgtgaagaatgatatcatgagtctgtttgagaagtccagtatggtttcgccatatgctgtccagcagcagcaacttgcttttatgaccccccagcagcttgcacttctgtctcagcagcaagctttactaatggctgctcttaaagctggaaatgcaccccaaatgattccagggaacgccagtctgctaaatggtaatggttctaatcctgccaatggaggcttgccttcacaaagctggacaaatcttgcttatc

SEQ ID NO: 16768 - DNA, 2592 bp, Oryza sativa
  ref <308>: DATABASE ACCESSION NUMBER: AK067241
  ref <309>: DATABASE ENTRY DATE: 2001-12-06
gagcgctcccacgccatggtgaaggtgaagccgacgccgacgccgacgccgacgtcggccgccgcgaaatctgccgttgcgggaggaggagaggtgtccacggagactccgcgcaggagccgcgcgactgcagcaagcagccaagaagaagcggtcccgcgatgcttcgctccctcccgctcccgctcccgctcgacatcggcaggccgggaaggttctctgcgcgccggagtaagcttcttgttgcctcgtttccctcctcctctgcccccctacaattttccgcctctgctcttgctcttgcaagatcgattcaattttcatcttatgccgagcggctaggctagggtttactttccccgcccccactacttccaaatttatttcatgagtaaattttacaaaattacatctactttgactaaattatcacaaaactacagatttattaagaccaagtatcacaaaactacagttttagtactagagttatcacaaaactacaaattttacagtgcctgccactactattattttaagagttataaatgttgttaaatatgtagtttggtgatcttctatcttaaatccgtagttctttgataaatttggttctaaatatgtagtgttatgatacaccgccttaaatttgtagttttgtgatagtttggtgaaagtaattgtagttttctgaatttactcttatttcattatccaccccacaaaacgaggtcggaaattttacgccattactccactagatagaataggcctcacaacctccactgcccttcaaaaaacgttgtgagttttatatgggtaaacaggaaatttaaaacatacggcctgtctgcatcttcatgtacaattttttgttattctctttgggttttgaaccaaaccagcttgtacaaaaacttggggtgtttcatcaatggcaaaagggaacatgtaaacgttatagagaatttctcatcactgtatcactcataccacagtatgttctacctgactcccactaggggtatataatggtgataatgccttccggttgctaccttcattcttcctactaagatagggtttactactttctaagaaaaagaacgatcttcataggctgagtttgcaaataatgcacacccaactaggatgttgcctatatttctagcattagctgccttccgttgaaataagatgggcgtagctcagaaatgaatgctattgtgcaggatatctgttaaaaaaacagtggaaggtactataaacgatgctgaaatagagtccattgttttaaaactatggaatttcacagaagaagagagggttccatactataaccggttgaacaagaaaagagctaacatggccttggcttggtacaatgaaaacaacccggaagattgctatgaatttacgagtgtgctcttgcatgatgtatgcaatttttgtgatggaggtgtttgccatgtgcacatcaattttaaggcaaggaatgtgacaacaaattcagaggagctcttcttcgctgaattggctttaatcaacaatgttttcgatcaatatagtggatatacgaccactgcctgctgtattattgatggcaactgtcttggtatgctcctctcttatatatatttatacacacaaacacatgtgtttctcttctttcatgattggttgagcagaaatcataaaaggcgcattgtttcttttactagtttcccttgtgcgtgtatatgtgaaaaagtaaacctgtgtttgcacatcttttattgttgatttaggcaaattatgatggttccatattcactcagcacatggtgaagttacactcttcaatgaaatgtataatcccataaatgtgtttggaatttttaaggaaactcttcaaatgttatgtgcaaagtgttttcctctgtcacatgaaaatgttactagttgattcactatgttctagaaaattatttatacttaatgttcaaatgtgtgttttggaggctatgtcaatgttctgacaataagtagaagagattggtggggtagttaggttaacatgaaacaatggacaaaagcaggagtagaatagcagattgggtcccaacattcatgcacataggtggtgtcaccgatgtaccagtaaaggtagcatatgtactttactgttttctctctcaggatggcaatatcactggtaacaagtttttgtggagtgctcaatatgaatggttgtgcttgctttctattagttgtcttgttgaatactggtgtataaacattttgtagtttacctttgagatgcttataaagtttgtatcgtaggtggtttgaggaatgtgctgctcaatggatgttttttgcgagaggagcgttatgatgaaaaaaattgctacgcatgtgatgaaaagattaagcaccccacaggaagtacctacaaaggaggtcattatgccgaagactatttagtacagggaatcttatgaatcacagatatttatgttttcatgtaatctattagtacatcattttgatggtttgggagctgtatgaactagtaaagcatcctaccactatacatgctctgaaaattat

SEQ ID NO: 16769 - DNA, 1565 bp, Oryza sativa
  ref <308>: DATABASE ACCESSION NUMBER: AK067242
  ref <309>: DATABASE ENTRY DATE: 2001-12-06
gcttggacttccactgtatcgcacaagtggagatgactctgtgctgtttgatcatgaccttgagagttatgctctctatgacactaagggccatcaagttccccaagagctggtagaaaagatagggaaggtttttgagactatattggaagagactggcaaactgagggaagaaactaaggaagacatttctattgcgaaggccattgcaattgttatggagagaaatccacacttgaggcaagaagggattgctcatgatgttcttcagtggtatttgtgccgcatggaaggttggtttgctactgatgcggacgcaatctctcttcagggttgggaccaggaggtactgcttcctggtggccatggtctcatggttcgtggatatcgtccagtaataaatactctggcaaaaggcctagatatacgccttggccacagggttgttgagattgttcgccacaggaatagggtggaggttactgtaagcagtggtaaaacatttgttgcggatgctgcagtcattgctgtccccttaggtgttcttaaagcaaacaccattaaatttgaacctaggctgccagagtggaaggaggaagcaataagagaactctcagttggagtcgagaacaaaataattctccacttcagcgaggttttctggcctaatgtggagttccttggagtagtttcatccaccacatatggctgcagctatttcctcaacctccacaaggctactggccatcctgttctagtttacatgcctgcgggtcggcttgcatgtgacattgaaaagctgtcagatgaggctgctgcccaatttgccttctctcagctgaagaagatcctgcccaacgctgccgagccgatacattacctagtgtcacattggggctcagacgagaatacacttggatcctacaccttcgatggggtgggcaaacctcgtgacctgtatgagaagctgcggatcccagtcgataacctattctttgctggagaagccaccagtgtccagtacactggcacggtgcatggcgccttctccactggtctgatggcagctgaggagtgccgaatgagggttcttgagcggttcagggagctggacatgctggagatgtgccaccctgcaatgggggagcagaccgccactgtctcagtcccactgctcatctcccggctgtgaacagaccaggagctgcacaaaaattatagtcttctaaggccatttggcacttggcacccggcgagcgcactaagccattcccctgattgctcgaggaaggcagcattggagcaattatcttatttgcttctccttggcatgaggagtgtgctggtgcagcttgcggtgcgctaaataaagtcactgtgaaaatggagtgtgggagtctggtgtgtattgttgagtataaaatgagggagtcaatatgtagttaagcagggattacggacaatgtgagccatcattactgaacaagatggtgtatgtgtgacgaacaattaatttaaacgatcgatattgaaaatgaatgagtgctttgcccccaagtttgacc

SEQ ID NO: 16770 - DNA, 3592 bp, Oryza sativa
  ref <308>: DATABASE ACCESSION NUMBER: AK067243
  ref <309>: DATABASE ENTRY DATE: 2001-12-06
gccccttctccccacaccccactaaaaccccaggcctcgccagccgccgccggccgccgccactccccgccatcgccatggctcacctccgcctcctcctctcccactccagccgccaccacccccagccgcaccgtctcatctcgctcctccgcttctcctctaacaccggctccggctccggctccggcccaacgccgccgcccatcaagcccgtgtcctacgccccgaagccgcagccagcgcccgaggaggctcccgccgccgcggaggaggctgccccgagcgatgaccccgggtctcggcccccgccgccgccaaggagatcgcaggggccgccacagcggcagcagtgtacgcgggaggagatgcggttcgtgaaggacgcggggccctcgatcacgccggtgtcgtacccggccagggtcgcgccgctgccggaggaccgtccgacggaggaggcacccccggaggggccggcggacgaggggctgcggggagagggggagcggatcgagatggacgccacgcgggccaggaggagcttcttcgggatgcaggcggaggaggagcaggcgccatacccgacgctcatacccgtcgagaagcggccgcagaaggtcgccattgatctcgtcgacgccatccgcgaaatcaagaccagtgcaaatgaaaagaagcggaattttaccgaaacagttgaagctcatgtaatgttaggtgttgatccacgtcgtggtgaccaggtttgctgcgctatatgtataaactagataattttgtagtgctaagtttttattgcttacttctctaacatggaagtgtagcattgtcattagtcattacattgcatttctgactgccggcttcattgcttgctttactttcaagacaggttttcatagctggtttagtttccatgtccttatactcaatccagccagcctttatttcagctagtgggtttgtacactgtgtttagaaagcattatgtgctaggcaggtatcagtaggacatagagaccctagaggcccctgcacagctgacagtgcaaaatccatgtttaaacagaaatgtattagaataccagaatgacaaatagacatgctattttcagaagaagcaaacatcaagaattcatgttcctgtacatccatttttcaaagaagcaatgtaaagtttgtagaattgtagctgcaccttgcataagtatatgaaatatgcttaggtcccctttgtttccgcttaggtttttaagctgacttttcattttcagcttttatggttaataagccagtagtttttatgtcgcaatgtcaagggtgtagtccaaacactaatccacataaaccaaaacaagctactcaaacctggcttttgacttaataaggatgcttatgatttatgacttaaaaagccaaagctgtccatttgtttgggctctggcttataagcccaaacaaagagggccttagactggctagtgacattttttttagaacttgcaggagatctgtgtatcatttcattaagatagataagaaaaggtgtacggtgttagagaaagactccgacacccgcccaccagggatacaagagaatagcacacacccaaaggaaaaagaaaacccaaactagtgcattagtagcccagtcctagtaaagagatcacggagcctagcagctcctgctaggcgccaaagagcgctctcattagcgatggctcggaggacatcggccaagcatggggtagcgccattaaacacacattgttcatgtgcttccaaatttcccaagcgaccaagatgattaaagagtttagccctttcttctcattagtaggtaaaccccttaccgttcttgaccaccaattggcaaacctagcagtaacctgggttggaaagctagagtagccaagccgttgcaggaccaaacaccatacttgtcgagaaaacacacaagtgactaggatgtgattaatagtttcctgagcttgatcacataatggacatgtaggtgggtgttgaagtcctcgcttgtctaaccggtctgctgtccaacaacgattattaattgccaaccatatatacaatttgcatttcaaaggcgcccaactcttccaaattcttctccaaggtgcaattgaagtggcaagatgacgcctagtgcctagtcagcctctttgttcgctttttagaactatgtgtgtatcaactcttcttgtgtcctaaccactagtgatgagttatgacagcaaaaatgtcctaagaggatatgctgattgagataacctactacttacagtaatgggaatgatttgtgtctgtctatgcgtttattcttgctgtgaggccagtgttcctcgaaaggtgaaatcatgatgcatacaacacaagttaacagagatactgctgaaatgatattatggtgttctgttacttctgttgtaccccatctagttgtgattgttagattagtggaaagttactggcaatgcacaagaaatggtgaacatagattttatgatgcatgatccaataaccaagtcaatcaatcaatcttatgatctcttttatctggttgtgattgttggattggtgcaaagttatactgaccatatttctccctgggttacagatggtgcgtggcgcgttaactttgccacatggcactggcaagactgttagggtagcggtatttgcagaaggtcctgcagcagatgaagctagagctgctggagctgatgtcgttggtggtgacgagctgattgaggagatccgcacaggaggcggtaaactgagttttgacaagtgcattgctacccctatgtacatgcctcgtctttcgaaggttgctagaatattgggtccacgcggactgatgccaaatcctaagctagggtctgtgacaaacgatgtttctggtgctgtcaaagcagcaaaatcaggccgggttgatttcaaaatagataaaacagctatagtgcatgttggtcttgggaagataaatttttctgatgagaatttgcgtgaaaatattggtgcttttgtacatgcacttctacttgccaagccagtgggattaaagaaaacttcaaagtatgttggatacgtgaagaagttcacactgagtagcacaatgggtcctggatttcctgtaaccataccatcgctatccgcggcagctgatcattataacaatagcaaggtgcaagccagctaacgaaatataatcaagttaaacgaacctttttgcactagtgaacacagccggcttgcaagttgtggatggtttggtgatgaagcatagaggccgaccgcagttagatgaatggctgtttttgacactgggttaatgattgtggacaaaaaccttcaagaaacattcggtaggggattcttagttttttttgctgctcagcaattatgtgactgcgttaaatgggccacctttgtcatccacggtgttctgcaatttgttgtaagaaatgtaattctgagtttattcttaaacaagattgtagttctagcattttggagataataatggtcgagataccgcataatgtgatccgacagaatatggcactcg

SEQ ID NO: 16771 - DNA, 984 bp, Oryza sativa
  ref <308>: DATABASE ACCESSION NUMBER: AK067244
  ref <309>: DATABASE ENTRY DATE: 2001-12-06
gtcctccacaactactctctcctcctcctcctcctctactacacgcttcatcaacaacacagaagcaagaactagagaaaaaatacgaacgattctcttctccaaccaacgctgtgttaatccggatgggctccaccgatcggaaggtggtggggatcggcgtggcggaggaagggaggaggagctgcgtcgaatgccgcgccaccaccacgcccatgtggcgcagcggcccgaccggccccaggtctctatgcaacgcttgcggaatccggtaccggaagaagaggaggcaggatcttgggctggacctgaccagccacagaagcaggagcatggtgaggtaatacctgaagtaaaagacagtaacagcaacagcaacaactgcaacagtgggagtggaaatagcagcagcaacttgcaggttgttccgaaaaggaggcttctgatgggtgtggaggaggctgcattgttgctaatgacattgtcgtccccatctgcatccacattgctacatggctgacaatatcctgctcacccccaatcgccaaatgtacatagtacatactacatacaaagcacacaccaccaatggttccagatcatacaggtttcttggtttatcaggatgagataggggaggggccctatctgaagaagatgatgatgatgggataatgtgagggatggatttgtggcgatctgatgactccgtctgctccttctccgtgccgctgtatcgtagataaattgatcatgtcgaccttatctgtttgtgattgtggtaggatccatatgatcagaggtccgttgatctcactcacacccttctttttttgtccttttattttttatttccttcttttttgttcttcgaatatgtacatcgatgttgccccctgtgagggaatgatggtcagaaggagacatcgttcctcttcattctgaaataaaagtgaaagtaataaagaatttatttgttcatct

SEQ ID NO: 16772 - DNA, 1559 bp, Oryza sativa
  ref <308>: DATABASE ACCESSION NUMBER: AK067245
  ref <309>: DATABASE ENTRY DATE: 2001-12-06
ggccttgctctcgcagtcgctctcccaccactccgcgctgctcctcctccgccccctcgcctccgcgctcatgtccatcgccgggaatctccacaccgtgtcgctgttgtcgtcctcggctgccgagctgtcctagctcgccgccgacgtgcggctgctcgtatcgccccggaacggtgggggtgaaggggttgtggcgggggcggatgtgctgatcccgcgactctgccttggtcggcggattcccgcgccacggcgctggacgcgctcgttgactccgtcgggtcgccgctgtcggcggcggcggtgtccgccgtggccgtgatgctcgactcgggcgagatcctaccggtgtttttaatctctctctctctcatgcgggggtgtgtgcgagctcggattttgggcatgttatctgccagagcagagatggatgcgtgcagctatggatttgggatgatatcgatttcagattgttttttttttctgtgcgtcgtgatttgtgagtgaattcgtagtttctcgtgatgcagattacctcggaggaggaggaggcccgtcggcagcgatgcagtggcagtttccggcgtccaaggtaagcgttcatgtccttcaggtcatcgtcgtcgttggcggcggcgagggaggaggattccaaggaggcggcggtgttcgaccgcttctccctcttcgggttccgcccaccgccgcgcctgtctcgcccggtgacgccttcgacggcgccgccgccgcctccaccatgaagcagcggcagtttggattcgacggccggcagcagtacgcagccgccgagcagcacggccaccgtgagcagggcgtggactcctacggcgtcgcggcgccgcaccatttcccatcgccgtcgccgcgccacgccgtgcagttcagccaggcgaacccgagcaccctccgcggcagcgtcgacgagcggttcccagtgttcgtgctgctcgccgtctcggcggtgccggaagcagatggtggccgtcggcgcgtgcggcttcctgcagggtctcctcgccgtggaggtcgacggcgccaagaagctcaccgattgcctcgtcagaccgggatgatacgtgccatcatccagtgcatgccacgtaagcaaaaccacggtaaaacgagactttagaccgggatgatgtattaaaccaagtttaaggatctcgatgtgcgttttgcaagttcatggacctaaatgaaacctcgttacaagtttaaggaccgctagtgtaatttactctttattatatttttcttacaaggtgtatatataaatattataatgtgtgaagtgagtatagctaaattggttaggtttcttgtggtggaaccaactcacctgaaatcaagttcaagacttagcacagttgctcgtatttacggctattttcttttagtgtaggtatgtgtgtattcatagggatgagtgtgcgcgcgtttgtgaacgcccgcttttgtaccgtgtttctcgaaaaaggagaaacattatagtgtaattattgaaatttacagcataattatattataagttt

SEQ ID NO: 16773 - DNA, 1773 bp, Oryza sativa
  ref <308>: DATABASE ACCESSION NUMBER: AK067246
  ref <309>: DATABASE ENTRY DATE: 2001-12-06
ccaaaaactccaatcggtggtcgccggccggagcctgcaccaccgccacgcacggcggctataaatacgaggcccccgcgggcgcgagcacgcaggggcgcagaggtggacgacgtcctcctccactggaggatcctcacccactgcgcccacccacagaatcgccccgtcttccacgcccgcttccaaaagtccattcctctcccggattccgatttcgatccatgccagaggctcatggaagacctcagcttggagagaagaagaagaaacgacacaggagacaacaccggctccatgtccatctcctctaggtaccccaaaactaagcttattcatgagattatcttctcttccctggacaagcccaagcttcttagcaggctcactctactcttgtctgaggttggactgaatattcgtgaagcccatgtttactccacaactgatggcttctgtttggacgtttttgttgttgatggctgggacacagaggagacagatgatttgatcatcaagattaaggaggcattgtcgcacaaaaatgcatcaccatctaattcaacaaattcttcagcctcgacaaatcagcagaaaatagctgagctacaacagcaggttggagattctgaaattgactggaacttgctaacaacaggggaaaagattgctactggatcttctgctgacttgtatcgaggaacttacaatggtcttgatgttgctgtaaagattctcagagattctcatttcaacaatccgtcagaagttgagttcttacaggaaatacttattctaaggagtgttaatcatgaaaatgttcttcaattttatggggcatgcacaaggcctcaaaagtattgcattgtaacagaatacatgcctggagggaatttatatgactttcttcacaagcaaaataatgttttggacctccttacgattttaaggattgctatcagtatttcaaaggggatgaattatctgcatcagaataacatcattcatagagatctgaagactgcaaacctgctcatgggctatcatcaagttgtgaagatcgcagactttggtgtggctcgacaaggaaatcaagagggacaaatgactgctgaaactggaacctatagatggatggcacccgagatgtgttcagctttgctattgttctgtgggagctggtaactttgaaggtttggccctggtcccatacgataacatgacgcccttgcaggctgcactaggagtaaggcagggatttcgcttggagattccctcaagtgtgaacccgagattgtcaaaactgattcagcggtgttgggacgaagatcctgatgtccggcctgtttttgcagagattgtcatcgaacttgaagacatcttacagcatgcccaggcaaacagcaggggagccagtcggcgttctagagctaagatacagaagaaatcacctcgatagagtatcataccaaaggttatcttgctcttttgttttcattctttttggtaaaacaggctaacttgtagctgctttcttagcaactccacagaatgtgtaatttctttaggtctccttcaaatgaaggtatatatgcgtatatatatgtacttgccgatttgacggcagtaacagaatgactgcgaattcactgttggtgtcatctgtggactgattagaagatgaccattgtttgcttcccatcctcgatggcaaagccgaccttagaacacttgtacagctgtagttgttgcacctaagtactagtacttcgt

SEQ ID NO: 16774 - DNA, 1796 bp, Oryza sativa
  ref <308>: DATABASE ACCESSION NUMBER: AK067247
  ref <309>: DATABASE ENTRY DATE: 2001-12-06
gatttggtagcacgcaagccactttctccgagatcgccgcgatgacgacgacgacgacgacgagcgccatcggctccctcctcgtgctcctgcttgtggtggtggtgggaggggtgtgctccgcctccgtgggcggcggcggcggcggaggggaggcgtggcgggcggagcaggagcgggaccgggtggcgcgggtgcccgggcaggacttcgacgtcgggttcgcgcagtacgccgggtacgtcgccgtcagcgaggagcgcggcgcctcgctcttctactggttcttcgaggccgccgacgacccggcgtccaagcccctcgtgctctggctcaacggagggccaggttgctcatcaattgcatatggcgttgcggaagaagtgggaccttttcatgttaatgcagatggacagggtgtacatctgaatccctattcgtggaaccaagtggcaaatatcttgttccttgattcaccagttggtgttggttattcgtactcaaacgcctctgatgatatattaaataatggggatgccaggactgccaatgattctttgacgttcttaacaaagtggattgaacgatttcctcagtataaggggcgtgagttctacgtgacaggagagagttatgctggccactatgttcctcaattagcacaagctataaagaggcaccatgaagccactggagacaaatcgatcaatctaaagggctatatggcaggaaatgctctgttcgatgatttccacgatcaccttggcatatttcaattcatgtggaccaatggcttgatttctgatcaaacatacaggctactgaatgttttctgtgactacgagtcctttgtgcatacatcttcacagtgtaataagattcttgacattgctagtgacgaagctgggaatatcgattcgtatagcatcttcacacctacttgccatgcatcttttgcctcctcaaggaacaaagtcatgaaaaggttacattctgttgggaaaatgggagagcggtatgatccatgcactgaaaagcattcaactgtatacttcaatctggctgaggtgcaaaaggcacttcatgttagtccgatcatcaacaaatctaaatgggaaacctgcagtgatgttgttaacactaactggaaggactgcgaaagatctgtgctgcatatctatcatgaacttatacagtatggtcttcgtatatgggtgttcagtggagatacagatgcagtgcttccagtaacatcaactagatacagcatcaatgccctcaaacttccaacggtaaccccttggaatgcttggtatgacgatgatggtgaggttggtggctggactcaagggtacaagggactcaacttcgtgactgtgaggggcgcaggtcatgaggttcctctgcataggcccaaacaggctctaattctcatcaaatcattcttggctgggagcccaatgcccagtgttcaagatttttacagtgatgtgtaacatattttggctacaattatatattaccaagatcacaaaaggtaactcagacggggttgctagtatcacatggaactcgtaccatatattggtaacaattcttccctaaataaaatagggaacaaaatcatgaaatagttttcgtgccacgaatcgacactgtctgttgatattgatatgaacctaagacaaaagtattaatcaagggtgaacgttcacattgttgtcgtacaggatgtgtataacattgttgtgtataacaaaactattaatcaagggtgaatgttcacattgttgtcc

SEQ ID NO: 16775 - DNA, 1646 bp, Oryza sativa
  ref <308>: DATABASE ACCESSION NUMBER: AK067248
  ref <309>: DATABASE ENTRY DATE: 2001-12-06
gagtagtggcgctacctctttcttctctctatctctcaacgagcgcggcgcgagcaagaggagcgcgcaccccggcgacatcagagctcgtcgacgccggggactctgcgcggcggctagggagttcgcccgccggagcaagggctgggcgggacaaagagaagaaatctgcagcgaacccatggcgattctgcccctctcgatttcccactctcttacctccgccttgtccgccacctcctccggcatcggcaggccagttgcccgcctcctccacccgcgggtcccctcccgtcccaccgtcatctgcctcgccgcgccgcccaaggtacccgtccccatcgcctcaccggcttcactaggggacgacccttccaaatgggacccggccgagtgcgacgcccttctccgcggcggcgagcaggtcgcctccgtgctccaggagatgctcaagctgatggaagacatggagatggatggctcgtttgaatcattggctgtggagttgatcgctcaaggagtcattgggaaaagagttgatgagatggaatctggctttctaatggcacttgattacatgatacagcttgctgagaaggatagtgacaatgagcgtaaatctctccttgaggtagtcaagcagacagtgctggatcatctcacaaaaaaatgccctccacatgttcaagtggttggacttctttgccagactgaaaagaaggatagcagacatgaattactgcgtcgtgtagctgctggtggaggtgtgtttaaaaatgataaaggccttaagtgccagattccaggggccaatcttaatgatattgcaaaccaggcagatgatctcttggagtcaatggaatcaaggcccacaattcctgatcgaaaacttctcgctagactagttatcgtaagagaggaggctcgaaatatgatgggaggtggcctgttagatgaaagaaatgaccgtggtttcacaacgcttcctgaggcagaggtgaacttcttgagcaagctggttgctctcaaacctgggaaagcattggagaggatgatcaaggatgttatgcagggcaaggcagaaggtgctgataacattgaaaatgcaaatgctggaccagattctaagcttaatcatctaactgggatatctggaaggggaagtgtgacaggcctcaagccacggccagtccgtccaggaatgttccttgagacggtttctaaggttctaggtggtatatatgcaaacaacacatctggcattacagcacaacatctagaatgggtacatcaaacaacactgaagattcttcaggaaatggccttctaatgctgttttctggacgacattcactgccctgttcaagtatatgaactccctagattcttggcccttttaagcttatgatattacagcctagtgggcaaaaggatcatggtatggaccttagtcttgctgcaaaaacttattgatttttttttaccagtgaatggcaaatcttggaggaacttgagtggccattactaatatagttaaaaatagaagcagaagaaatgatgtctgggcatgcaaaggccaatggtgatctctgggtggaatgtaatatttataccacatttagtgcagaagtaaagtaagagcttcg

SEQ ID NO: 16776 - DNA, 2168 bp, Oryza sativa
  ref <308>: DATABASE ACCESSION NUMBER: AK067249
  ref <309>: DATABASE ENTRY DATE: 2001-12-06
gctcatcgacctccaccccacattgaataattatttttaataattttagttttttttttttggctttagatatattcccaatccccaacctcccaataatccgatctctcccagttctgttcggatcaaggctgtgtcgatcgcaaaaaagaaaaaaaaaacaatttccttttggggtggttcatctgttgatcacttctttgtttcccgcgttttgttggggattcgattttcgggttaagattttctacacgatggccttgaacttggctcaaagcgccgcggcggcagcgtgcttcgcgaccgccggtgatgcgcggcgagctgcttcggtggtcgccatgccgtcgtcgtcgtcgtcggccacgacgagcctgaggatgaagaggcaggcggcgtgcgagccggtggcgtgccgggcggtggccaggcacgtggcggcggcggcggcgagcagcaggaggaacggcgtgccggtgttcgtgatgatgccgctggacacggtgagcaagtgcgggagcgcgctgaaccggaggaaggcggtggcggcgagcctggcggcgctgaagagcgccggcgtggaggggatcatggtggacgtgtggtggggcatcgtggagagcgagggccccggccggtacaacttcgacggctacgtggagctcatggagatggcccgcaagaccggcctcaaggtccaggccgtcatgtccttccaccagtgcggcggcaacgtcggcgactccgtcaacatcccgctcccgaggtgggtggtggaggagatggagaaggacaacgacctcgcctacaccgaccaatggggacgccgcaacttcgagtacatctccctcggctgcgacgccatgcccgtcttcaagggccgcacgcccgtcgagtgctacaccgacttcatgcgcgccttccgcgaccacttcgcctccttcctcggcgacaccatcgtcgaaatccaagtcggcatgggccccgccggcgagcttcggtacccgtcctacccggagagcaacggcacctggaggttccccggcatcggcgccttccaatgcaacgacaggtacatgcgtagcagcctgaaggcggcggcggaggcgaggggcaagccggagtggggccacggcgggccgacggacgccggcggctacaacaactggccggaagacacggtgttcttccgcggcgactgcggcgggtggagcaccgagtacggcgagttcttcctgtcgtggtattcgcagatgctgctggagcacggcgagcgcgtgctgtcgggcgcgacgtccgtgttcggcgacggcgccggcgccaagatctcggtcaaggtggccggcatccactggcactacggcacgcggtcgcacgcgccggagctcacggcggggtactacaacacgcggcaccgcgacggctacctcccgatcgcgcgcatgctggcgcgccacggcgccgtgctcaacttcacctgcgtggagatgcgcgaccacgagcagccgcaggaggcgcagtgcatgcccgaggcgctcgtcaggcaggtggccgccgcggcgcgcgcggcgggcgtcgggctcgccggggagaacgcgctgccgcggtacgacggcacggcgcacgaccaggtggtcgccgccgccgccgaccgcgcggcggaggaccggatggtcgccttcacctacctccggatggggcccgacctcttccacccggacaactggcgccggttcgtcgccttcgtccgccgcatgtccgagtctggctcgccgcgggaggccgccgagagcgccgcgcacggcgtcgcgcaggccaccggctcgctcgtgcacgaggccgcggtcgcgctccggagctagcacggtcagacgctcatatacaccgtcgcctcgaggtcggattccgatgtgggatcattcgatctcccttttttttttcttctttttgccattttgtacagccttttggggagctttggatttgtgctttttgtctcgggaggaaaaccgctctggaggtcgaagagagcgtcattttcctcccgttgaagatcacgaatcatttacgttagagatgatgtaattaagcagggaggggaggggaacacacacacactggcactcaaaagttgttgtcacgcttggggaatatatccatttccagcc

SEQ ID NO: 16777 - DNA, 2586 bp, Oryza sativa
  ref <308>: DATABASE ACCESSION NUMBER: AK067250
  ref <309>: DATABASE ENTRY DATE: 2001-12-06
gtggctcaagcacgcggccatggcgatctcgcgccgcctcctcctctccctcttcctcctccgcgcattctcctcgcttcccgctcaggccgcagcgagaggcgcctcccatccctcaggtaccagcgggaattatgggtcatttttgcgcaacctgcttcaggataatcccatgataacggaggaattggtccgtggatatatgagcaactcggaacttgagattgctgtgcatgccattggaagccgctatcctaatatctccaggatatacagcattggaaagagtgtgaatggtgtcacattgtgggtgattgaaatatcagacaagcctgggcaaaaggaagctgaaccagcattcaagtatgttggtaatgtccatggtgatgaacctgttggaagggaggttcttataaagcttgcaaattggctgtgtgataactatttgaaggatcccttggcaactcttattgtgaaaaacatgcatcttcatatacttccaacgatgaaccctgatggatttgctcttagaagacgtggtaatgcaaacaatgttgacctcaacagagattttcctgaccaagtcagtgatgcattattttcttcttatggaatatttggattccttttgttctttacctacttgagccttttaattatattgttaatgctggcagtttttcaccaacaacgatgaaattaactacagacaacctgaaactagggctattatgaactgggtaaaacaagaacacttcactgcctccgctagtttgcatgggggtgctcttgttgcaaattatccatgggatgggtctagagatcaaagcaaacagtattatggatgtcctgatgataagacattccggtacatggcatcagtttatagtcaatcgcactataacatgtctttgagcaaagaatttaaaggagggattacaaatggagcattctggtatccaatctatggtgggatgcaagactggaactatatacatggaggttgctttgagttaaccctggaaattagtgacgtaaaatggccaaaggcagctgagcttcctgtcatatgggaacagaataggatgagtatgcttaatcttgctgcaagccttgtgaaggtaagacatttccacaggattcatttttttcactggaaaggttaattactgtacttctcgaaatgaaatggtgccagttggttttcggattgagggctcgaggttctcgtaggagggtactggtaatggccaaagttgaaaattttttcatgttggatttctcctgaaacaaagtggttcagtgtagtttttgttggtgccattctggcacatgatcaagttcaaccaggttgtcttggtgtttcatcttttcacactttggtgacctcacaccacgacttgaactctgcactagcaagctggccctttctgttgctgttagacacaacattgttagtaatgtatgccatctctagcttcagtcaacatatttcttggttcaaagatttgaagagattaatgcttgccaagtctatttgatgggagttattgggataggttttctcctagtacttgttaaagttgagaattaagagttaagtcaattaggattacatgcagtcagtgcagttcccatcttttgtctgtaacacagtacagggtaccctatctttttctattttttatttggttttacaaaaggggaatttgagttggaggagcagagaattcttagattgtcagagttatgaccctgctaaggtttataactttatacaggtatatgattgagatgctccattggtatgtgttatcaaggagtaaaagttaaaccaagaggggtgttagtttgtaaccatgtcattgtcagacttatgaaacaagacctttgagtaaccagcactatcctgtactaacgggagatatcatttgaagtttgctcctttgtgtcgttgtctataagaaataactgaaattgctaccttgtccatcatatatggctattgtttcagacgggagttcatggaaggatatttgcggcagatacaggtcatcctataccaggctccctgacgataaagggtatcggttctgagataagggctagcaggacttatggcgattaccatcgaatgcttgcacctggtgagaactatgaagtcatggcatctatggagggcttccgaacaaaagctacacgtattgtggtggaggagaaggctgtgagcttggacttcatcttagatcgagatggagctaatggacaagtggtccgtaatgacttaggttgcccatgtgacgacgactagttgtttcatgtgcagggagctcgcctcgagctgtatctatttgttttgctcattatcatcgcactgtatgttctcttcaagagaaaaacaacatcgaaattcacgattcacagacattcaccgaaacggccaattgctgtataagatttagaaaattttgcgagtcgatacaaatctgtagctgacccaatagtgatgtaatttcttcagtccaatgtaacttcagtttgtactgctacaacattttgagcttaattaatactccctctttcccc

SEQ ID NO: 16778 - DNA, 1274 bp, Oryza sativa
  ref <308>: DATABASE ACCESSION NUMBER: AK067251
  ref <309>: DATABASE ENTRY DATE: 2001-12-06
ggctttagcttcgatagctagcttagctgcttgaattggtgtttgtttcaactctctgaagctctctggaagaacgggcggcggcggcggggtatatcatgacgtggtgcaggtgatggtggggatgatggagacgagcccggacgacggcggtggcggcgaggcgatggcggcggcgcagcagacggaggaggacatggggccaccgtggctgcggccgctgctgtcgacgagcttctttgtggcgtgcgcgtcgcacccggagctgagcaagaacgagtgcaacctcttctgcctcggctgcaccggcgacgccctctgcgcctactgcctccccgcccaccgcgaccaccacgtcgtccagattcggaggtcgtcgtaccacaacgtgatcagggtgtcggaggtggggaagctgatcgacatatcgcacgtgcagacgtacgtgatcaacagcgccaagatcgtgttcctcaacggccgcccgcaggcgaggcccgggaagggcgtcaccaacacctgcgagatctgctgccgcagcctccccgactccttccgcttctgctccctcggctgcaagctgggaggaatgcggtgggacccaagcctgacattcgccatccggccgaagcgcgggcaggactccggcgacggcggctccggctccgactacgactccttcagccccaagaaggcgaggagggcggcggccggctacgatcagctcggccggttcgaccggggcatgatccggtggtccgacgacgagggcagcaagtccaacacggcgccgatcacgccgaccacgccgccgatcagccggtgccggccgtcgaggaggaagggcatcccccaccgtgcacccttctacggttagctcacacactacaccaaccaaaaaaaaaattatcacccatcaccagcatatactagtctgtccttaaaaaaagcaaactctagctacgattctagacatatcgtagctaggattgtaattttttttggacggaaggggtatatcactagctcttcagccaaagtgaccaaacctagctatcaccagttcactgctagtactagctagccacatatatgtacatgatcaagtgtcaggtctgaaatagtgaagtgatatccaatcagctactgttaggtcactagctagatatgatatgttgattagcagctagcctgatacatatagttgtataaaatatacaagtgtacacaataattaatctaggtcatgaagtaagtatatatgtgtacatatg

SEQ ID NO: 16779 - DNA, 1332 bp, Oryza sativa
  ref <308>: DATABASE ACCESSION NUMBER: AK067252
  ref <309>: DATABASE ENTRY DATE: 2001-12-06
gggcctcgcgcccctccacatcacacacacgacgccatcgccatggccaactccagctgcccctccacctctcccgccgcgctacgcctcgcgcgccccaagctcccggactccgccatgatcatgcagctccagctccagctccagcacgcgcccctgttcccccgcccgcccgcggcgcgcgcgcaccaccaccaccaccaccagcgacgcctcctgctcgcggtctccgaccacgtcgccgccaagcccgtcaccgtgccggtggggaggatgcgcatgcgcgcggcgacggcgatggtctcgcaggaggaggccgcggccacggctgtggaggagcaacaggaggaggaggtcgaagaggagcagttgcaagaggaagacggagcagctgtgcaggaggaggagcagggcggcgtcctggagggcagctcgggcggcggcgaggcggaggcggaggcagcgggcatcaccaccaagctctacttcgggaacctgccgtacaactgcgacagcgcgcagctcgccggcattgtgcaggactacgccaccccggagatggtggaggtgttgtacgatcgggcgacagggaggagccgaggcttcgcgttcgtgacgatgagcaccatcgaagactgcgagcaagtgatcaagaacctcgacggcagcctgtacagtgggcgcacgatgagggtgaacttcgcggacaagcccaagccgaagctgccgctgtacccggagactgagcacaagctgttcgtcggcaacctgtcgtggacggtcacctcggagatgctgacggagatgttccagaagtgcggcaacgtggtcggcgcccgggtgctctacgacggcgagaccggccggtcccgtggctacggcttcgtctgctactccaccaaggaggagatggatgaagctctttcctcgctcaatggaacggaactagaaggcagggagatccgggtcaacctcgcccttggaaagaaataatcaaagagtaatagatttacttcacatgcacaggagaaacttgcaatacaatgcaatgctgccttcagatgcgattttcaggcaaccatggatgcagcgattacttgtttgagcgcatcgcaagacggcaagagcaggcacaggaagaatgtattgttctgagttacagcagatgtatctcttttttttaacgaatcagatgtatcttttgtatgcatgggaaatttattagtttctatcagtcgtttatctgatagaagcttgactgaacattgaacagttttagtctgctggggttatcagtcagttccattctcttggagctgcattttttcagtc

SEQ ID NO: 16780 - DNA, 2513 bp, Oryza sativa
  ref <308>: DATABASE ACCESSION NUMBER: AK067253
  ref <309>: DATABASE ENTRY DATE: 2001-12-06
gatagacagtagtgagaacagttcagagaggaagcatgtgacacttccctctgtccctctctctctctagcctccaaccatcgcttcaccaagaagccatcacctcctcctctctatcaagttctctcccctctcttgctgtctctgcttgctgctgctgctgctcgattcggccggcggccatggcgtccagcgcgtcgcggttcatcaagtgcgtcacggtcggggacggcgccgtcggcaagacctgcatgctcatctgctacaccagcaacaagttccccactgattacgtacccactgtttttgacaatttcagtgcaaacgtggtggtcgacggcaccacggtgaatttgggtctctgggatactgcagggcaggaagattacaacagattgaggccgctaagctaccgtggcgccgatgtctttgtgcttgccttctccctagtgagccgagctagctatgagaatgtcatgaagaaggttcagaaaaaaaaaatctcttgcaattaatctgttaaacccataatgtggatgcattcagagagattcagtatttcagttaggtttaccttgtgctttttgtccccttgaagtggttaccagagcttcagcattatgcaccaggggtgccaattgtgttggttgggaccaaattgggtgagttgtgtgacagtgaaagcacaatttccattttattgcatatccccttggctgtgataatagaactggtgtgctgtacatcctctgtctaagcttgtcacttgctggtagtgatttggatgattttgtcttttcattcttggagcatggaattgtgtggtccctaaaaatattgatggacctataatagttactataactcaccaagatttagtccttgcgatgtttaagtaggaactattgcattttgtacgttctgtcttgtaccttgccagtagtatttcaccggctcggatcaatttaccttatcactgttggattatgattcctcaaggaattgtttggaactatcttaatttttatttcactaagattagttgcactacattattttattttctctgaacaaaataaaagtaaatcgtagttaaaaaaagagaggcaaggtttatgaatgagccaatgaggtttctttctctttttttttcactcaaacaatttcaaaacctccataattgatgtttggaaataccaattcttgttttcttcaaatggaaaagtccaactacctccttaaacttatgatagaagtccatttagcacgttgaactttaaaaccggacaaccaaccccctaaactttgcaatgccgtttatataacctcctaaggtgattttgaatagtggttttacgtatttgggatcttaaacaagcagctttaaataacttatataatacatttatgtatcatcaattgtagtttgtcaatttataatatagagtgatgtcatattatttttacaatggtataagtgagagcgaacaagggataaaaagaaatatttaagtgaaaattttaacatatgcgtatgtcacatgatcaaagctcatccaatttatatgccaattaaataaaacaactttgtaaaaccaccttagggttccatatgaatggtattgtaaagttagggggttgaatttccgatttcaaacttcaggattctagatggactttcaatgaaagtttaggggtttatttggactttttctgctttaaattgaagcttatttgttagtaacttaccgaagcaagaattcggtttccggaactcaaagttccaagctcttacctagatgggagacactatattcctttgcagttaatcatctaacatagtaaccactacaattaattaaacagatgataattctctagtactaaatacttaagtaaaataaatgttgcacctgttttaaaaggaaggttgcacttcagtaatattgaatgaaataggctagtgaaatttacctagtaattatgctgatcatgttttcaagtttcttgcatttcgccttggatttttattttttttttgaaaaccaagcctacaatcttatcttgcaacaaatctcaatcagttactgttcaattaaaccacaacttttgtcgaccatacagatcttcgtgaagataaacactacttacttgaccatcctagcttggtgcctgtgactacagcacagggagaggaactccgcaagcacattggcgcaacgtgttacatcgaatgcagctcaaagacacagcagaatgtaaaagctgtgtttgatgctgccatcaaggtagtaatcaagcctccaacaaagcagagggacaggaagaagaagaaaacacggcgcggatgttctttcttctgcaagggtgtcatgtccagaagaaggctagtatgcttcaagtgaacaagaggggttctttgatgagcagagcagaggtctgtgagacaaaatgatgtcttgtgtttgataattgctttatctcaaaagttccagtttgatagttgcatttcc

SEQ ID NO: 16781 - DNA, 1109 bp, Oryza sativa
  ref <308>: DATABASE ACCESSION NUMBER: AK067254
  ref <309>: DATABASE ENTRY DATE: 2001-12-06
gacttcccccattccattccattccattcctttcctttctctctcctccccctcgcgccattaaggctccagagctttctccctcttcacttgggggggactggaagaagaggaggagctcggctcgaggccccaagaatcgagttcgtcggaggcggcggatgccggagaggtccgagctggggcggcagctcccgctgagagggcccctcaaggcactggaggccgacatccaccatgccaacaccatggctaatgctatccagaggaactatggtggagcatgtgtgcagatgaggttgtcgtgcagctcactggcgccattctttctttacctcatccagtggctggattgtggctgctgttatgctcttcccagttatctaggcctttttcacattctcatttgcaaggtttatgcagatggagatagctcagtatcaacgtatgaaaggcgtgcaagccttaaagaattctatgcggatcatctaccctatcctttaaaaagcttgagggtagtttgattaaaagggacctaaaaggaaaagggcaatgtaaagacatagtgagtaggaagcggctcaaagattggaggaagctttgtaacaaggatgtggaaagggaggatgaatgtgggatttgcatggagacatgcaccaagatggttctgcctaattgcagtcatgcaatgtgcataaaatgctacagggactggtatagaagatcagagtcttgccctttctgccaaggaagccttaaacgaattcgctcaagagacctgtgggtgctcacaaattacaatgatgtggttgatcctgtaactctagaaagagaaaatgtgaggcatttctacagttatattgatagtttgcctcttatacttccagataatattttcttcttctactatgattacctactctaatctggaaacaccacaagttgtgtgtgtgaaattatgaaagcggagaaagccatttgtagatttttctttgttagagcttagaaggatggtctttccacctctgacaaaacaccttttactttagtgtagctgcataacacttttaaagcaactgtaaataaaatctgcaggtgaagttcattgt

SEQ ID NO: 16782 - DNA, 1126 bp, Oryza sativa
  ref <308>: DATABASE ACCESSION NUMBER: AK067255
  ref <309>: DATABASE ENTRY DATE: 2001-12-06
gagtttagccccactccgcagtgtctccctcggatcctcgattccgggaagtcgtcctcgtcctcgtccatggcggcggcggcggcggcgaagacgacgacgaggcggcggcggcgaggggtgctggacctggaggcgcagttcgccttcttccggtcgcagcaccggcacccggtgaacgccgcggcgcaccgctcctcgcgtggcccatcctcttcaccggcctcctcgtcctccacttcctcccctccccgcccgcgctcccgctcgacccggcgctcgccctcgccctcgcctacgccgccgcctacgtcgcggccgaccgccgcgcgggggcgctcgcggggctcctcctcgccgccggctgggctgccagccgcgccctcgccgcgcgcctcgggttcgcgctcgcctggaaggccgcgctcgccacccagctcttctgctggacctggcagttcctcggccatggcctcttcgagaagagagggccggctgtgggtgatctccctgaggtgttcttgatggagccattcctcatcttgttgcagatactcaacaagcagtttggctatgagccatacccaggtttcagcaagaatgtggacaagaaaatggaggccattctcagggagaacagggaggagctcaagcagaggaaggccacctgattgattttgattcggaatcgattcgagaggaagtgttacacatgtagaacttagcatctttcgattattacctacgacgattcgtgttgatcatgtagtcatacagtaaaacccgaactgtctgaatatgattgtgatggtgttgtttgaggcttgctctgccgattgctaggaacaatatacaagatgcagagatatgttataaatcctacgcaaatgcgggcatattcagatttgcaagtccaaatgttcacagcgaggttactcttcggcagagcatttcgccaaacagctcaggaacaccactgcagcatgtcttgcattgctcgatctcgttttagcattttgtactgattgtgtcgtttgtatgcatgatgtttcgatgtgatatgtaaattactgaactagcggttgcgctgctgctgtttgtaaaaaacttccgcctgttcatattc
